(19) United States
(12) Patent Application Publication
(10) Pub. No.: US 2022/0267820 A1
(43) Pub. Date: Aug. 25, 2022

(54) Compositions And Methods For Glycosylating Cannabinoid Compounds

(71) Applicant: Trait Biosciences, Inc., Los Alamos, CO (US)

(72) Inventors: Richard T. Sayre, Los Alamos, NM (US); Elton Carvalho Goncalves, Los Alamos, NM (US); Tawanda Zidenga, White Rock, NM (US); Stephanie Willette, Santa Fe, NM (US); Timothy Travers, Los Alamos, NM (US); Erick Lebrun, Los Alamos, NM (US)

(21) Appl. No.: 17/189,063

(22) Filed: Mar. 1, 2021

Related U.S. Application Data
(63) Continuation-in-part of application No. 16/425,744, filed on May 29, 2019.
Application No. 16/425,744 is a continuation-in-part of application No. 16/110,954, filed on Aug. 23, 2018.
Application No. 16/110,954 is a continuation-in-part of application No. PCT/US18/41710, filed on Jul. 11, 2018.
Application No. PCT/US18/41710 is a continuation-in-part of application No. PCT/US18/24409, filed on Mar. 26, 2018.
(60) Provisional application No. 62/531,123, filed on Jul. 11, 2017.
(60) Provisional application No. 62/588,662, filed on Nov. 20, 2017.
(60) Provisional application No. 62/621,166, filed on Jan. 24, 2018.
(60) Provisional application No. 62/983,019, filed on Feb. 28, 2020.

(51) Int. Cl. C12P 19/58; C12P 19/46

(52) U.S. Cl. CPC C12P 19/58; C12P 19/46; C12Y 204/01017

(57) ABSTRACT

The present invention relates generally to the use of novel UDP-glucosyltransferases enzymes having specific activity towards cannabinoid compounds. The present invention further relates generally to the use of novel UGT enzymes having specific activity towards cannabinoid compounds to generate water-soluble cannabinoid glycoside compounds.

### CROSS REFERENCE TO RELATED APPLICATIONS

[0001] This application is a Continuation-in-Part of U.S. application Ser. No. 16/425,744, filed May 29, 2019, which is a Continuation-in-Part of U.S. application Ser. No. 16/110,954, filed Aug. 23, 2018; which is a Continuation-in-Part of International Application No. PCT/US18/41710, filed Jul. 11, 2018; which claims the benefit of and priority to U.S. Provisional Application No. 62/531,123, filed Jul. 11, 2017. International Application No. PCT/US18/41710, filed Jul. 11, 2018, is a Continuation-in-Part of International Application No. PCT/US18/24409, filed Mar. 26, 2018; which claims the benefit of and priority to U.S. Provisional Application Nos. 62/588,662, filed Nov. 20, 2017, and 62/621,166, filed Jan. 24, 2018.

[0002] This Continuation-in-Part application also claims the benefit of and priority to U.S. Provisional Application No. 62/983,019, filed Feb. 28, 2020, which is incorporated herein by reference in its entirety.

### SEQUENCE LISTING

[0003] The instant application contains a Sequence Listing which has been submitted electronically in ASCII format and is hereby incorporated by reference in its entirety. Said ASCII copy, created on Mar. 1, 2021, is named 90425-00360-Sequence-Listing-AF.txt and is 42.6 Mbytes in size.

### TECHNICAL FIELD

[0004] The field of the present invention also relates generally to consumable compositions of matter that may contain one or more water-soluble cannabinoids.

### BACKGROUND

[0005] Cannabinoids are a class of specialized compounds synthesized by Cannabis. They are formed by condensation of terpene and phenol precursors. They include these more abundant forms: Delta-9-tetrahydrocannabinol (THC), cannabidiol (CBD), cannabichromene (CBC), and cannabigerol (CBG). Another cannabinoid, cannabinol (CBN), is formed from THC as a degradation product and can be detected in some plant strains. Typically, THC, CBD, CBC, and CBG occur together in different ratios in the various plant strains.

[0006] Cannabinoids are generally classified into two types, neutral cannabinoids and cannabinoid acids, based on whether they contain a carboxyl group or not. It is known that, in fresh plants, the concentrations of neutral cannabinoids are much lower than those of cannabinoid acids. One strain Cannabis sativa contains approximately 61 compounds belonging to the general class of cannabinoids. These cannabinoids are generally lipophilic, nitrogen-free, mostly phenolic compounds, and are derived biogenetically from a monoterpene and phenol, the acid cannabinoids from a monoterpene and phenol carboxylic acid and have a C21 to base material.

[0007] Cannabinoids also find their corresponding carboxylic acids in plant products. In general, the carboxylic acids have the function of a biosynthetic precursor. For example, these compounds arise in vivo from the THC carboxylic acids by decarboxylation the tetrahydrocannabinols Δ9- and Δ8-THC and CBD from the associated cannabidiol. As generally shown in FIG. 28, THC and CBD may be derived artificially from their acidic precursor's tetrahydrocannabinolic acid (THCA) and cannabidiolic acid (CBDA) by non-enzymatic decarboxylation.

[0008] Cannabinoids are widely consumed, in a variety of forms around the world. Cannabinoid-rich preparations of Cannabis, either in herb (i.e. marijuana) or resin form (i.e., hash oil), are used by an estimated 2.6-5.0% of the world population (UNODC, 2012). Cannabinoid containing pharmaceutical products, either containing natural Cannabis extracts (Sativex®) or the synthetic cannabinoids dronabinol or nabilone, are available for medical use in several countries

[0009] As noted above, Δ-9-tetrahydrocannabinol (also known as THC) is one of the main biologically active components in the Cannabis plant which has been approved by the Food and Drug Administration (FDA) for the control of nausea and vomiting associated with chemotherapy and, more recently, for appetite stimulation of AIDS patients suffering from wasting syndrome. The drug, however, shows other biological activities which lend themselves to possible therapeutic applications, such as in the treatment of glaucoma, migraine headaches, spasticity, anxiety, and as an analgesic.

[0010] Indeed, it is well documented that agents, such as cannabinoids and endocannabinoids that activate cannabinoid receptors in the body modulate appetite, and alleviate nausea, vomiting, and pain (Martin B. R. and Wiley, J. L, Mechanism of action of cannabinoids: how it may lead to treatment of cachexia, emesis and pain, Journal of Supportive Oncology 2: 1-10, 2004), multiple sclerosis (Pertwee, R. G., Cannabinoids and multiple sclerosis, Pharmacol. Ther. 95, 165-174, 2002), and epilepsy (Wallace, M. J., Blair, R. E., Falenski, K. WW., Martin, B. R., and DeLorenzo, R. J. Journal Pharmacology and Experimental Therapeutics, 307: 129-137, 2003). In addition, CB2 receptor agonists have been shown to be effective in treating pain (Clayton N., Marshall F. H., Bountra C., O'Shaughnessy C. T., 2002. CB1 and CB2 cannabinoid receptors are implicated in inflammatory pain. 96, 253-260; Malan T. P., Ibrahim M. M., Vanderah T. W., Makriyannis A., Porreca F., 2002. Inhibition of pain responses by activation of CB(2) cannabinoid receptors. Chemistry and Physics of Lipids 121, 191-200; Malan T. P., Jr., Ibrahim M. M., Deng H., Liu Q., Mata H. P., Vanderah T., Porreca F., Makriyannis A., 2001. CB2 cannabinoid receptor-mediated peripheral antinociception. 93, 239-245.; Quartilho A., Mata H. P., Ibrahim M. M., Vanderah T. W., Porreca F., Makriyannis A., Malan T. P., Jr., 2003. Inhibition of inflammatory hyperalgesia by activation of peripheral CB2 cannabinoid receptors. Anesthesiology 99, 955-960) and multiple sclerosis (Pertwee, R. G., Cannabinoids and multiple sclerosis, Pharmacol. Ther. 95, 165-174, 2002) in animal models.

[0011] More recently, several states have approved use of Cannabis and cannabinoid infused products for both recreational and medical uses. As these new medical and commercial markets have developed, there has grown a need to develop more efficient production and isolation of cannabinoid compounds. Traditional methods of cannabinoid production typically focus on extraction and purification of cannabinoids from raw harvested Cannabis. However, traditional cannabinoid extraction and purification methods have a number of technical and practical problems that limits its usefulness.

### Limitations of Traditional Cannabinoid Production and Extraction Methods

[0012] For example, in U.S. Pat. No. 6,403,126 (Webster et al.), cannabinoids, and other related compounds are isolated from raw harvested Cannabis and treated with an organic solvent, typically a petroleum derived hydrocarbon, or a low molecular-weight alcohol to solubilize the cannabinoids for later isolation. This traditional method is limited in that it relies on naturally grown plant matter that may have been exposed to various toxic pesticides, herbicides and the like. In addition, such traditional extraction methods are imprecise resulting in unreliable and varied concentrations of extracted THC. In addition, many Cannabis strains are grown in hydroponic environments which are also not regulated and can results in the widespread contamination of such strains with chemical and other undesired compounds.

[0013] In another example, US Pat. App. No. 20160326130 (Lekhram et al.), cannabinoids, and other related compounds are isolated from raw harvested Cannabis using, again, a series of organic solvents to convert the cannabinoids cannabinoids into a salt, and then back to its original carboxylic acid form. Similar to Webster, this traditional method is limited in that is relies on naturally grown plant matter that may have been exposed to various toxic pesticides, herbicides and the like. In addition, the multiple organic solvents used in this traditional process must be recovered and either recycled and/or properly disposed of.

[0014] Another traditional method of cannabinoid extraction involves the generation of hash oils utilizing supercritical carbon-dioxide (sCO₂). Under this traditional method, again the dried plant matter is ground and subjected to a sCO₂ extraction environment. The primary extract being initially obtained and further separated. For example, as generally described by CA2424356 (Muller et al.) cannabinoids are extracted with the aid of sCO₂ under supercritical pressure and temperature conditions and by the addition of accessory solvents (modifiers) such as alcohols. Under this process, this supercritical CO₂ evaporates and dissolves into the cannabinoids. However, this traditional process also has certain limiting disadvantages. For example, due to the low solubility in supercritical sCO₂, recovery of the cannabinoids of interest is inconsistent. Additionally, any solvents used must be recycled and pumped back to the extractor, in order to minimize operating costs.

[0015] Another method utilizes butane to extract cannabinoids, in particular high concentrations of THC, from raw harvested Cannabis. Because butane is non-polar, this process does not extract water soluble by-products such as chlorophyll and plant alkaloids. That said, this process may take up to 48 hours and as such is limited in its ability to scale-up for maximum commercial viability. The other major drawback of traditional butane-based extraction processes is the potential dangers of using flammable solvents, as well as the need to ensure all of the butane is fully removed from the extracted cannabinoids.

[0016] Another limiting factor in the viability of these traditional methods of cannabinoid extraction methods is the inability to maintain Cannabis strain integrity. For example, cannabinoids used in medical and research applications, or that are subject to controlled clinical trials, are tightly regulated by various government agencies in the United States and elsewhere. These regulatory agencies require that the Cannabis strains remain chemically consistent over time. Unfortunately, the genetic/chemical compositions of the Cannabis strains change over generations such that they cannot satisfy regulatory mandates present in most clinical trials or certified for use in other pharmaceutical applications.

[0017] Several attempts have been made to address these concerns. For example, efforts have been made to produce cannabinoids in genetically engineered organisms. For example, in U.S. patent application Ser. No. 14/795,816 (Poulos, et al.) Here, the applicant claims to have generated a genetically modified strain of yeast capable of producing a cannabinoid by inserting genes that produce the appropriate enzymes for its metabolic production. However, such application is limited in its ability to produce only a single or very limited number of cannabinoid compounds. This limitation is clinically significant. Recent clinical studies have found that the use of a single isolated cannabinoid as a therapeutic agent is not as effective as treatment with the naturally-occurring “entourage” of primary and secondary cannabinoids associated with various select strains. The system in Poulos is further limited in the ability to account for toxic by-products of cannabinoid synthesis, as well as the directly toxic effects of the insoluble, and/or only lipid-soluble, cannabinoid compounds themselves.

[0018] Additional attempts have been made to chemically synthesize cannabinoids, such as THC. However, the chemical synthesis of various cannabinoids is a costly process when compared to the extraction of cannabinoids from naturally occurring plants. The chemical synthesis of cannabinoids also involves the use of chemicals that are not environmentally friendly, which can be considered as an additional cost to their production. Furthermore, the synthetic chemical production of various cannabinoids has been classified as less pharmacologically active as those extracted from plants such as Cannabis sativa.

[0019] Efforts to generate large-scale Cannabis cell cultures have also raised a number of technical problems. Chief among them is the fact that cannabinoids are cytotoxic. Under natural conditions cannabinoids are generated and then stored extracellularly in small glandular structures called trichomes. Trichomes can be visualized as small hairs or other outgrowths from the epidermis of a Cannabis plant. As a result, in Cannabis cell cultures, the inability to store cannabinoids extracellularly means any accumulation of cannabinoids would be toxic to the cultured cells. Such limitations impair the ability of Cannabis cell cultures to be scaled-up for industrial levels of production.

### Cannabinoid Biosynthesis Toxicity Limits In Vivo Production Systems

[0020] Efforts to generate Cannabis strains/cell cultures that produce or accumulate high-levels of cannabinoids have raised a number of technical problems. Chief among them is the fact that cannabinoid synthesis produces toxic by-products. Notably, both CBDA and THCA synthases require molecular oxygen, in conjunction with a molecule of FAD, to oxidize Cannabigerolic acid (CBGA). Specifically, as shown in FIG. 29, two electrons from the substrate are accepted by an enzyme-bound FAD, and then transferred to molecular oxygen to re-oxidize FAD. CBDA and THCA are synthesized from the ionic intermediates via stereoselective cyclization by the enzymes. The hydride ion is transferred from the reduced flavin to molecular oxygen, resulting in the formation of hydrogen peroxide and re-activation of the flavin for the next cycle. As a result, in addition to producing CBDA and THCA respectively, this reaction produces hydrogen peroxide (H₂O₂) which is naturally toxic to the host cell. Due to this production of a toxic hydrogen peroxide byproduct, cannabinoid synthesis generates a self-limiting feed-back loop preventing high-level production and/or accumulation of cannabinoids in in vivo systems. One way that Cannabis plants deal with these cellular cytotoxic effects is through the use of trichomes for Cannabinoid production and accumulations.

[0021] Cannabis plants deal with this toxicity by sequestering cannabinoid biosynthesis and storage extracellularly in small glandular structures called trichomes as note above. For example, THCA synthase is a water soluble enzyme that is responsible for the production of THC. For example, THC biosynthesis occurs in glandular trichomes and begins with condensation of geranyl pyrophosphate with olivetolic acid to produce cannabigerolic acid (CBGA); the reaction is catalyzed by an enzyme called geranylpyrophosphate:olivatolate geranyltransferase. CBGA then undergoes oxidative cyclization to generate tetrahydrocannabinolic acid (THCA) in the presence of THCA synthase. THCA is then transformed into THC by non-enzymatic decarboxylation. Sub-cellular localization studies using RT-PCR and enzymatic activity analyses demonstrate that THCA synthase is expressed in the secretory cells of glandular trichomes, and then is translocated into the secretory cavity where the end product THCA accumulates. THCA synthase present in the secretory cavity is functional, indicating that the storage cavity is the site for THCA biosynthesis and storage. In this way, the Cannabis is able to produce cannabinoids extracellularly and thereby avoid the cytotoxic effects of these compounds. However, as a result, the ability to access and chemically alter cannabinoids in vivo is impeded by this cellular compartmentalization.

[0022] To address these concerns, some have proposed chemically modifying cannabinoid compounds to reduce their cytotoxic effects. For example, Zipp, et al., have proposed utilizing an in vitro method to produce cannabinoid glycosides. However, this application is limited to in vitro systems only. Specifically, as noted above, cannabinoid synthase enzymes, such as THCA synthase, are water soluble proteins that are exported out of the basal trichome cells into the storage compartment where it is active and catalyzes the synthesis of THCA. Specifically, in order to effectively mediate the cellular export of such cannabinoid synthase, this enzyme contains a 28 amino acid signal peptide that directs its export out of the cell and into the extracellular trichrome where cannabinoid synthesis occurs.

[0023] The foregoing problems regarding the production, detoxification and isolation of cannabinoids may represent a long-felt need for an effective—and economical—solution to the same. While implementing elements may have been available, actual attempts to meet this need may have been lacking to some degree. This may have been due to a failure of those having ordinary skill in the art to fully appreciate or understand the nature of the problems and challenges involved.

[0024] As a result of this lack of understanding, attempts to meet these long-felt needs may have failed to effectively solve one or more of the problems or challenges here identified. These attempts may even have led away from the technical directions taken by the present inventive technology and may even result in the achievements of the present inventive technology being considered to some degree an unexpected result of the approach taken by some in the field.

[0025] As will be discussed in more detail below, the current inventive technology overcomes the limitations of traditional cannabinoid production systems while meeting the objectives of a truly effective and scalable cannabinoid production, modification and isolation system.

### SUMMARY OF THE INVENTION(S)

[0026] Generally, the inventive technology relates to the field of chemical modification and isolation in yeast suspension cultures. The present inventive technology further relates to improved systems and methods for the modification and isolation of pharmaceutically active components from plant materials. In one embodiment, the inventive technology may encompass a novel system for the generation of chemically modified-cannabinoid compounds in a yeast suspension culture. The inventive technology may include systems and methods for high-efficiency chemical modification and isolation of cannabinoid compounds from yeast suspension cultures. In this embodiment, various select cannabinoid compounds may be chemically modified into soluble and non-toxic configurations.

[0027] One aim of the current inventive technology includes improved systems and methods for the modification of cannabinoids in a sterile yeast and/or plant culture system. In one embodiment, the inventive technology may include the production of a sterile yeast and/or plant cell suspension culture. The inventive technology may allow for certain transgenes to be introduced into these yeast strains and/or plant to transiently modify the chemical structure of the cannabinoid compounds. This transient modification may render the cannabinoids soluble in water. Such modifications may also alter the rate at which the cannabinoids are metabolized generating a modified cannabinoid with enhanced kinetics that may be used in certain therapeutic applications or as a prodrug. These transiently modified cannabinoids, aided by their modified chemical structure, may be allowed to accumulate at higher than native levels without having a deleterious effect on the cultured yeast and/or plant cells. Being soluble, they may also be secreted through endogenous and/or exogenous ABC or other trans-membrane protein transporters into the culture medium for later harvesting and isolation. It is noted that naturally occurring cannabinoids are strong inhibitors of ABC transporters. These transiently modified cannabinoids may be harvested and isolated from the aforementioned culture systems, and then enzymatically restored to their original chemical structure. Other embodiments may allow for the regulation of cannabinoid modification and isolation. In such embodiment, discreet and known amounts of cannabinoids may be introduced into a yeast and/or plant suspension culture and transiently modified. Later, the modified cannabinoids may be extracted from the cell culture and isolated such that the quantity and relative ratios of the various cannabinoids is known and quantifiable. In this manner the isolated cannabinoid extract may be chemically consistent and as such, easily dosable for both pharmaceutical and/or recreational applications.

[0028] Additional aims of the inventive technology may include the transient modification of cannabinoid compounds to render them water-soluble in yeast cell culture systems. In a preferred embodiment, such soluble cannabinoids may have reduced cytotoxicity to yeast cells in culture and may further be actively transported out of the cell and allowed to accumulate at levels that would normally have a deleterious effect on the cell culture. Additional embodiments may include the isolation of these transiently modified cannabinoids followed by enzymatic conversion or reconstitution to their original and/or partially modified structure.

[0029] Another aim of the current invention may include the systems, methods and compositions for the generation of water-soluble cannabinoid compounds. Another aim of the current inventive technology includes the generation of various compositions of matter containing water-soluble cannabinoids. In one preferred embodiment, such compositions of matter may contain water-soluble cannabinoids generated in an in vitro and/or in vivo system.

[0030] Additional aims of the invention may include delivery systems and compositions that include water-soluble cannabinoids, preferably glycosylated and/or acetylated cannabinoids. Additional embodiments may further include methods and systems for the production of compositions that include water-soluble cannabinoids, preferably glycosylated and/or acetylated cannabinoids.

[0031] Another aim of the current invention may include systems, methods and compositions for the delivery of water-soluble cannabinoids, preferably glycosylated and/or acetylated cannabinoids as a prodrug. Included in this invention may include novel prodrug compositions.

[0032] One aim of the invention may include systems, methods and compositions for the in vivo production, modification and isolation of cannabinoid compounds from Cannabis plants. In particular, the invention provides systems and methods for high level in vivo biosynthesis of water-soluble cannabinoids in yeast. In one preferred embodiment, the suspension culture may include the biotransformation of one or more cannabinoids in yeast, or other plant cells into a water-soluble form.

[0033] One aim of the invention may include systems, methods and compositions for the in vivo production, modification and isolation of cannabinoid compounds from Cannabis plants. In particular, the invention provides systems and methods for high level in vivo biosynthesis of water-soluble cannabinoids in cell suspension cultures. In one preferred embodiment, the suspension culture may include a yeast suspension culture, a tobacco or other plant cell suspension culture or a Cannabis plant cell suspension culture.

[0034] The current inventive technology includes systems and methods for enhanced production and/or accumulation of cannabinoids. In one embodiment, the invention may include systems and methods for enhanced production and/or accumulation of cannabinoids in an in vivo system, such as a yeast, or plant cell suspension culture.

[0035] Another aim of the current invention may include the generation of genetically modified plants cells that may further be in a suspension culture that may overexpress certain endogenous/exogenous genes that result in the over-production and/or accumulation of cannabinoids above wild-type levels. In one preferred embodiment, such transgenic plant cell cultures may exhibit enhanced production and accumulation of cannabinoid precursor compounds, such as THCA (tetrahydrocannabinolic acid), CBCA (cannabichromenic acid), and CBDA (cannabidiolic acid). Such transgenic plant cells in culture may additionally exhibit enhanced production and localized accumulation of cannabinoids, such as THCs, CBCs and CBDs.

[0036] An additional aim of the current invention may include the generation of genetically modified plant cells in culture expressing certain endogenous/exogenous that result in the enhanced biomodification of cannabinoids. In one preferred embodiment, such cultured transgenic plant cells may exhibit enhanced modification of cannabinoids including hydroxylation, and/or acetylation, and/or glycosylation. In additional preferred embodiments, such transgenic plants may exhibit enhanced modification of cannabinoids including acetylation and glycosylation, such as an O acetylated glycoside form. For example, acetylation adds an acetyl group (—CH₃OOH) to a cannabinoid such that the carboxylate group is acidic and charged at neutral pH making it highly water-soluble.

[0037] Another aim of the current invention may include the generation of genetically modified yeast strains overexpressing certain endogenous/exogenous genes that result in the over-production and/or accumulation of cannabinoids above wild-type levels. In one preferred embodiment, such transgenic yeast may exhibit enhanced production and localized accumulation of cannabinoid precursor compounds, such as THCA (tetrahydrocannabinolic acid), CBCA (cannabichromenic acid), and CBDA (cannabidiolic acid). Such transgenic plants may additionally exhibit enhanced production and localized accumulation of cannabinoids, such as THCs, CBCs and CBDs.

[0038] An additional aim of the current invention may include the generation of genetically modified plants expressing certain genes that result in the modification of cannabinoids into water-soluble forms. In one preferred embodiment, such transgenic yeast may exhibit enhanced modification of cannabinoids including hydroxylation, and/or acetylation, and/or glycosylation. In additional preferred embodiments, such transgenic plants may exhibit enhanced modification of cannabinoids including acetylation and glycosylation, such as an O acetyl glycoside form. For example, acetylation adds an acetate group (—CH₃COOH) to a cannabinoid such that the carboxylate group is acidic and charged at neutral pH making it highly water-soluble.

[0039] One aim of the current inventive technology may be to generate genetically modified, or transgenic plant cells in a suspension culture that overexpresses one or more transcription factors, such as myb, that enhance metabolite flux through the cannabinoid biosynthetic pathway. In one preferred embodiment, these transcription factors may include various analogues. In certain preferred embodiments, one or more of these transgenes may be operably-linked to one or more promoters.

[0040] One aim of the current inventive technology may be to generate genetically modified or transgenic Cannabis plant cells in a suspension culture that overexpresses one or more transcription factors, such as myb, that enhance metabolite flux through the cannabinoid biosynthetic pathway. In one preferred embodiment, these transcription factors may include various analogues. In certain preferred embodiment, one or more of these transgenes may be operably-linked to one or more promoters.

[0041] Another aim of the current inventive technology may be to generate a genetically modified or transgenic tobacco cell culture that overexpresses one or more transcription factors that enhance metabolite flux through the cannabinoid biosynthetic pathway. In one preferred embodiment, these transgenes may be operably linked to one or more promoters.

[0042] Yet, another aim of the current inventive technology may be to generate a genetically modified or transgenic plant cell that expresses an enzyme that is configured to be capable of reducing hydrogen peroxide (H₂O₂) levels that may be generated during cannabinoid synthesis. In one preferred embodiment, the current inventive technology may be to generate a genetically modified or transgenic tobacco and/or Cannabis plant cell in a suspension culture that expresses a catalase protein. In this embodiment, this catalase protein may reduce hydrogen peroxide (H₂O₂) levels generated during cannabinoid synthesis.

[0043] Yet, another aim of the current inventive technology may be to generate genetically modified plants, plant cells and/or yeast cells that expresses an enzyme that is configured to be capable of reducing hydrogen peroxide (H₂O₂) levels that may be generated during cannabinoid synthesis. In one preferred embodiment, the current inventive technology may be to generate a genetically modified or transgenic yeast cell in a suspension culture that expresses a catalase protein. In this embodiment, this catalase protein may reduce hydrogen peroxide (H₂O₂) levels generated during cannabinoid synthesis.

[0044] Another aim of the current invention may include the introduction of one or more compounds to facilitate the chemical decomposition of hydrogen peroxide resulting from cannabinoids biosynthesis. In one preferred embodiment, one or more chemicals, metal ions, and/or catalysts may be introduced into a growth media to detoxify hydrogen peroxide (H₂O₂) in both yeast and plant cell cultures. It should be noted that additional cell cultures and cell lines may be contemplated in the invention. For example, CHO cells, HeLa cells and insect cell lines, like SF-9 cells may be genetically modified as generally described herein to generate water-soluble cannabinoids.

[0045] Additional embodiments of the inventive technology may include the transient modification of cannabinoid compounds to reduce and/or eliminate their cytotoxicity in plants or plant cell culture systems. In a preferred embodiment, such transiently modified cannabinoids may be allowed to accumulate at levels that would normally have a deleterious effect on the cell. Additional embodiments may include the isolation of these transiently modified cannabinoids followed by enzymatic conversion or reconstitution to their original and/or partially modified structure.

[0046] Another aim of the invention may include the generation of a transgenic plant and or plant cell cultures that may over express endogenous genes that may be configured to modify cannabinoids. Additional aim may include the co-expression of heterologous transcription factors that may increase cannabinoid production. Another aim of the invention may include the co-expression of heterologous genes that detoxify the hydrogen peroxide byproducts generated through cannabinoid biosynthesis. Co-expression of such genes may be additive with the co-expression of genes configured to modify and/or localize cannabinoid biomodifications.

[0047] Another aim of the invention may include systems, methods and compositions for the generation of a yeast cannabinoid production system coupled with systems, methods and compositions for the reducing hydrogen peroxide toxicity resulting from cannabinoid synthesis. Another aim of the invention may include systems, methods and compositions for the generation of a yeast cannabinoid production system coupled with systems, methods and compositions for the biomodification of such yeast generated cannabinoids into functionalized as well as water-soluble forms as generally described herein.

[0048] Another aim of the invention includes compositions of novel water-soluble cannabinoids and their method or manufacture. Still other aims of the current invention include additional compositions of matter that incorporate one or more water-soluble cannabinoids.

[0049] One aspect of the present invention relates generally to the identification novel UDP-glucosyltransferases (UDP-UGTs or UGTs) enzymes having glycosylation activity towards one or more cannabinoid compounds. In one preferred aspect, the present invention includes the identification of novel UGTs according to the amino acid sequences identified as SEQ ID NOs. 1-9181, and UGTs having 90% sequence identity with SEQ ID NOs. 1-9181, that have glycosylation activity towards one or more cannabinoid compounds, and preferably THC and CBD.

[0050] One aspect of the present invention further relates generally to the use of novel UGT enzymes having specific activity towards one or more cannabinoid compounds to generate water-soluble cannabinoid glycoside compounds in in vitro, ex vivo, and in vivo systems. In one preferred aspect, the present invention use of novel UGT enzymes according to the amino acid sequences identified as SEQ ID NOs. 1-9181, and UGTs having 90% sequence identity with SEQ ID NOs. 1-9181, that have glycosylation activity towards one or more cannabinoid compounds, and preferably THC and CBD, in in vitro, ex vivo, and in vivo systems. In one preferred aspect of the invention, an in vivo system may include a whole organism system, such as a plant, or cell culture, such as a plant cell culture, an algal cell culture, a fungi cell culture, or a microorganism cell culture, such as a bacterial or yeast cell culture.

[0051] One aspect of the present invention further relates generally to novel methods of generating water-soluble cannabinoid glycoside compounds, and preferably THC-glycosides and CBD-glycosides, comprising the step of introducing one or more cannabinoids to a UGT enzyme having specific activity towards one or more cannabinoid compounds according to the amino acid sequences identified as SEQ ID NOs. 1-9181, and UGTs having 90% sequence identity with SEQ ID NOs. 1-9181, that have glycosylation activity towards one or more cannabinoid compounds, in in vitro, ex vivo, and in vivo systems. In one preferred aspect of the invention, an in vivo system may include a whole organism system, such as a plant, or cell culture, such as a plant cell culture, an algal cell culture, a fungi cell culture, or a microorganism cell culture, such as a bacterial or yeast cell culture. In other embodiments, an ex vivo system may include a bioreactor system. In other aspects, an in vitro system may include chemical conversion of cannabinoids into water-soluble cannabinoid glycoside compounds.

[0052] Yet, another aspect of the current inventive technology may include the generation of genetically modified organisms configured to produce water-soluble cannabinoid glycoside compounds. In one preferred aspect, a plant, a plant cell, an algal cell, a fungi, a bacteria, or a yeast cell, may be genetically modified to express a nucleotide sequence encoding one or more UGTs that have glycosylation activity towards one or more cannabinoid compounds, and preferably a UGT selected from the group of nucleotide sequences consisting of: a nucleotide sequence encoding an amino acid sequence according to SEQ ID NOs. 1-9181, and a nucleotide sequence encoding an amino acid sequence having 90% sequence identity with SEQ ID NOs. 1-9181.

[0053] Another aspect of the current inventive technology includes the isolated amino acid sequences encoding one or more UGTs that have glycosylation activity towards one or more cannabinoid compounds according to SEQ ID NOs. 1-9181, and amino acid sequence having 90% sequence identity with SEQ ID NOs. 1-9181.

[0054] Another aspect of the current inventive technology includes a nucleotide sequence encoding one or more UGTs that have glycosylation activity towards one or more cannabinoid compounds according to SEQ ID NOs. 1-9181, and a nucleotide sequence encoding an amino acid sequence having 90% sequence identity with SEQ ID NOs. 1-9181.

[0055] Another aspect of the current inventive technology includes an expression vector having a nucleotide sequence encoding one or more UGTs that have glycosylation activity towards one or more cannabinoid compounds according to SEQ ID NOs. 1-9181, and a nucleotide sequence encoding an amino acid sequence having 90% sequence identity with SEQ ID NOs. 1-9181, operably linked to a promoter.

[0056] Another aspect of the current inventive technology includes one or more organisms, such as a plant, plant cell, bacteria, algae, fungi, or yeast cell, transformed by an expression vector having a nucleotide sequence encoding one or more UGTs that have glycosylation activity towards one or more cannabinoid compounds according to SEQ ID NOs. 1-9181, and a nucleotide sequence encoding an amino acid sequence having 90% sequence identity with SEQ ID NOs. 1-9181, operably linked to a promoter.

[0057] One aspect of the present invention further relates generally to novel methods of generating water-soluble cannabinoid glycoside compounds, and preferably THC-glycosides and CBD-glycosides, comprising the step of introducing one or more cannabinoids to a UGT enzyme having specific activity towards one or more cannabinoid compounds according to the amino acid sequences identified as belonging to the Gram+ of class of UGTs as described herein, in an in vitro, ex vivo, and in vivo systems. In this preferred embodiment, the Gram+ of class of UGTs may include the following structural groups: 5tzk (SEQ ID NOs. 1-1182), 3bcv (SEQ ID NOs. 1183-1222), Shea (SEQ ID NOs. 1223-1805), 6h21 (SEQ ID NOs. 1806-1825), and UGTs having 90% sequence identity with SEQ ID NOs. 1-1825, that have glycosylation activity towards one or more cannabinoid compounds. In one preferred aspect of the invention, an in vivo system may include a whole organism system, such as a plant, or cell culture, such as a plant cell culture, an algal cell culture, a fungi cell culture, or a microorganism cell culture, such as a bacterial or yeast cell culture. In other embodiments, an ex vivo system may include a bioreactor system. In other aspects, an in vitro system may include chemical conversion of cannabinoids into water-soluble cannabinoid glycoside compounds.

[0058] In another aspect, one or more of cannabinoid glycoside compounds identified as: 36B, 36C, 36D, 37A, 37B, 37C, 37D, 37E and 37F, may be generated through the step of introducing one or more cannabinoids to a UGT enzyme having specific activity towards one or more cannabinoid compounds according to the amino acid sequences identified as belonging to the Gram+ of class of UGTs as described herein, in an in vitro, ex vivo, and in vivo systems. In this preferred embodiment, the Gram+ of class of UGTs may include the following structural groups: 5tzk (SEQ ID NOs. 1-1182), 3bcv (SEQ ID NOs. 1183-1222), Shea (SEQ ID NOs. 1223-1805), 6h21 (SEQ ID NOs. 1806-1825), and UGTs having 90% sequence identity with SEQ ID NOs. 1-1825, that have glycosylation activity towards one or more cannabinoid compounds.

[0059] Yet, another aspect of the current inventive technology may include the generation of genetically modified organisms configured to produce water-soluble cannabinoid glycoside compounds. In one preferred aspect, a plant, a plant cell, an algal cell, a fungi, a bacteria, or a yeast cell, may be genetically modified to express a nucleotide sequence encoding one or more Gram+class of UGTs that have glycosylation activity towards one or more cannabinoid compounds, and preferably a UGT selected from the group of nucleotide sequences consisting of: a nucleotide sequence encoding an amino acid sequence according to SEQ ID NOs. 1-1825, and a nucleotide sequence encoding an amino acid sequence having 90% sequence identity with SEQ ID NOs. 1-1825.

[0060] Another aspect of the current inventive technology includes the isolated amino acid sequences encoding one or more Gram+class of UGTs that have glycosylation activity towards one or more cannabinoid compounds according to SEQ ID NOs. 1-1825, and amino acid sequence having 90% sequence identity with SEQ ID NOs. 1-1825.

[0061] Another aspect of the current inventive technology includes a nucleotide sequence encoding one or more Gram+class of UGTs that have glycosylation activity towards one or more cannabinoid compounds according to SEQ ID NOs. 1-1825, and a nucleotide sequence encoding an amino acid sequence having 90% sequence identity with SEQ ID NOs. 1-1825.

[0062] Another aspect of the current inventive technology includes an expression vector having a nucleotide sequence encoding one or more Gram+class of UGTs that have glycosylation activity towards one or more cannabinoid compounds according to SEQ ID NOs. 1-9181, and a nucleotide sequence encoding an amino acid sequence having 90% sequence identity with SEQ ID NOs. 1-1825, operably linked to a promoter.

[0063] Another aspect of the current inventive technology includes one or more organisms, such as a plant, plant cell, bacteria, algae, fungi, or yeast cell, transformed by an expression vector having a nucleotide sequence encoding one or more Gram+class of UGTs that have glycosylation activity towards one or more cannabinoid compounds according to SEQ ID NOs. 1-1825, and a nucleotide sequence encoding an amino acid sequence having 90% sequence identity with SEQ ID NOs. 1-1825, operably linked to a promoter.

[0064] One aspect of the present invention further relates generally to novel methods of generating water-soluble cannabinoid glycoside compounds, and preferably THC-glycosides and CBD-glycosides, comprising the step of introducing one or more cannabinoids to a UGT enzyme having specific activity towards one or more cannabinoid compounds according to the amino acid sequences identified as belonging to the GT-A of class of UGTs as described herein, in an in vitro, ex vivo, and in vivo systems. In this preferred embodiment, the GT-A of class of UGTs may include the following structural groups: 1g9r (SEQ ID NOs. 1826-1828), 2z86 (SEQ ID NOs. 1829-1985), 3ckj (SEQ ID NOs. 1986-2453), 3e25 (SEQ ID NOs. 2454-3126), 3fly (SEQ ID NOs. 3127-3430), 4dec (SEQ ID NOs. 3431-3481), 5m1z (SEQ ID NOs. 3482-3639), 5nv4 (SEQ ID NOs. 3640-3693), 6fsn (SEQ ID NOs. 3694-4699), 6p61 (SEQ ID NOs. 4700-5259) and UGTs having 90% sequence identity with SEQ ID NOs. 1826-5259, that have glycosylation activity towards one or more cannabinoid compounds. In one preferred aspect of the invention, an in vivo system may include a whole organism system, such as a plant, or cell culture, such as a plant cell culture, an algal cell culture, a fungi cell culture, or a microorganism cell culture, such as a bacterial or yeast cell culture. In other embodiments, an ex vivo system may include a bioreactor system. In other aspects, an in vitro system may include chemical conversion of cannabinoids into water-soluble cannabinoid glycoside compounds.

[0065] In another aspect, one or more of cannabinoid glycoside compounds identified as: 10B, 10C, 10D, 11A, 11B, 11C, 11D, 11E and 11F, may be generated through the step of introducing one or more cannabinoids to a UGT enzyme having specific activity towards one or more cannabinoid compounds according to the amino acid sequences identified as belonging to the Gram+ of class of UGTs as described herein, in an in vitro, ex vivo, and in vivo systems. In this preferred embodiment, the GT-A of class of UGTs may include the following structural groups: 1g9r (SEQ ID NOs. 1826-1828), 2z86 (SEQ ID NOs. 1829-1985), 3ckj (SEQ ID NOs. 1986-2453), 3e25 (SEQ ID NOs. 2454-3126), 3fly (SEQ ID NOs. 3127-3430), 4dec (SEQ ID NOs. 3431-3481), 5m1z (SEQ ID NOs. 3482-3639), 5nv4 (SEQ ID NOs. 3640-3693), 6fsn (SEQ ID NOs. 3694-4699), 6p61 (SEQ ID NOs. 4700-5259) and UGTs having 90% sequence identity with SEQ ID NOs. 1826-5259, that have glycosylation activity towards one or more cannabinoid compounds.

[0066] Yet, another aspect of the current inventive technology may include the generation of genetically modified organisms configured to produce water-soluble cannabinoid glycoside compounds. In one preferred aspect, a plant, a plant cell, an algal cell, a fungi, a bacteria, or a yeast cell, may be genetically modified to express a nucleotide sequence encoding one or more GT-A class of UGTs that have glycosylation activity towards one or more cannabinoid compounds, and preferably a UGT selected from the group of nucleotide sequences consisting of: a nucleotide sequence encoding an amino acid sequence according to SEQ ID NOs. 1826-5259, and a nucleotide sequence encoding an amino acid sequence having 90% sequence identity with SEQ ID NOs. 1826-5259.

[0067] Another aspect of the current inventive technology includes the isolated amino acid sequences encoding one or more GT-A class of UGTs that have glycosylation activity towards one or more cannabinoid compounds according to SEQ ID NOs. 1826-5259, and amino acid sequence having 90% sequence identity with SEQ ID NOs. 1826-5259.

[0068] Another aspect of the current inventive technology includes a nucleotide sequence encoding one or more GT-A class of UGTs that have glycosylation activity towards one or more cannabinoid compounds according to SEQ ID NOs. 1826-5259, and a nucleotide sequence encoding an amino acid sequence having 90% sequence identity with SEQ ID NOs. 1826-5259.

[0069] Another aspect of the current inventive technology includes an expression vector having a nucleotide sequence encoding one or more GT-A class of UGTs that have glycosylation activity towards one or more cannabinoid compounds according to SEQ ID NOs. 1826-5259, and a nucleotide sequence encoding an amino acid sequence having 90% sequence identity with SEQ ID NOs. 1826-5259, operably linked to a promoter.

[0070] Another aspect of the current inventive technology includes one or more organisms, such as a plant, plant cell, bacteria, algae, fungi, or yeast cell, transformed by an expression vector having a nucleotide sequence encoding one or more GT-A class of UGTs that have glycosylation activity towards one or more cannabinoid compounds according to SEQ ID NOs. 1826-5259, and a nucleotide sequence encoding an amino acid sequence having 90% sequence identity with SEQ ID NOs. 1826-5259, operably linked to a promoter.

[0071] One aspect of the present invention further relates generally to novel methods of generating water-soluble cannabinoid glycoside compounds, and preferably THC-glycosides and CBD-glycosides, comprising the step of introducing one or more cannabinoids to a UGT enzyme having specific activity towards one or more cannabinoid compounds according to the amino acid sequences identified as belonging to the GT-B of class of UGTs as described herein, in an in vitro, ex vivo, and in vivo systems. In this preferred embodiment, the GT-B of class of UGTs may include the following structural groups: 2acv (SEQ ID NOs. 5260-6290), 2iya (SEQ ID NOs. 6290-6953), 3hbf (SEQ ID NOs. 6954-7484), 5gl5 (SEQ ID NOs. 7485-7998), 3c48 (SEQ ID NOs. 7999-8243), 5nlm (SEQ ID NOs. 8244-8486), 5du2 (SEQ ID NOs. 8487-8612), 2clx (SEQ ID NOs. 8613-8688), 5zfk (SEQ ID NOs. 8689-8758), 4rel (SEQ ID NOs. 8759-8816), 3otg (SEQ ID NOs. 8817-8873), 5v2j (SEQ ID NOs. 8874-8921), 2r60 (SEQ ID NOs. 8922-8965), 4amg (SEQ ID NOs. 8966-9007), 4n9w (SEQ ID NOs. 9008-9046), 2pq6 (SEQ ID NOs. 9047-9082), 4wyi (SEQ ID NOs. 9083-9111), 6bk0 (SEQ ID NOs. 9112-9133), 6inf (SEQ ID NOs. 9134-9149), 3ia7 (SEQ ID NOs. 9150-9158), 5d01 (SEQ ID NOs. 9159-9165), 6ij9 (SEQ ID NOs. 9166-9170), 6d9t (SEQ ID NOs. 9171-9175), 2jjm (SEQ ID NOs. 9176-9180), 3mbo (SEQ ID NO. 9181) and UGTs having 90% sequence identity with SEQ ID NOs. 5260-9181, that have glycosylation activity towards one or more cannabinoid compounds. In one preferred aspect of the invention, an in vivo system may include a whole organism system, such as a plant, or cell culture, such as a plant cell culture, an algal cell culture, a fungi cell culture, or a microorganism cell culture, such as a bacterial or yeast cell culture. In other embodiments, an ex vivo system may include a bioreactor system. In other aspects, an in vitro system may include chemical conversion of cannabinoids into water-soluble cannabinoid glycoside compounds.

[0072] In another aspect, one or more of cannabinoid glycoside compounds identified as: 36B, 36C, 36D, 36A, 36B, 36C, 36D, 36E and 36F, may be generated through the step of introducing one or more cannabinoids to a UGT enzyme having specific activity towards one or more cannabinoid compounds according to the amino acid sequences identified as belonging to the Gram+ of class of UGTs as described herein, in an in vitro, ex vivo, and in vivo systems. In this preferred embodiment, the GT-B of class of UGTs may include the following structural groups: 2acv (SEQ ID NOs. 5260-6290), 2iya (SEQ ID NOs. 6290-6953), 3hbf (SEQ ID NOs. 6954-7484), 5gl5 (SEQ ID NOs. 7485-7998), 3c48 (SEQ ID NOs. 7999-8243), 5nlm (SEQ ID NOs. 8244-8486), 5du2 (SEQ ID NOs. 8487-8612), 2clx (SEQ ID NOs. 8613-8688), 5zfk (SEQ ID NOs. 8689-8758), 4rel (SEQ ID NOs. 8759-8816), 3otg (SEQ ID NOs. 8817-8873), 5v2j (SEQ ID NOs. 8874-8921), 2r60 (SEQ ID NOs. 8922-8965), 4amg (SEQ ID NOs. 8966-9007), 4n9w (SEQ ID NOs. 9008-9046), 2pq6 (SEQ ID NOs. 9047-9082), 4wyi (SEQ ID NOs. 9083-9111), 6bk0 (SEQ ID NOs. 9112-9133), 6inf (SEQ ID NOs. 9134-9149), 3ia7 (SEQ ID NOs. 9150-9158), 5d01 (SEQ ID NOs. 9159-9165), 6ij9 (SEQ ID NOs. 9166-9170), 6d9t (SEQ ID NOs. 9171-9175), 2jjm (SEQ ID NOs. 9176-9180), 3mbo (SEQ ID NO. 9181) and UGTs having 90% sequence identity with SEQ ID NOs. 5260-9181, that have glycosylation activity towards one or more cannabinoid compounds.

[0073] Yet, another aspect of the current inventive technology may include the generation of genetically modified organisms configured to produce water-soluble cannabinoid glycoside compounds. In one preferred aspect, a plant, a plant cell, an algal cell, a fungi, a bacteria, or a yeast cell, may be genetically modified to express a nucleotide sequence encoding one or more GT-B class of UGTs that have glycosylation activity towards one or more cannabinoid compounds, and preferably a GT-B class of UGT selected from the group of nucleotide sequences consisting of: a nucleotide sequence encoding an amino acid sequence according to SEQ ID NOs. 5260-9181, and a nucleotide sequence encoding an amino acid sequence having 90% sequence identity with SEQ ID NOs. 1-9181.

[0074] Another aspect of the current inventive technology includes the isolated amino acid sequences encoding one or more GT-B class of UGTs that have glycosylation activity towards one or more cannabinoid compounds according to SEQ ID NOs. 5260-9181, and amino acid sequence having 90% sequence identity with SEQ ID NOs. 5260-9181.

[0075] Another aspect of the current inventive technology includes a nucleotide sequence encoding one or more GT-B class of UGTs that have glycosylation activity towards one or more cannabinoid compounds according to SEQ ID NOs. 5260-9181, and a nucleotide sequence encoding an amino acid sequence having 90% sequence identity with SEQ ID NOs. 5260-9181.

[0076] Another aspect of the current inventive technology includes an expression vector having a nucleotide sequence encoding one or more GT-B class of UGTs that have glycosylation activity towards one or more cannabinoid compounds according to SEQ ID NOs. 1-9181, and a nucleotide sequence encoding an amino acid sequence having 90% sequence identity with SEQ ID NOs. 5260-9181, operably linked to a promoter.

[0077] Another aspect of the current inventive technology includes one or more organisms, such as a plant, plant cell, bacteria, algae, fungi, or yeast cell, transformed by an expression vector having a nucleotide sequence encoding one or more GT-B class of UGTs that have glycosylation activity towards one or more cannabinoid compounds according to SEQ ID NOs. 5260-9181, and a nucleotide sequence encoding an amino acid sequence having 90% sequence identity with SEQ ID NOs. 5260-9181, operably linked to a promoter.

[0078] One aspect of the current inventive technology includes improved systems and methods for the bioconversion of cannabinoid compounds into water-soluble cannabinoid glycosides, or water-soluble acetyl cannabinoid glycosides in a bacterial, yeast, or plant cell culture system. In another preferred aspect, a preferred plant cell culture system may include a Cannabis suspension cell culture, or a tobacco plant cell culture.

[0079] Another aspect of the current inventive technology includes one or more consumer products, or pharmaceutical preparations having at least one cannabinoid glycoside generated in an in vitro, ex vivo, or in vivo system by the action of one or more UGTs that have glycosylation activity towards one or more cannabinoid compounds according to SEQ ID NOs. 1-9181, and a nucleotide sequence encoding an amino acid sequence having 90% sequence identity with SEQ ID NOs. 1-9181.

### BRIEF DESCRIPTION OF THE FIGURES

[0080] The above and other aspects, features, and advantages of the present disclosure will be better understood from the following detailed descriptions taken in conjunction with the accompanying figures, all of which are given by way of illustration only, and are not limiting the presently disclosed embodiments, in which:

[0081] FIGS. 1A-D. Representative Chromatographic Elution profile of CBGA Glycosides found in in vitro Assays. Chromatograms A, B, and C represent respective extracted ion chromatograms for each glycoside product. Chromatogram D is representative of the total ion chromatogram. Peak Intensities are illustrated as relative abundance to most abundant peak in each respective chromatogram.

[0082] FIGS. 2A-D. Representative Chromatographic Elution profiles of Functionalized CBGA and Glycosides found in in vitro assays. Chromatograms A, B, and C represent respective extract rated ion chromatograms for each product. Chromatogram D is representative of the total ion chromatogram. Peak Intensities are illustrated as relative abundance to most abundant peak in each respective chromatogram.

[0083] FIGS. 3A-E. Representative Chromatographic Elution profile of CBDA Glycosides profiles found in Leaf Extracts. Chromatograms A, B, C, and D represent respective extract rated ion chromatograms for each glycoside product. Chromatogram E is representative of the total ion chromatogram. Peak Intensities are illustrated as relative abundance to most abundant peak in each respective chromatogram.

[0084] FIGS. 4A-D. Chromatographic Elution of Functionalized CBDA and Functionalized Glycosides in Leaf Extracts. Chromatograms A, B, and C represent respective extract rated ion chromatograms for each product. Chromatogram D is representative of the total ion chromatogram. Peak Intensities are illustrated as relative abundance to most abundant peak in each respective chromatogram.

[0085] FIG. 5. Gene construct for expression of cytochrome P450 (CYP3A4) gene, (SEQ ID NO. 9182), expressing the cytochrome P450 (CYP3A4) protein (SEQ ID NO. 9183) and P450 oxidoreductase gene (oxred) (SEQ ID NO. 9184) expressing the P450 oxidoreductase protein (SEQ ID NO. 9185), in plants. Both genes were driven by the constitutive 35S promoter (35S) and featured 5′ untranslated regions from Arabidopsis thaliana alcohol dehydrogenase (AtADH) as translational enhancers.

[0086] FIG. 6. Confirmation of expression of CYP3A4 and P450 oxidoreductase in tobacco leaves. CB1-CB5, biological replicates of leaves infiltrated with the CYP3A4/P450 oxidoreductase; WT=wild type tobacco leaves with no infiltration. L=1 kb plus ladder (Thermo Fisher Scientific, USA). The arrows show the expected (500 bp) band indicating expression of the transgene.

[0087] FIG. 7. Enhanced glycosylation of cannabinoids in P450-over expressing N. benthamiana plants. CB1-CB5 are biological reps overexpressing CYP3A4+P450 oxidoreductase, P_control is the P19 silencing suppressor (‘empty vector’ control). Vertical axis shows relative amounts expressed as peak area per g fresh weight.

[0088] FIG. 8. Gene construct for the cytosol and suspension culture cannabinoid production system. 35S, Cauliflower mosaic 35S promoter; HSPt, HSP terminator; 35PPDK, hybrid promoter consisting of the cauliflower mosaic virus 35S enhancer fused to the maize C4PPDK basal promoter (Yoo et al. 2007); 76G1, UDP glycosyltransferase from Stevia rebaudiana; ABCG2, human multi-drug transporter.

[0089] FIGS. 9A-C. Demonstrates RT-PCR confirmation of expression of CBDA synthase (a), UDP glycosyltransferase (b) and ABCG2 (c) in tobacco leaf cells. L is the 1 kb plus ladder (Thermo Fisher Scientific, USA). Numbers on the lanes represent independent transgenic lines. The arrows point to the expected band that shows expression of the transgene.

[0090] FIG. 10. Hydroxylation and glycosylation of cannabinoids in transgenic tobacco (SUS, numbered) overexpressing CBDA synthase, UDP glycosyltransferase and ABC transporter. WTS1 and 2 are wild type fed with substrate for endogenous reactions. There was some endogenous glycosylation of CBGA, as well as evidence for enhanced transgenic glycosyltransferase activity (e.g. SUS2, SUS3 and SUS4). The data has been corrected to peak area per g fresh weight.

[0091] FIG. 11. Enhanced modification of cannabinoids in transgenic N. benthamiana plants co-infected with constructs for glycosylation, P450-mediated functionalization (hydroxylation) and detoxification of hydrogen peroxide by catalase. SUS=construct for overexpressing CBDA synthase, UDP glycosyltransferase and ABC transporter; M3S=construct for overexpressing CBDA synthase, UDP glycosyltransferase and ABC transporter with Cannabis MYB12-like and Arabidopsis thaliana catalase.

[0092] FIG. 12. Increased glycosylation activity in transgenic N. benthamiana plants (TSA, TSB, TSC, SUS, SUS/P450) overexpressing a glycosyltransferase compared to wild type in 14-hour transient expression assays.

[0093] FIG. 13. Exemplary monooxygenase reaction, catalyzed by cytochromes P450.

[0094] FIG. 14. Gene construct 1 for the trichome cannabinoid production system. Cauliflower mosaic 35S promoter; AtADH 5′-UTR, translation enhancer element (Matsui et al. 2012); tsCBDAs, cannabidiolic acid synthase with its original trichome target sequence; HSP terminator; tsUGT76G1, UDP glycosyltransferase from Stevia rebaudiana with CBDAs trichome target sequence.

[0095] FIG. 15. Gene construct 2 for the trichome cannabinoid production system. Cauliflower mosaic 35S promoter; AtADH 5′-UTR, enhancer element; PM-UTR1, Arabidopsis thaliana UDP-glucose/galactose transporter targeted to the plasma membrane; HSP terminator.

[0096] FIG. 16. Trichome-targeted CBDA synthase RT-PCR (top), Trichome-targeted UDP glycosyltransferase (76G1) UGT RT-PCR (bottom). A, B, and C are biological replicates collected after 2 DPI.

[0097] FIG. 17. PM-UTR1 RT-PCR. A, B, and C are biological replicates collected after 2 DPI.

[0098] FIG. 18. Gene construct for the cytosolic cannabinoid production system. Cauliflower mosaic 35S promoter; AtADH 5′-UTR, enhancer element; cytCBDAs, cannabidiolic acid synthase with the trichome target sequence removed; HSP terminator; cytUGT76G1, UDP glycosyltransferase from Stevia rebaudiana.

[0099] FIG. 19. SUS-A to SUS-C are biological replicates for the cell suspension (201-SUS) transformation after 1 DPI.

[0100] FIG. 20. cytUGT RT-PCR (top), cytCBDAs RT-PCR (bottom). A, B, and C are biological replicates for cytosolic construct infiltration after 2 DPI.

[0101] FIG. 21. Cannabinoid detection in leaves infiltrated with trichome or cell suspension constructs and fed with CBGA 2.7 mM. The color code refers to the target compartment for CBDAs and UGT76G1 protein accumulation, either trichome or cell suspension cytostol. Y-axis: CBGA and CBDA expressed as parts per million (ppm). Primary, secondary, and acetylated glycosides expressed as peak area.

[0102] FIG. 22. Cannabinoid detection in leaves infiltrated with cytosolic or cell suspension construct and fed with CBGA 2.7 mM and UDP-glucose 4 mM. The color code refers to the target compartment for CBDAs and UGT76G1 protein accumulation. Y-axis: CBGA expressed as parts per million (ppm). All other cannabinoid derivatives expressed as peak area (no standards available).

[0103] FIG. 23. Extracted Ion Chromatograms of R—OH Functionalized 1× Glycosylated CBDA Analog. (A) Chromatographic trace, ion m/z, calculated elemental composition, confirming presence of trace levels of CBDA analog (B) Absence of CBDA analog in control extract (C) Absence of CBDA analog in biological duplicate control extract.

[0104] FIG. 24. Direct Infusion Mass Spectrum of Cannabis sativa extract. Spectral insets represent CBDA with a single glycosylation (519.2546 m/z), and CBDA functionalized with R—OH and a single glycosylation (535.2543 m/z). Peak Intensities are illustrated as relative abundance to most intense ion.

[0105] FIG. 25. Relative abundance of CBDA in extracts of various Cannabis sativa strains infiltrated with Agrobacterium cultures harboring CBDA synthase (CBDAs) and UGT plasmid combinations. Normalized relative abundance data is presented as the ion intensity of each compound divided by the ion intensity of the internal standard 7-hydroxycoumarin (20 ppm).

[0106] FIG. 26. Relative abundance of modified CBDA (glycosylated and/or hydroxylated) in extracts of various Cannabis sativa strains infiltrated with Agrobacterium cultures harboring CBDAs and UGT plasmid combinations. Normalized relative abundance data is presented as the ion intensity of each compound divided by the ion intensity of the internal standard 7-hydroxycoumarin (20 ppm).

[0107] FIG. 27. Gene construct used to boost cannabinoid production and mitigate toxicity. CsMYB12, predicted Cannabis sativa MYB transcription factor for enhancing flavonol biosynthesis; HSPt, efficient transcription terminator from the Arabidopsis thaliana heat shock protein 18.2 gene; 35S, constitutive promoter from cauliflower mosaic virus; Catalase, Arabidopsis thaliana catalase gene.

[0108] FIG. 28. Synthesis of THC and CBD from common precursor CBGA.

[0109] FIG. 29. Generation of hydrogen peroxide during cannabinoid biosynthesis.

[0110] FIG. 30. Hydroxylation followed by oxidation of THC by CYP2C9/FIG. 31. Transfer of a glucuronic acid component to a cannabinoid substrate by UGT.

[0111] FIG. 32. Synthesis Olivetolic Acid a precursor of CBGA

[0112] FIG. 33. Amino Acid sequence comparison of exemplary Arabidopsis catalase protein sequences. FIG. 33 also contains SEQ ID NO. 9253 which represents CAT gene 1; SEQ ID NO. 9255 which represents CAT gene 2; and SEQ ID NO. 9256 which represents CAT gene 3.

[0113] FIG. 34. Schematic diagram of increase cannabinoid production coupled with reduced oxidative damage system in one embodiment thereof.

[0114] FIGS. 35A-B. (A) Part of the pPINK-αHC and (B) pPINK-HC vectors showing the α-factor secretion signal, the ADE2 gene (PpADE2) which produces phosphoribosylaminoimidazole carboxylase in Pichia pastoris, utilized for adenine biosynthesis and the multiple cloning site (MSC) for cloning genes of interest. All the genes were cloned in the MCS for both vectors.

[0115] FIGS. 36A-D. CBGA Glycoside Structures with Physiochemical and Constitutional Properties. (A) CBGA, (B) O Acetyl Glycoside, (C) 1× Glycoside, (D) 1× Glycoside

[0116] FIGS. 37A-F. CBDA Glycoside Structures with Physiochemical and Constitutional Properties. (A) CBDA, (B) 1× Glycoside, (C) 2×Glycoside, (D) O Acetyl Glycoside, (E) 1× Glycoside, (F) 2×Glycoside, the disaccharide moiety can also be located on the opposite R—OH of CBDA as illustrated with the single glycoside product found in panels B & E.

[0117] FIGS. 38A-C. Representative Chromatographic Elution Profile of CBDA Glycosides found in yeast cell extracts. Chromatograms A, and B represent respective extract rated ion chromatograms for the parent and glycoside molecules. Chromatogram C is representative of the total ion chromatogram. Peak Intensities are illustrated as relative abundance to most abundant peak in each respective chromatogram.

[0118] FIGS. 39A-C. Representative chromatographic elution profile of CBGA glycosides found in yeast cell supernatants. Chromatograms A, and B represent respective extract rated ion chromatograms for parent and glycoside molecules. Panel B also illustrates a 13C isotope of the CBDA glycoside also found in the same analysis. Chromatogram C is representative of the total ion chromatogram. Peak Intensities are illustrated as relative abundance to most abundant peak in each respective chromatogram.

[0119] FIGS. 40A-E. Representative chromatographic elution profile of CBDA glycosides found in tobacco cell extracts. Chromatograms A, B, C, and D represent respective extract rated ion chromatograms for each glycoside product. Chromatogram E is representative of the total ion chromatogram. Peak Intensities are illustrated as relative abundance to most abundant peak in each respective chromatogram.

[0120] FIG. 41. Demonstration of expression of glycosyltransferases and Kat-E in Pichia pastoris.

[0121] FIG. 42. Gene construct for intracellular expression of NtGT4 in Pichia pastoris. Expression was driven by the AOX1 promoter and terminated by the cytochrome C1 (CYC1) terminator. Other exemplary glycosyltransferases were cloned in the manner shown.

[0122] FIGS. 43A-D. Post-harvest glycosylation of CBDA in yeast. Glycosides are measured in normalized arbitrary units (AU) based on LC-MS peak area. Asterisks show significant difference (a greater number of asterisks means a lower P value) from the wild type at P=0.05. (A) CBDA 1× glycosides in NtGT1, NtGT4 and NtGT5 detected in the supernatant. (B) CBDA 1× glycosides in NtGT1, NtGT4 and NtGT5 detected in the pellet. (C) CBDA 2×glycoside (NtGT5) in the supernatant. (D) CBDA 1× glycoside on a different position mainly detected in NtGT5 transgenic lines in the pellet.

[0123] FIG. 44. Representative chromatographic elution profile of CBDA 1× glycosides found in yeast cell pellets for the intracellular expression of NtGT5. Chromatogram represents extraction ion chromatograms of the 519.259 m/z 1× glycoside ion. Peak Intensities are illustrated as relative abundance to most abundant peak in each respective chromatogram.

[0124] FIGS. 45A-F. Postharvest glycosylation of CBD oil in yeast. Glycosides are measured in normalized arbitrary units (AU) based on LC-MS peak area. Asterisks show significant difference (a higher number of asterisks means a lower P value) from the wild type at P=0.05. WT=wild type Pichia pastoris Strain 4, Empty vec=yeast transformed with the empty vector pPINK-HC.

[0125] FIGS. 46A-B. (A) Confirmation of transgene expression in yeast from secretion expression constructs NtGT1, NtGT4 and UGT76G1. αHC-empty is the empty vector control. (B) CBDA glycosides in the supernatant of yeast cultures secreting recombinant glycosyltransferases into the media. Asterisks show significant difference from the wild type at P=0.05.

[0126] FIGS. 47A-B. Time course analysis of CBDA glycosylation in transgenic yeast. Depletion of CBDA was quantified along with accumulation of CBDA glycosides in the supernatant (A) and the pellet (B).

[0127] FIGS. 48A-F. Confirmation of transgene expression in BY2 cell cultures. The cell culture line 319C overexpresses the ABC transporter (ABCG2) and the glycosyltransferase UGT76G1. (B-F). Glycosylated CBDA compounds produced from wild type (WT) and transgenic (319C) BY2 cells. 319C overexpresses UGT76G1 and ABCG2. Glycosylated CBDA compounds were detected mainly in the pellet (D, E and F) and to a lesser extent in the supernatant (B and C).

[0128] FIGS. 49A-B. Relative glycosylated cannabinoid yields for tobacco BY2 (319C) and yeast (NtGT4 and NtGT5) cell extracts, normalized to fresh weight. Asterisks show significant difference (a greater number of asterisks means a lower P value) from BY2 cell extracts at P=0.05.

[0129] FIGS. 50A-B. Solution stability analysis for cannabinoids, cannabinoid glycosides and acetylated cannabinoid glycosides. (A) Demonstrates the percent loss of CBDA in solution over 7 day period at room temperature; and (B) Demonstrates the percent loss of 1×CBDA glycoside in solution over 7 day period at room temperature.

[0130] FIGS. 51A-B. Solution stability analysis for cannabinoids, cannabinoid glycosides and acetylated cannabinoid glycosides at various pH ranges. (A) Demonstrates the 1×CBD Glycoside content in solution over at day 7; and (B) Demonstrates the percent conversion of 1×CBDA Glycoside to 1×CBD Glycoside.

[0131] FIG. 52. CBD bound to Gram Positive Bacteria UDP-UGT 5tzk structure representative. Yellow is the cannabinoid with cyan being the UDP co-factor of the UDP-glucose substrate.

[0132] FIG. 53. THC bound to Gram Positive Bacteria UDP-UGT 5tzk structure representative. Yellow is the cannabinoid with cyan being the UDP co-factor of the UDP-glucose substrate.

[0133] FIG. 54. CBD bound to GT-A UDP-UGT 6p61c1 structure representative. Yellow is the cannabinoid with cyan being the UDP co-factor of the UDP-glucose substrate.

[0134] FIG. 55. THC bound to GT-A UDP-UGT 2z86 structure representative. Yellow is the cannabinoid with cyan being the UDP co-factor of the UDP-glucose substrate.

[0135] FIG. 56. CBD bound to GT-B UDP-UGT structure 3otg representative. Yellow is the cannabinoid with cyan being the UDP co-factor of the UDP-glucose substrate.

[0136] FIG. 57. THC bound to GT-B UDP-UGT structure 3otg representative. Yellow is the cannabinoid with cyan being the UDP co-factor of the UDP-glucose substrate.

[0137] FIGS. 58A-B: Example of a GT adopting the GT-A fold (PDB ID 6P61). (A) In the left panel, the enzyme is drawn as cartoons with the α-helices, β-sheet, and loops colored red, yellow, and green, respectively. Bound UDP is shown as cyan and red spheres. (B) In the right panel, the same protein view is shown but with the protein surface rendered in pink. The binding site for substrates is found on the surface pocket to the right of the UDP moiety.

[0138] FIGS. 59A-B. Comparison of GT-A folds. Color scheme follows from FIG. 1. (A) The left panel shows the same enzyme (PDB ID 6P61) as in FIG. 1 but at a different orientation. (B) The right panel shows another enzyme (PDB ID 5TZK; from Staphylococcus aureus) that has been structurally aligned with the protein on the left to highlight the similarity of their GT-A folds. The bacterial enzyme additionally contains an α-helical TPR motif (blue cartoons) that is involved in oligomerization.

[0139] FIG. 60. Example of a GT adopting the GT-A fold (PDB ID 2ACV). The enzyme is drawn as cartoons with the α-helices, β-sheet, and loops colored red, yellow, and green, respectively. The N-terminal and C-terminal domains are on the left and right sides of the protein in this view. Bound UDP is shown as cyan and red spheres, and in contact with the C-terminal domain. The binding site for substrates is found to the bottom-left of the UDP moiety, closer to the N-terminal domain.

[0140] FIG. 61. Shows the structural difference between UDP-glucuronic acid and UDP-glucose.

[0141] FIG. 62. Shows a representative number of cannabinoids having one or more identified glycosylation cites.

### DETAILED DESCRIPTION OF THE INVENTION

[0142] The inventive technology may include systems and methods for the chemical modification of cannabinoid compounds. In one embodiment, a suspension culture of one or more yeast strains may be established. In one preferred embodiment, culture, and more preferably a suspension culture of Saccharomyces cerevisiae and/or Pichia pastoris or other suitable yeast species may be established in a fermenter or other similar apparatus. It should be noted that the use of the above identified example in this embodiment is exemplary only, as various yeast strains, mixes of strains, hybrids of different strains or clones may be used to generate a suspension culture. For example, Pichia pastoris or any other appropriate yeast strain, including but not limited to all strains of yeast deposited with the ATCC. (The yeast strain deposit database(s) being incorporated by reference in its entirety.) In certain cases, such fermenters may include large industrial-scale fermenters allowing for a large quantity of yeast cells to be grown. In this embodiment, it may be possible to culture a large quantity of cells from a single-strain of, for example, P. pastoris or K. marxianus, which may establish a cell culture having a consistent rate of cannabinoid modification. Such cultured growth may be continuously sustained with the continual addition of nutrient and other growth factors being added to the culture. Such features may be automated or accomplished manually.

[0143] As noted above, cannabinoid producing strains of Cannabis, as well as other plants may be utilized with the inventive technology. In certain preferred embodiments, Cannabis plant material may be harvested and undergo cannabinoid extraction through one or more of the methods generally described above. These extracted cannabinoids may be introduced into a genetically modified yeast suspension cell culture to be further modified as described below.

[0144] As noted above, accumulation of high-levels of cannabinoids may be toxic for the yeast cell. As such, the inventive technology may transiently modify the cannabinoids produced in the yeast cell culture in vivo. In one preferred embodiment, cytochrome P450's (CYP) monooxygenases may be utilized to transiently modify or functionalize the chemical structure of the cannabinoids to produce water-soluble forms. CYPs constitute a major enzyme family capable of catalyzing the oxidative biotransformation of many pharmacologically active chemical compounds and other lipophilic xenobiotics. For example, the most common reaction catalyzed by cytochromes P450 is a monooxygenase reaction, e.g., insertion of one atom of oxygen into the aliphatic position of an organic substrate (RH) while the other oxygen atom is reduced to water:

RH+O₂+NADPH+H⁺→ROH+H₂O+NADP⁺

[0145] Several cannabinoids, including THC, have been shown to serve as a substrate for human CYPs (CYP2C9 and CYP3A4). Similarly, CYPs have been identified that metabolize cannabidiol (CYPs 2C19, 3A4); cannabinol (CYPs 2C9, 3A4); JWH-018 (CYPs 1A2, 2C9); and AM2201 (CYPs 1A2, 2C9). For example, as shown generally below, in one exemplary system, CYP2C9 may hydroxylate a THC molecule resulting in a hydroxyl form of THC. Further oxidation of the hydroxyl form of THC by CYP2C9 may convert it into a carboxylic acid form, which loses its psychoactive capabilities rendering it an inactive metabolite.

[0146] In one embodiment, yeast cells may be transformed with artificially created genetic constructs encoding one or more CYPs. In one preferred embodiment, genes encoding one or more non-human isoforms and/or analogs, as well as possibly other CYPs that may functionalize cannabinoids may be expressed in transgenic yeast grown in a suspension culture. Additional embodiments may include genetic control elements such as promotors and/or enhancers as well as post-transcriptional regulatory elements that may also be expressed in transgenic yeast such that the presence, quantity and activity of any CYPs present in the suspension culture may be modified and/or calibrated.

[0147] In this preferred embodiment, NADPH-cytochrome P450 oxidoreductase (CPR) may be used to assist in the activity/function of one or more of the CYPs expressed within a genetically modified yeast cell. In this embodiment, CPR may serve as an electron donor to eukaryotic CYPs facilitating their enzymatic function within the transgenic yeast strain(s) described above. In one preferred embodiment, genes encoding CPR, or one or more non-human isoforms and/or analogs of CPR that may act as an electron donor to CYPs may be expressed in transgenic yeast grown in a suspension culture. Additional embodiments may include genetic control elements such as promotors and/or enhancers as well as post-transcriptional regulatory elements that may also be expressed in transgenic yeast such that the presence, quantity and activity of CPR present in the suspension culture may be modified and/or calibrated. For example, downregulation of the expression of CPR may decrease or stop the functionalization of cannabinoids by preventing the enzymatic action of the CYPs in the yeast cell.

[0148] Additional steps may be taken to further modify the functionalized cannabinoids. In a preferred embodiment, glycosylation of functionalized cannabinoids may covert to them into a water-soluble form. In an exemplary embodiment shown below, the inventive technology may utilize one or more UDP-glucuronosyltransferases (UGT) to catalyze the glucuronosylation or glucuronidation of both primary (CBD, CBN) and secondary cannabinoids (THC, JWH-018, JWH-073). In this embodiment, glucuronidation may consist of the transfer of a glucuronic acid component of uridine diphosphate glucuronic acid to a cannabinoid substrate by any of several types of UGTs as described above. Glucuronic acid is a sugar acid derived from glucose, with its sixth carbon atom oxidized to a carboxylic acid.

[0149] The conversion of a functionalized cannabinoid, in this example a carboxylic acid form of THC, to a glycosylated form of THC may generate a transiently modified cannabinoid that may be both soluble, and non-toxic to the cells in a suspension culture. These chemical modifications may allow for greater levels of cannabinoid accumulation within a yeast cell and/or in the surrounding cell culture media without the deleterious cytotoxic effects that may be seen with unmodified cannabinoids.

[0150] The inventive technology may include the generation of transgenic yeast strains having artificial genetic constructs that that may express one or more glycosyltransferases, or other enzymes capable of glycosylating functionalized cannabinoid compounds. In one preferred embodiment, artificial genetic constructs having genes encoding one or more UDP- and/or ADP-glycosyltransferases, including non-human analogues of those described above, as well as other isoforms, may be expressed in transgenic yeast cells and grown in suspension or other cell cultures. Additional embodiments may include genetic control elements such as promotors and/or enhancers as well as post-transcriptional regulatory control elements that may also be expressed in a transgenic yeast strain such that the presence, quantity and activity of any glycosyltransferases present in the suspension culture may be regulated. Additional embodiments may include artificial genetic constructs having one or more genes encoding one or more UDP- and/or ADP-glycosyltransferases having tags that may assist in the movement of the gene product to a certain portion of the cell, such as the cellular locations were cannabinoids and/or functionalized cannabinoids may be stored, and/or excreted from the cell.

[0151] In one embodiment of the inventive technology, the water-soluble, glycosylated cannabinoids, generally being referred to as transiently modified cannabinoids, may be transported into and harvested from the yeast cell culture media. In one embodiment, transiently modified cannabinoids may accumulate within the yeast cell itself. In this example, the yeast cell culture may be allowed to grow to a desired level of cell or optical density, or in other instances until a desired level of transiently modified cannabinoids have accumulated in the cultured cells and/or media. All, or a portion of the yeast cells containing the accumulated transiently modified cannabinoids may then be harvested from the culture and/or media, which in a preferred embodiment may be an industrial-scale fermenter or other apparatus suitable for the large-scale culturing of yeast or other microorganisms. The harvested yeast cells may be lysed such that the accumulated transiently modified cannabinoids may be released to the surrounding lysate. Additional steps may include treating this lysate. Examples of such treatment may include filtering, centrifugation or screening to remove extraneous cellular material as well as chemical treatments to improve later cannabinoid yields.

[0152] The transiently modified cannabinoids may be further isolated and purified. In one preferred embodiment, the yeast lysate may be processed utilizing affinity chromatography or other purification methods. In this preferred embodiment, an affinity column having a ligand configured to bind with one or more of the transiently modified cannabinoids, for example, through association with the glucuronic acid functional group, among others, may be immobilized or coupled to a solid support. The lysate may then be passed over the column such that the transiently modified cannabinoids, having specific binding affinity to the ligand become bound and immobilized. In some embodiments, non-binding and non-specific binding proteins that may have been present in the lysate may be removed. Finally, the transiently modified cannabinoids may be eluted or displaced from the affinity column by, for example, a corresponding sugar or other compound that may displace or disrupt the cannabinoid-ligand bond. The eluted transiently modified cannabinoids may be collected and further purified or processed.

[0153] In yet another separate embodiment, the now soluble transiently modified cannabinoids may be passively and/or actively excreted from the cell. In one exemplary model, an ATP-binding cassette transporter (ABC transporters) or other similar molecular structure may recognize the glucuronic acid functional group (conjugate) on the transiently modified cannabinoid and actively transport it into the surrounding media. In this embodiment, a yeast cell culture may be allowed to grow until an output parameter is reached. In one example, an output parameter may include allowing the yeast cell culture to grow until a desired cell/optical density is reached, or a desired level of transiently modified cannabinoids is reached. In this embodiment, the culture media containing the transiently modified cannabinoid may be harvested for later cannabinoid extraction. In some embodiments, this harvested media may be treated in a manner similar to the lysate generally described above. Additionally, the transiently modified cannabinoids present in the raw and/or treated media may be isolated and purified, for example, through affinity chromatography in a manner similar to that described above.

[0154] In certain embodiments, this purified cannabinoid isolate may contain a mixture of primary and secondary glycosylated cannabinoids. As noted above, such purified glycosylated cannabinoids may be water-soluble and metabolized slower than unmodified cannabinoids providing a slow-release capability that may be desirable in certain pharmaceutical applications, such as for use in tissue-specific applications or as a prodrug. In this embodiment, purified glycosylated cannabinoids may be incorporated into a variety of pharmaceutical and/or nutraceutical applications. For example, the purified glycosylated cannabinoids may be incorporated into various solid and/or liquid delivery vectors for use in pharmaceutical applications. As noted above, absent modification, these transiently modified cannabinoids no longer possess their psychoactive component, making their application in research, therapeutic and pharmaceutical applications especially advantageous. Additional therapeutic applications may include the administration of a therapeutic dose of an “entourage” of isolated and purified transiently modified cannabinoids.

[0155] The inventive technology may also include a system to convert or reconstitute transiently modified cannabinoids. In one preferred embodiment, glycosylated cannabinoids may be converted into non-glycosylated cannabinoids through their treatment with one or more generalized or specific glycosidases. In this embodiment, these glycosidase enzymes may remove a sugar moiety. Specifically, these glycosidases may remove the glucuronic acid moiety reconstituting the cannabinoid compound to a form exhibiting psychoactive activity. This reconstitution process may generate a highly purified “entourage” of primary and secondary cannabinoids. These reconstituted cannabinoid compounds may also be incorporated into various solid and/or liquid delivery vectors for use in a variety of pharmaceutical and other commercial applications. In certain embodiments, transiently modified cannabinoids may be reconstituted through incubation with one or more generalized or specific glycosidases in an in vitro system.

[0156] As noted above, cannabinoid producing strains of Cannabis, as well as other plants may be utilized with the inventive technology. In certain preferred embodiments, Cannabis plant material may be harvested and undergo cannabinoid extraction. These traditionally extracted cannabinoids may then be modified from their native forms through the in vitro application of one or more CYP's that may generate hydroxyl and carboxylic acid forms of these cannabinoids respectively. These functionalized cannabinoids may be further modified through the in vitro application of one or more UGTs as generally described below. In this embodiment, the new transiently modified cannabinoids may be isolated and purified through a process of affinity chromatography and then applied to various commercial and other therapeutic uses. In other embodiments, the transiently modified cannabinoids may be restored and reconstituted through the in vitro application of one or more glycosidase enzymes. These restored cannabinoids may also be applied to various commercial and other therapeutic uses.

[0157] The inventive technology includes systems and methods for high-level production of cannabinoid compounds in cell culture systems. As used herein, the term “high level” in this instance may mean higher than wild-type biosynthesis or accumulation of one or more cannabinoids in a yeast or plant cell culture. In one embodiment, a suspension or hairy root or cell suspension culture of one or more plant strains may be established. In one preferred embodiment, a suspension or hairy root or cell suspension culture of a tobacco plant may be established. It should be noted that the term strain may refer to a plant strain, as well as a cell culture, or cell line derived from a plant, such as tobacco. In another preferred embodiment, a suspension or hairy root or cell suspension culture of one or more yeast strains may be established.

[0158] Another embodiment of the inventive technology may include systems and methods for high level production of modified cannabinoid compounds. In one embodiment, a suspension or hairy root culture of one or more tobacco plant strains may be established. It should be noted that the term strain may refer to a plant strain, as well as a cell culture, or cell line derived from a tobacco plant. In one preferred embodiment, a suspension or hairy root culture of BY2 tobacco cells may be established in a fermenter or other similar apparatus. In an alternative embodiment, a suspension or hairy root culture of Nicotiana tabacum and/or Nicotiana benthamiana plant may be established in a fermenter or other similar apparatus. It should be noted that the use of N. tabacum and N. benthamiana in these embodiments is exemplary only. For example, in certain other embodiments, various Nicotiana strains, mixes of strains, hybrids of different strains or clones, as well as different varieties may be used to generate a cell suspension or hairy root culture.

[0159] In certain cases, such fermenters may include large industrial-scale fermenters allowing for a large quantity of tobacco cells to be cultured. In this embodiment, harvested cannabinoids may be introduced to this suspension culture, and modified as generally described herein. Similarly, such cultured growth of tobacco cells may be continuously sustained with the continual addition of nutrient and other growth factors being added to the culture. Such features may be automated or accomplished manually.

[0160] Another embodiment of the invention may include the production of genetically modified yeast and/or tobacco cells to express varying exogenous and/or endogenous genes that may modify the chemical structure of cannabinoid compounds. Such transgenic strains may be configured to produce and/or modify large quantities of cannabinoid compounds generally, as well as targeted increases in the production of specific cannabinoids such as THC, Cannabidiol (CBD) or Cannabinol (CBN) and the like.

[0161] Additional embodiments of the inventive technology may include novel systems, methods and compositions for the production and in vivo modification of cannabinoid compounds in a plant and/or yeast suspension culture system. In certain embodiments, these in vivo modifications may lead to the production of different forms of cannabinoids with special properties, e.g. water-soluble, slow-release cannabinoids or prodrugs. In one preferred embodiment, the inventive technology may include novel systems, methods and compositions for the hydroxylation, acetylation and/or glycosylation. Modified cannabinoids can be made water-soluble, for example by glycosylation.

[0162] As noted above, production and/or accumulation of high-levels of cannabinoids would be toxic for a plant cell host. As such, one embodiment of the inventive technology may include systems and methods to transiently modify cannabinoids in vivo. One aim of the current invention may include the use of cytochrome P450's (CYP) monooxygenases to transiently modify or functionalize the chemical structure of the cannabinoids. CYPs constitute a major enzyme family capable of catalyzing the oxidative biotransformation of many pharmacologically active chemical compounds and other lipophilic xenobiotics. For example, as shown in FIG. 13, the most common reaction catalyzed by cytochromes P450 is a monooxygenase reaction, e.g., insertion of one atom of oxygen into the aliphatic position of an organic substrate (RH) while the other oxygen atom is reduced to water.

[0163] Several cannabinoids, including THC, have been shown to serve as a substrate for human CYPs (CYP2C9 and CYP3A4). Similarly, CYPs have been identified that metabolize cannabidiol (CYPs 2C19, 3A4); cannabinol (CYPs 2C9, 3A4); JWH-018 (CYPs 1A2, 2C9); and AM2201 (CYPs 1A2, 2C9). For example, as shown generally in FIG. 30, in one exemplary system, CYP2C9 may “functionalize” or hydroxylate a THC molecule resulting in a hydroxyl-form of THC. Further oxidation of the hydroxyl form of THC by CYP2C9 may convert it into a carboxylic-acid form which loses its psychoactive capabilities, rendering it an inactive metabolite.

[0164] As such, another embodiment of the invention may include the creation of a yeast or plant cell culture that may be transformed with artificially created genetic constructs encoding one or more exogenous CYPs. In one preferred embodiment, genes encoding one or more non-human isoforms and/or analogs, as well as possibly other CYPs that may functionalize cannabinoids, may be expressed in transgenic yeast or tobacco cells. In another preferred embodiment, genes encoding one or more non-human isoforms and/or analogs, as well as possibly other CYPs that may functionalize cannabinoids, may be expressed in transgenic yeast tobacco strains grown in a suspension culture. Additional embodiments may include genetic control elements such as promotors and/or enhancers as well as post-transcriptional regulatory elements that may also be expressed such that the presence, quantity and activity of any CYPs present in the suspension culture may be modified and/or calibrated.

[0165] Another embodiment of the invention may include the creation of a tobacco or yeast cells may be transformed with artificially created genetic constructs encoding one or more exogenous CYPs. In one preferred embodiment, genes encoding one or more non-human isoforms and/or analogs, as well as possibly other CYPs that may functionalize cannabinoids introduced to a transgenic tobacco cell and/or yeast suspension culture.

[0166] Another aim of the invention may be to further modify, in vivo, cannabinoids and/or already functionalized cannabinoids. In a preferred embodiment, glycosylation of cannabinoids and/or functionalized cannabinoids may covert to them into a water-soluble form. In an exemplary embodiment shown in FIG. 31, the inventive technology may utilize one or more glycosyltransferase enzymes, such as UDP-glycosyltransferase (UGT), to catalyze, in vivo the glucuronosylation or glucuronidation of cannabinoids, such as primary (CBD, CBN) and secondary cannabinoids (THC, JWH-018, JWH-073). In this embodiment, glucuronidation may consist of the transfer of a glucuronic acid component of uridine diphosphate glucuronic acid to a cannabinoid substrate by any of several types of glycosyltransferases as described herein. Glucuronic acid is a sugar acid derived from glucose, with its sixth carbon atom oxidized to a carboxylic acid.

[0167] Yet another embodiment of the current invention may include the in vivo conversion of a functionalized cannabinoid, in this example a carboxylic acid form of the cannabinoid, to a glycosylated form of cannabinoid that may be both water-soluble and non-toxic to the cell host. These chemical modifications may allow for greater levels of cannabinoid accumulation in a plant or yeast cell culture without the deleterious cytotoxic effects that would be seen with unmodified cannabinoids due to this water-solubility.

[0168] Another embodiment of the invention may include the generation of transgenic or genetically modified strains/cells of yeast and/or tobacco, having artificial genetic constructs that may express one or more genes that may increase cannabinoids solubility and/or decrease cannabinoid cytotoxicity. For example, the inventive technology may include the generation of transgenic plant and/or yeast cell lines having artificial genetic constructs that may express one or more endogenous/or exogenous glycosyltransferases or other enzymes capable of glycosylating cannabinoid compounds. For example, in one embodiment one or more exogenous glycosyltransferases from tobacco or other non-Cannabis plants may be introduced into a Cannabis plant or cell culture and configured to glycosylate cannabinoids in vivo.

[0169] In an additional embodiment, of the inventive technology may include the generation of artificial genetic constructs having genes encoding one or more glycosyltransferases, including non-human analogues of those described herein as well as other isoforms, that may further may be expressed in transgenic plant and/or yeast cells which may further be grown in a suspension culture. Additional embodiments may include genetic control elements such as promotors and/or enhancers as well as post-transcriptional regulatory control elements that may also be expressed in such transgenic cell systems such that the presence, quantity and activity of any glycosyltransferases present in the suspension culture may be regulated.

[0170] An additional embodiment of the invention may include artificial genetic constructs having one or more genes encoding one or more UDP- and/or ADP-glycosyltransferases having localization sequences or domains that may assist in the movement of the protein to a certain portion of the cell, such as the cellular locations were cannabinoids and/or functionalized cannabinoids may be modified, produced, stored, and/or excreted from the cell.

[0171] An additional embodiment of the invention may include artificial genetic constructs having one or more genes encoding one or more UDP- and/or ADP-glycosyltransferases being co-expressed with one or more exogenous genes that may assist in the movement of the protein to a certain portion of the cell, such as the cellular locations were cannabinoids and/or functionalized cannabinoids may be stored, and/or excreted from the cell.

[0172] One preferred embodiment of the inventive technology may include the high level in vivo production of water-soluble, glycosylated cannabinoids, generally being referred to as transiently modified cannabinoids that may be harvested from a plant and/or yeast cell culture. In one embodiment, transiently modified cannabinoids may accumulate within the cell that is part of a suspension culture. In this example, the cell culture may be allowed to grow to a desired level of cell or optical density, or in other instances until a desired level of transiently modified cannabinoids have accumulated in the cultured plant or yeast cells. Such exogenous genes may be localized, for example to the cytosol as generally described herein, and may further be co-expressed with other exogenous genes that may reduce cannabinoid biosynthesis toxicity and/or facilitate cannabinoid transport through, or out of the cell.

[0173] All or a portion of the cultured plant and/or yeast cells containing the accumulated transiently modified cannabinoids may then be harvested from the culture, which in a preferred embodiment may be an industrial-scale fermenter or other apparatus suitable for the large-scale culturing of plant cells. The harvested Cannabis cells may be lysed such that the accumulated transiently modified cannabinoids may be released to the surrounding lysate. Additional steps may include treating this lysate. Examples of such treatment may include filtering or screening this lysate to remove extraneous plant material as well as chemical treatments to improve later cannabinoid yields.

[0174] Another embodiment of inventive technology may include the high level in vivo generation of water-soluble, glycosylated cannabinoids, generally being referred to as transiently modified cannabinoids that may be harvested from a plant and/or yeast cell culture. In one embodiment, cannabinoids may be introduced to a non-cannabinoid producing plant and/or yeast cell culture, such as BY2 tobacco cells. In this preferred embodiment, the non-cannabinoid producing cell culture may be genetically modified to express one or more endogenous or exogenous genes that may modify the cannabinoids, for example through hydroxylation, acetylation and/or glycosylation. Such endogenous or exogenous genes may be localized, as generally described herein, and may further be co-expressed with other exogenous genes that may reduce cannabinoid biosynthesis toxicity and/or facilitate cannabinoid transport through, or out of the cell into a surrounding media.

[0175] This non-cannabinoid producing the cell culture may be allowed to grow to a desired level of cell or optical density, or in other instances until a desired level of transiently modified cannabinoids have accumulated in the cultured cells. In one embodiment, all or a portion of the BY2 and/or yeast cells containing the accumulated cannabinoids may then be harvested from the culture, which in a preferred embodiment may be an industrial-scale fermenter or other apparatus suitable for the large-scale culturing of cells. The harvested cells may be lysed such that the accumulated transiently modified cannabinoids may be released to the surrounding lysate. Additional steps may include treating this lysate. Examples of such treatment may include filtering or screening this lysate to remove extraneous material as well as chemical treatments to improve later cannabinoid yields.

[0176] Another embodiment of the inventive technology may include methods to isolate and purified transiently modified cannabinoids from a plant or suspension culture. In one preferred embodiment, a plant and/or yeast cell culture lysate may be generated and processed utilizing affinity chromatography or other purification methods. In this preferred embodiment, an affinity column having a ligand or protein receptor configured to bind with the transiently modified cannabinoids, for example through association with a glycosyl or glucuronic acid functional group among others, may be immobilized or coupled to a solid support. The lysate may then be passed over the column such that the transiently modified cannabinoids, having specific binding affinity to the ligand become bound and immobilized. In some embodiments, non-binding and non-specific binding proteins that may have been present in the lysate may be removed. Finally, the transiently modified cannabinoids may be eluted or displaced from the affinity column by, for example, a corresponding sugar or other compound that may displace or disrupt the cannabinoid-ligand bond. The eluted transiently modified cannabinoids may be collected and further purified or processed.

[0177] One embodiment of the invention may include the generation of transiently modified cannabinoids that may be passively and/or actively excreted from a cultured plant and/or yeast cell. In one exemplary model, an exogenous ATP-binding cassette transporter (ABC transporters) or other similar molecular structure may recognize the glycosyl or glucuronic acid functional group (conjugate) on the transiently modified cannabinoid and actively transport it across the cell wall/membrane and into the surrounding media. In this embodiment, the cell culture may be allowed to grow until an output parameter is reached. In one example, an output parameter may include allowing the cell culture to grow until a desired cell/optical density is reach, or a desired concentration of transiently modified cannabinoid is reached. In this embodiment, the culture media containing the transiently modified cannabinoids may be harvested for later cannabinoid extraction. In some embodiments, this harvested media may be treated in a manner similar to the lysate generally described above. Additionally, the transiently modified cannabinoids present in the raw and/or treated media may be isolated and purified, for example, through affinity chromatography in a manner similar to that described above.

[0178] In certain embodiments, this purified cannabinoid isolate may contain a mixture of primary and secondary glycosylated cannabinoids. As noted above, such purified glycosylated cannabinoids may be water-soluble and metabolized slower than unmodified cannabinoids providing a slow-release capability that may be desirable in certain pharmaceutical applications, such as for use in tissue-specific applications, or as a prodrug. As such, in one embodiment of the invention, isolated glycosylated cannabinoids may be incorporated into a variety of pharmaceutical and/or nutraceutical applications as well as other compositions of matter outline herein.

[0179] For example, the purified glycosylated cannabinoids may be incorporated into various solid and/or liquid delivery vectors for use in pharmaceutical applications. As noted above, these transiently modified cannabinoids may no longer possess their psychoactive component, making their application in research, therapeutic and pharmaceutical applications especially advantageous. For example, the treatment of children may be accomplished through administration of a therapeutic dose of isolated and purified transiently modified cannabinoids, without the undesired psychoactive effect. Additional therapeutic applications may include the harvesting and later administration of a therapeutic dose of an “entourage” of isolated and purified transiently modified cannabinoids.

[0180] Another embodiment of the invention may include a system to convert or reconstitute transiently modified cannabinoids. In one preferred embodiment, glycosylated cannabinoids may be converted into non-glycosylated cannabinoids through their treatment with one or more generalized or specific glycosidases. The use and availability of glycosidase enzymes would be recognized by those in the art without requiring undue experimentation. In this embodiment, these glycosidase enzymes may remove a sugar moiety. Specifically, these glycosidases may remove the glycosyl or glucuronic acid moiety reconstituting the cannabinoid compound to a form exhibiting psychoactive activity. This reconstitution process may generate a highly purified “entourage” of primary and secondary cannabinoids. These reconstituted cannabinoid compounds may also be incorporated into various solid and/or liquid delivery vectors for use in a variety of pharmaceutical and other commercial applications.

[0181] As noted above, in one embodiment of the invention, cannabinoid producing strains of Cannabis, as well as other plants may be utilized with the inventive technology. In certain preferred embodiments, in lieu of growing the target cannabinoid producing plant in a cell culture, the raw plant material may be harvested and undergo cannabinoid extraction utilizing one or more of the methods described herein. These traditionally extracted cannabinoids may then be modified from their native forms through the in vitro application of one or more CYP's that may generate hydroxyl and carboxylic acid forms of these cannabinoids respectively. These functionalized cannabinoids may be further modified through the in vitro application of one or more glycosyltransferases as generally described herein. In this embodiment, the new transiently modified cannabinoids may be isolated and purified through a process of affinity chromatography, or other extraction protocol, and then applied to various commercial and other therapeutic uses. In other embodiments, the transiently modified cannabinoids may be restored and reconstituted through the in vitro application of one or more glycosidase enzymes. These restored cannabinoids may also be applied to various commercial and other therapeutic uses.

[0182] Another embodiment of the invention may include the use of other non-cannabinoid producing plants in lieu of growing a cannabinoid producing plant in a cell culture. Here, cannabinoid may be introduced to genetically modified plants, or plant cell cultures that express one or more CYP's that may generate hydroxyl and carboxylic acid forms of these cannabinoids respectively. These functionalized cannabinoids may be further modified through the action of one or more glycosidases that may also be expressed in the non-cannabinoid producing plant or cell culture. In one preferred embodiment, a non-cannabinoid producing cell culture may include tobacco plant or tobacco cell cultures. Additional embodiments may similarly use genetically modified yeast cells grown in culture to generate biomodified cannabinoid compounds.

[0183] One embodiment of the invention may include an in vivo method of trichome-targeted cannabinoid accumulation and modification. One preferred embodiment of this in vivo system may include the creation of a recombinant protein that may allow the translocation of a CYP or glycosyltransferases to a site of extracellular cannabinoid synthesis in a whole plant. More specifically, in this preferred embodiment, one or more CYPs or glycosyltransferases may either be engineered to express all or part of the N-terminal extracellular targeting sequence as present in cannabinoid synthase protein, such as THCA synthase or CBDA synthase.

[0184] One another embodiment of the invention may include an in vivo method of high-level trichome-targeted cannabinoid biosynthesis, accumulation and/or modification. One preferred embodiment of this in vivo system may include the creation of a recombinant protein that may allow the translocation of a catalase to a site of extracellular cannabinoid synthesis in a whole plant. More specifically, in this preferred embodiment, one or more catalase enzymes may either be engineered to express all or part of the N-terminal extracellular targeting sequence as present in cannabinoid synthase protein, such as THCA synthase or CBDA synthase. In this embodiment, the catalase may be targeted to the site of cannabinoid biosynthesis allowing it to more efficiently neutralize hydrogen peroxide byproducts.

[0185] Another aim of the current invention may include the introduction of one or more compounds to facilitate the chemical decomposition of hydrogen peroxide resulting from cannabinoids biosynthesis. In one embodiment, one or more chemicals, metal ions, and/or catalysts may be introduced into a growth media to detoxify hydrogen peroxide (H₂O₂) in both yeast and plant cell cultures. Examples may include magnesium dioxide (MnO₂), permanganate ion MnO₄, and silver ion (Ag⁺), iron oxide, (Fe₂O₃), lead dioxide (PbO₂), cupric oxide (CuO), Hafnium (IV) oxide (HfO₂), ceric dioxide (CeO₂), Gadolinium trioxide (Gd₂O₃), Sodium Phosphate, Tribasic (NaPO₄), iodide ions, manganese metal, iron(III) Chloride Solution (FeCl₃). Such chemicals, ions, and/or catalyst may be added directly, or in solution to a cell culture. The amount may be dependent on the amount of hydrogen peroxide present which may be determined through a variety of established assays. As such, determinations of the optimal amounts are within the skill of those in the art.

[0186] In this preferred embodiment, this N-terminal trichome targeting sequence or domain may generally include the first 28 amino acid residues of a generalized synthase. An exemplary trichome targeting sequence for THCA synthase is identified SEQ ID NO. 9221, while trichome targeting sequence for CBDA synthase is identified SEQ ID NO. 9222. This extracellular targeting sequence may be recognized by the plant cell and cause the transport of the glycosyltransferase from the cytoplasm to the plant's trichrome, and in particular the storage compartment of the plant trichrome where extracellular cannabinoid glycosylation may occur. More specifically, in this preferred embodiment, one or more glycosyltransferases, such as UDP glycosyltransferase may either be engineered to express all or part of the N-terminal extracellular targeting sequence as present in an exemplary synthase enzyme.

[0187] Another embodiment of the invention may include an in vivo method of cytosolic-targeted cannabinoid production, accumulation and/or modification. One preferred embodiment of this in vivo system may include the creation of a recombinant protein that may allow the localization of cannabinoid synthases and/or glycosyltransferases to the cytosol.

[0188] More specifically, in this preferred embodiment, one or more cannabinoid synthases may be modified to remove all or part of the N-terminal extracellular targeting sequence. An exemplary trichome targeting sequence for THCA synthase is identified SEQ ID NO. 9221, while trichome targeting sequence for CBDA synthase is identified SEQ ID NO. 9222. Co-expression with this cytosolic-targeted synthase with a cytosolic-targeted CYP or glycosyltransferase, may allow the localization of cannabinoid synthesis, accumulation and modification to the cytosol. Such cytosolic target enzymes may be co-expressed with catalase, ABC transporter or other genes that may reduce cannabinoid biosynthesis toxicity and or facilitate transport through or out of the cell.

[0189] Another embodiment of the invention may include the generation of an expression vector comprising this polynucleotide, namely a cannabinoid synthase N-terminal extracellular targeting sequence and glycosyltransferase genes, operably linked to a promoter. A genetically altered plant or parts thereof and its progeny comprising this polynucleotide operably linked to a promoter, wherein said plant or parts thereof and its progeny produce said chimeric protein, is yet another embodiment. For example, seeds and pollen contain this polynucleotide sequence or a homologue thereof, a genetically altered plant cell comprising this polynucleotide operably linked to a promoter such that said plant cell produces said chimeric protein. Another embodiment comprises a tissue culture comprising a plurality of the genetically altered plant cells.

[0190] Another embodiment of the invention provides for a genetically altered plant or cell expressing a chimeric or fusion protein having a cannabinoid synthase N-terminal extracellular targeting sequence (see i.e., SEQ ID: 9221-9222; see also SEQ ID NO. 9223 for full amino acid sequence of THCA synthase) coupled with a UDP glycosyltransferase genes, operably linked to a promoter. Another embodiment provides a method for constructing a genetically altered plant or part thereof having glycosylation of cannabinoids in the extracellular storage compartment of the plant's trichrome compared to a non-genetically altered plant or part thereof, the method comprising the steps of: introducing a polynucleotide encoding the above protein into a plant or part thereof to provide a genetically altered plant or part thereof, wherein said chimeric protein comprising a first domain, a second domain, and wherein said first domain comprises a cannabinoid synthase N-terminal extracellular targeting sequence, and a second domain comprises a glycosyltransferase sequence. These domains may be separated by a third domain or linker. This linker may be any nucleotide sequence that may separate a first domain from a second domain such that the first domain and the second domain can each fold into its appropriate three-dimensional shape and retain its activity.

[0191] One preferred embodiment of the invention may include a genetically altered plant or cell expressing a cytosolic-targeted cannabinoid synthase protein having a cannabinoid synthase N-terminal extracellular targeting sequence (SEQ IDs. 9221-9222) inactivated or removed. In one embodiment, a cytosolic targeted THCA synthase (ctTHCAs) may be identified as SEQ ID NO. 9227, while in another embodiment cytosolic targeted CBDA synthase (cytCBDAs) is identified as SEQ ID NO. 9203-9204). Such cytosolic-targeted cannabinoid synthase protein may be operably linked to a promoter. Another embodiment provides a method for constructing a genetically altered plant or part thereof having glycosylation of cannabinoids in the plant's cytosol compared to a non-genetically altered plant or part thereof, the method comprising the steps of: introducing a polynucleotide encoding the above protein into a plant or part thereof to provide a genetically altered plant or part thereof, wherein said a cannabinoid synthase N-terminal extracellular targeting sequence has been disrupted or removed.

[0192] Yet another embodiment of the invention may include an in vivo method of cannabinoid glycosylation in a Cannabis cell culture. In one preferred embodiment, to facilitate glycosylation of cannabinoids in Cannabis cell culture, which would lack an extracellular trichrome structure, a cannabinoid synthase gene may be genetically modified to remove or disrupt, for example through a directed mutation, the extra-cellular N-terminal targeting domain which may then be used to transform a Cannabis plant cell in a cell culture. In this embodiment, without this targeting domain the cannabinoid synthase, for example THCA or CBDA synthases, may remain within the plant cell, as opposed to being actively transported out of the cell, where it may be expressed with one or more glycosyltransferases, such as UDP glycosyltransferase in the cytoplasm.

[0193] Another embodiment of the inventive technology may include systems and methods for enhanced production and/or accumulation of cannabinoid compounds in an in vivo system. In one preferred embodiment, the invention may include the generation of a genetically modified or transgenic Cannabis plant that may produce and/or accumulate one or more cannabinoids at higher than wild-type levels. In one embodiment, a transgenic Cannabis plant may be generated to express one or more Cannabis sativa transcription factors that may enhance the cannabinoid metabolic pathway(s). In one preferred embodiment, a polynucleotide may be generated that encodes for one or more Cannabis sativa myb transcription factors genes, and/or one or more exogenous ortholog genes that enhance the metabolite flux through the cannabinoid biosynthetic pathway.

[0194] In this preferred embodiment, a polynucleotide may be generated that encodes for one or more Cannabis sativa myb transcription factors genes, such as CAN833 and/or CAN738 that. As shown in FIG. 32, these transcriptions factors may drive the production of olivetolic acid, which is a precursor of CBGA, which in turn is a precursor in the biosynthetic pathway of THCs, CBDs and CBC. In an alternative embodiment, a polynucleotide may be generated that encodes for one or more Cannabis sativa myb transcription factors genes orthologs, specifically Cannabis Myb12 (SEQ IDs. 9192-9293), Myb8 (SEQ ID NO. 9224), AtMyb12 (SEQ ID NO. 9225), and/or MYB112 (SEQ ID NO. 9226) that may also drive the production of olivetolic acid, which is a precursor of CBGA, which in turn is a precursor in the biosynthetic pathway of THCs, CBDs and CBC.

[0195] In one preferred embodiment, the invention may include methods of generating a polynucleotide that expresses one or more of the SEQ IDs related to enhanced cannabinoid production identified herein. In certain preferred embodiments, the proteins of the invention may be expressed using any of a number of systems, such as in whole plants, as well as plant cell and/or yeast suspension cultures. Typically, the polynucleotide that encodes the protein or component thereof is placed under the control of a promoter that is functional in the desired host cell. An extremely wide variety of promoters may be available and can be used in the expression vectors of the invention, depending on the particular application. Ordinarily, the promoter selected depends upon the cell in which the promoter is to be active. Other expression control sequences such as ribosome binding sites, transcription termination sites and the like are also optionally included. Constructs that include one or more of these control sequences are termed “expression cassettes” or “constructs.” Accordingly, the nucleic acids that encode the joined polypeptides are incorporated for high level expression in a desired host cell.

[0196] Additional embodiments of the invention may include selecting a genetically altered plant or part thereof that expresses the cannabinoid production transcription factor protein, wherein the expressed protein has increased cannabinoid biosynthesis capabilities. In certain embodiments, a polynucleotide encoding the cannabinoid production transcription factor protein is introduced via transforming said plant with an expression vector comprising said polynucleotide operably linked to a promoter. The cannabinoid production transcription factor protein may comprise a SEQ ID selected from the group consisting of SEQ ID NO: 9192-9293 or 9224-9226, or a homologue thereof.

[0197] As noted above, one embodiment of the invention may include systems and methods for general and/or localized detoxification of cannabinoid biosynthesis in an in vivo system. In one preferred embodiment, the invention may include the generation of a genetically modified or transgenic Cannabis or other plant that may be configured to be capable of detoxifying hydrogen peroxide by-products resulting from cannabinoid biosynthesis at higher than wild-type levels. In addition, this detoxification may be configured to be localized to the cytosol and/or trichome structure of the Cannabis plant where cannabinoids are actively being synthesized in a whole plant system. In this preferred embodiment of the invention, a transgenic plant, such as a Cannabis or tobacco plant or cell, that express one or more genes that may up-regulate hydrogen peroxide detoxification. In an alternative embodiment, the invention may include the generation of a genetically modified plant cell and/or yeast cell suspension cultures that may be configured to be capable of expressing an exogenous catalase, or over expressing an endogenous catalase or both. In this example, the catalase expressed in the plant and/or yeast cell culture may act to detoxify hydrogen peroxide by-products resulting from cannabinoid biosynthesis at higher than wild-type levels. In some embodiment, the catalase expressed in a plant, and/or plant cell or yeast cell culture may be heterologous or exogenous, while in other embodiments, it may be an endogenous catalase that may be operably linked to a promoter to allow constitutive, inducible, and/or overexpression.

[0198] In one preferred embodiment, a polynucleotide may be generated that encodes for one or more endogenous and/or exogenous transcription catalase genes, and/or orthologs that catalyze the reduction of hydrogen peroxide:

[chemical structure]

[0199] As such, in one embodiment, the invention comprises the generation of a polynucleotide encoding an exogenous catalase protein that may be expressed within a transformed plant and/or cell culture. In a preferred embodiment, a catalase enzyme configured reduce hydrogen peroxide (H₂O₂) generated during cannabinoid synthesis may be used to transform a Cannabis or other plant, such as a tobacco plant. While a number of generic catalase enzymes may be included in this first domain, as merely one exemplary model, a first domain may include an exogenous catalase derived from Arabidopsis (SEQ ID NO. 9194-9195; see also FIG. 33), or Escherichia coli (SEQ ID NO. 9196-9197), or any appropriate catalase ortholog, protein fragment, or catalases with a homology between about 70% —and approximately 100% as herein defined.

[0200] Another embodiment of the current invention may include localization of the catalase enzyme to a trichome structure. As generally outlined above, in this embodiment a trichome targeting sequence from a cannabinoid synthase may be coupled with one or more catalase enzymes in a fusion or chimera—the terms being generally interchangeable in this application. This artificial trichome-target catalase gene may be used to transform a plant having trichome structures, such as Cannabis or tobacco. In a preferred embodiment, a trichome-targeted catalase from Arabidopsis thaliana with a THCA synthase trichome targeting domain is identified as SEQ ID NO. 9228, while a trichome-targeted catalase Arabidopsis thaliana with a CBDA synthase trichome targeting domain is identified as SEQ ID NO. 9229. In another embodiment, a trichome-targeted catalase from Escherichia coli with a THCA synthase trichome targeting domain is identified as SEQ ID NO. 9230, while a trichome-targeted catalase Escherichia coli with a CBDA synthase trichome targeting domain is identified as SEQ ID NO. 9231.

[0201] Another embodiment of the invention comprises generating a polynucleotide of a nucleic acid sequence encoding the chimeric/fusion catalase protein. Another embodiment includes an expression vector comprising this polynucleotide operably linked to a promoter. A genetically altered plant or parts thereof and its progeny comprising this polynucleotide operably linked to a promoter, wherein said plant or parts thereof and its progeny produce said fusion protein is yet another embodiment. For example, seeds and pollen contain this polynucleotide sequence or a homologue thereof, a genetically altered plant cell comprising this polynucleotide operably linked to a promoter such that said plant cell produces said chimeric protein. Another embodiment comprises a tissue culture comprising a plurality of the genetically altered plant cells.

[0202] In a preferred embodiment, a polynucleotide encoding a trichome-targeted fusion protein may be operably linked to a promoter that may be appropriate for protein expression in a Cannabis, tobacco or other plant. Exemplary promotors may include, but not be limited to: a non-constitutive promotor; an inducible promotor, a tissue-preferred promotor; a tissue-specific promotor, a plant-specific promotor, or a constitutive promotor. In a preferred embodiment, one or more select genes may be operably linked to a leaf-specific gene promotor, such as Cab 1. Additional promoters and operable configurations for expression, as well as co-expression of one or more of the selected genes are generally known in the art.

[0203] Another embodiment of the invention may provide for a method for constructing a genetically altered plant or part thereof having increased resistance to hydrogen peroxide cytotoxicity generated during cannabinoid synthesis compared to a non-genetically altered plant or part thereof, the method comprising the steps of: introducing a polynucleotide encoding a fusion protein into a plant or part thereof to provide a genetically altered plant or part thereof, wherein said fusion protein comprising a catalase and a trichome-targeting sequence from a cannabinoid synthase.

[0204] In one embodiment, the invention may encompass a system to increase overall cannabinoid production and accumulation in trichomes while preventing potential cytotoxicity effects. As generally shown in FIG. 34, the system may include, in a preferred embodiment, creating a transgenic Cannabis, tobacco or other plant or suspension culture plant that overexpresses at least one Myb transcription factor to increase overall cannabinoid biosynthesis. In further preferred embodiments, this transgenic plant may co-express a catalase enzyme to reduce oxidative damage resulting from hydrogen peroxide production associated with cannabinoid synthesis reducing cell toxicity. In certain preferred embodiments, this catalase may be fused with an N-terminal synthase trichome targeting domain, for example from THCA and/or CBDA synthase, helping localize the catalase to the trichome in the case of whole plant systems, and reduce potentially toxic levels of hydrogen peroxide produced by THCA, CBCA and/or CBDA synthase activity.

[0205] Another embodiment of the invention may comprise a combination polynucleotide of a nucleic acid sequence encoding a combination of: 1) a cannabinoid production transcription factor protein, such as a myb gene; and/or a catalase protein, or any homologue thereof, which may further include a trichome targeting or localization signal. A genetically altered plant or parts thereof and its progeny comprising this combination polynucleotide operably linked to a promoter, wherein said plant or parts thereof and its progeny produce said protein is yet another embodiment. For example, seeds and pollen contain this polynucleotide sequence or a homologue thereof, a genetically altered plant cell comprising this polynucleotide operably linked to a promoter such that said plant cell produces said proteins. Another embodiment comprises a tissue culture comprising a plurality of the genetically altered plant cells.

[0206] Another embodiment of the invention may provide for a method for constructing a genetically altered plant or part thereof having: 1) increased cannabinoid production compared to a non-genetically altered plant or part thereof and/or 2) increased resistance to hydrogen peroxide cytotoxicity generated during cannabinoid synthesis compared to a non-genetically altered plant or part thereof, the method comprising the steps of: introducing a combination polynucleotide into a plant or part thereof to provide a genetically altered plant or part thereof.

[0207] Additional embodiments of the invention may include selecting a genetically altered plant or part thereof that expresses one or more of the proteins, wherein the expressed protein(s) may have: 1) increased cannabinoid production capabilities, for example through overexpression of an endogenous myb gene; and 2) catalase with/or without a trichome localization capability, or any combination thereof. In certain embodiments, a combination polynucleotide encoding the proteins is introduced via transforming said plant with an expression vector comprising said combination polynucleotide operably linked to a promoter. The cannabinoid production transcription factor protein may comprise a SEQ ID selected from the sequences identified herein, or homologues thereof. Naturally, such combinations and expression combination strategies, such identified in Tables 7-8, 10 below and elsewhere, are exemplary, as multiple combinations of the elements as herein described is included in the invention.

[0208] In one preferred embodiment, the inventive technology may include systems, methods and compositions high levels of in vivo cannabinoid hydroxylation, acetylation and/or glycosylation and/or a combination of all three. In a preferred embodiment, the in vivo cannabinoid hydroxylation, acetylation and/or glycosylation and/or a combination of all three may occur in a cannabinoid-producing plant or cell culture system. While in alternative embodiments may include a non-cannabinoid producing plant or cell culture system such as a tobacco plant, like N. benthamiana, or a yeast cell culture.

[0209] In one embodiment, the invention may include a cannabinoid production, accumulation and modification system. In one preferred embodiment, a plant, such as Cannabis or tobacco, as well as a yeast cell, may be genetically modified to express one or more heterologous cytochrome P450 genes. In this preferred embodiment, a heterologous cytochrome P450 (CYP3A4) SEQ ID NO. 9182 may be expressed in a cannabinoid-producing plant or cell culture system. While in alternative embodiments, a heterologous human cytochrome P450 (CYP3A4) may be expressed non-cannabinoid producing plant or cell culture system such as a tobacco plant, like N. benthamiana or a yeast cell, such a P. pastoris. In this embodiment, the overexpression of a heterologous human cytochrome P450 protein, identified as SEQ ID NO. 9183, may functionalize endogenously-created cannabinoids so that they can be more efficiently glycosylated and/or acetylated in vivo, rendering them water-soluble.

[0210] In an alternative embodiment, the invention may include a cannabinoid production, accumulation and modification system. In one preferred embodiment, a plant, such as Cannabis or tobacco, may be genetically modified to express one or more heterologous cytochrome P450 oxidoreductase genes. In this preferred embodiment, a heterologous cytochrome P450 oxidoreductase (oxred) identified as SEQ ID NO. 9184, and SEQ ID NO. 9253, identified as an ortholog, may be expressed in a cannabinoid-producing plant or cell culture system. While in alternative embodiments a heterologous human heterologous cytochrome P450 oxidoreductase (oxred) may be expressed non-cannabinoid producing plant or cell culture system such as a tobacco plant, like BY2 tobacco cells, or yeast cells. In this embodiment, the overexpression of a heterologous cytochrome P450 oxidoreductase (oxred) protein, identified as SEQ ID NO. 9185, may functionalize endogenously-created cannabinoids so that they can be more efficiently glycosylated and/or acetylated in vivo, rendering them water-soluble.

[0211] In one preferred embodiment, a tobacco cell suspension culture may be generated using BY2 cells. Such BY2 cell may express a heterologous cytochrome P450 oxidoreductase (oxred) identified as SEQ ID NO. 9184, and/or a heterologous glycosyltransferases, such as GT76G1 (SEQ ID NO. 9242). Further, in this embodiment, a BY2 tobacco cell culture may also be genetically modified to express one or more multi-drug ABC transporters, such as ABCG2 (SEQ ID NO. 9258). In this embodiment, one or more cannabinoids may be introduced to the genetically modified yeast cells, preferably in in a suspension culture, and may be functionalize and/or directly glycosylated prior to their active transport out of the cell into the surrounding media through the action of an ABC transporter, such as ABCG2. In still further example, a yeast cell may be genetically modified to express an alpha-factor secretion signal to further facilitate secretion of the modified cannabinoids, or cannabinoid precursors out of the yeast cell and into a surrounding media. In this system, one or multiple cannabinoids and/or cannabinoid precursors may be introduced to the yeast cell culture to be modified, for example through an cannabinoid oil or other extract.

[0212] It should be noted that in one embodiment, one or more glycosyltransferases may have an affinity for either of the hydroxy groups located at positions 2,4 on the pentylbenzoate/pentlybenzoic ring of a cannabinoid, compound, such a CBDA (2,4-dihydroxy-3-[(6R)-3-methyl-6-(prop-1-en-2-yl)cyclohex-2-en-1-yl]-6-pentylbenzoate) and/or CBGA ((E)-3-(3,7-Dimethyl-2,6-octadienyl)-2,4-dihydroxy-6-pentylbenzoic acid).

[0213] On one embodiment, one or more glycosidase inhibitors may be introduced to a plant and/or yeast cell culture as well as a whole plant where the production of glycosylated cannabinoids may be occurring. In one preferred embodiment, one or more of the following glycosidase inhibitors may be utilized: D,L-1,2-Anhydro-myo-inositol (Conduritol B Epoxide (CBE)); 6-Epicastanospermine (Castanospermine); 6-bromocyclohex-4-ene-1,2,3-triol (Bromoconduritol); (+)-1-Deoxynojirimycin (Deoxynojirimycin); 1,5-Dideoxy-1,5-imino-D-sorbitol hydrochloride (1-Deoxynojirimycin Hydrochloride); 1R,2S,3S,4R)-rel-5-Cyclohexene-1,2,3,4-tetrol (Conduritol B); (3R,4R,5R)-5-(Hydroxymethyl)-3,4-piperidinediol (2S,3S)-2,3-Dihydroxybutanedioate (Isofagomine D-Tartrate); O-(D-Glucopyranosylidene)amino N-Phenylcarbamate; and (3S,4S,5R,6R)-3,4,5-Trihydroxy-6-(hydroxymethyl)-2-piperidinone (D-Manno-γ-lactam). Such glycosidase inhibitors are exemplary only and should not be seen as limiting on the invention in any way.

[0214] In an alternative embodiment, a heterologous cytochrome P450 gene may be expressed in a genetically modified yeast strain. For example, heterologous cytochrome P450 (CYP3A4) (SEQ ID NO. 9250), and/or CYP oxidoreductase (SEQ ID NO. 9252), may be introduced and expressed in to a yeast cell. In this embodiment, such genes may further be codon optimized for expression in yeast. Such a heterologous human cytochrome P450 proteins may functionalize cannabinoids introduced to the yeast cell culture so that they can be more efficiently glycosylated and/or acetylated in vivo, rendering them water-soluble. In this embodiment, such yeast cells may further express one or more heterologous glycosyltransferases, which may further be codon optimized for expression in yeast cells. In one preferred embodiment, the invention may one or more codon optimized heterologous glycosyltransferases from tobacco, including but not limited to: NtGT1 (SEQ ID NO. 9232); NtGT2 (SEQ ID NO. 9234); NtGT3 (SEQ ID NO. 9236); NtGT4 (SEQ ID NO. 9238); and NtGT5 (SEQ ID NO. 9240).

[0215] In one embodiment, the invention may include a cannabinoid production, accumulation and modification system in a non-cannabinoid producing plant. In one preferred embodiment, a plant, such as tobacco, may be genetically modified to express one or more heterologous cytochrome P450 oxidoreductase genes. In this preferred embodiment, a heterologous cytochrome P450 oxidoreductase (oxred) identified as SEQ ID NO. 9184 may be expressed in a cannabinoid-producing plant or cell culture system. While in alternative embodiments a heterologous cytochrome P450 oxidoreductase (oxred) may be expressed non-cannabinoid producing plant or cell culture system such as a tobacco plant, like N. benthamiana. In this embodiment, the overexpression of a heterologous cytochrome P450 oxidoreductase (oxred) protein, identified as SEQ ID NO. 9185, may help to functionalize cannabinoids introduced to the genetically modified plant or plant cell culture system so that they can be more efficiently glycosylated and/or acetylated, in vivo, rendering them water-soluble.

[0216] In a preferred embodiment cytochrome 450 and P450 oxidoreductase are co-expressed. In another embodiment, cytochrome P450 and P450 oxidoreductase may also be expressed as a fusion protein. It should be noted that any nucleic and or amino acid expressed in this system may be expressed single or as a fusion protein,

[0217] In another embodiment, the invention may include the expression of one or more exogenous or heterologous, the terms being generally interchangeable, cannabinoid synthase gene in a non-cannabinoid producing plant or plant-cell culture system. In one preferred embodiment, such a gene may include one or more of a CBG, THCA, CBDA or CBCA synthase genes. For example, in one embodiment, a Cannabidiolic acid (CBDA) synthase, identified as SEQ ID NO. 9186 (gene) or SEQ ID NO. 9187 (protein) from Cannabis sativa may use expressed in a non-Cannabis-producing plant, such as or plant cell suspension culture of N. benthamiana. In another preferred embodiment, a Tetrahydrocannabinolic acid (THCA) synthase, identified as SEQ ID NO. 9223 (gene) from Cannabis sativa may use expressed in a non-Cannabis-producing plant, such as a plant cell suspension culture of N. benthamiana.

[0218] In another preferred embodiment, such cannabinoid synthase genes expressed in a cannabinoid and/or non-cannabinoid plant or plant-cell suspension culture may be target or localized to certain parts of a cell. For example, in one preferred embodiment, cannabinoid production may be localized to the cytosol allowing cannabinoids to accumulate in the cytoplasm. In one exemplary embodiment, an artificially modified cannabinoids synthase protein may be generated. In this example embodiment, a CBDA synthase may have the trichome targeting sequence remove forming a cytosolic CBDA synthase (cytCBDAs) identified as SEQ ID NO. 9203, (gene) or 9204 (protein). Alternative embodiments would include generation of other artificial cytosol target synthase genes, such as cytosolic THCA synthase (cytTHCAs) identified as SEQ ID NO. 9227 (gene).

[0219] These preferred embodiments may be particularly suited for cannabinoid cell-suspension culture cannabinoid expression systems, as such culture systems lack the trichomes present in whole plants. As such, in one preferred embodiment, a cannabinoid producing plant may be transformed to one or more of the artificial cytosolic targeted cannabinoid synthase genes lacking a trichome-targeting signal. In an alternative embodiment, such artificial cytosolic targeted cannabinoid synthase genes may be expressed in a cannabinoid producing plant suspension culture where the corresponding endogenous wild-type synthase gene has been inhibited and/or knocked out.

[0220] In one embodiment, the invention may include a cannabinoid production, accumulation and modification system that may generate water-soluble cannabinoids. In one preferred embodiment, a plant, such as Cannabis or tobacco, may be genetically modified to express one or more heterologous glycosyltransferase genes, such as UDP glycosyltransferase. In this preferred embodiment, UDP glycosyltransferase (76G1) (SEQ ID NO. 9188) (gene)/SEQ ID NO. 9189 (protein) from Stevia rebaudiana may be expressed in cannabinoid producing plant or cell suspension culture. In a preferred embodiment, the cannabinoid producing plant or cell suspension culture may be Cannabis. In another embodiment, one or more glycosyltransferase from Nicotiana tabacum and/or a homologous glycosyltransferase from Nicotiana benthamiana, may be expressed in a cannabinoid-producing plant, such as Cannabis, or may be over-expressed in an endogenous plant and/or plant cell culture system. In a preferred embodiment, a glycosyltransferase gene and/or protein may be selected from the exemplary plant, such as Nicotiana tabacum Such glycosyltransferase gene and/or protein may include, but not limited to: Glycosyltransferase (NtGT5a) Nicotiana tabacum (SEQ ID NO. 9207) (Amino Acid); Glycosyltransferase (NtGT5a) Nicotiana tabacum (SEQ ID NO. 9208) (DNA); Glycosyltransferase (NtGT5b) Nicotiana tabacum (SEQ ID NO. 9209) (Amino Acid); Glycosyltransferase (NtGT5b) Nicotiana tabacum (SEQ ID NO. 9210) (DNA); UDP-glycosyltransferase 73C3 (NtGT4) Nicotiana tabacum (SEQ ID NO. 9211) (Amino Acid); UDP-glycosyltransferase 73C3 (NtGT4) Nicotiana tabacum (SEQ ID NO. 9212) (DNA); Glycosyltransferase (NtGT1b) Nicotiana tabacum (SEQ ID NO. 9213) (Amino Acid); Glycosyltransferase (NtGT1b) Nicotiana tabacum (SEQ ID NO. 9214) (DNA); Glycosyltransferase (NtGT1a) Nicotiana tabacum (SEQ ID NO. 9215) (Amino Acid); Glycosyltransferase (NtGT1a) Nicotiana tabacum (SEQ ID NO. 9216) (DNA); Glycosyltransferase (NtGT3) Nicotiana tabacum (SEQ ID NO. 9217) (Amino Acid); Glycosyltransferase (NtGT3) Nicotiana tabacum (SEQ ID NO. 9218) (DNA); Glycosyltransferase (NtGT2) Nicotiana tabacum (SEQ ID NO. 9219) (Amino Acid); and/or Glycosyltransferase (NtGT2) Nicotiana tabacum (SEQ ID NO. 9220) (DNA). The sequences from Nicotiana tabacum are exemplary only as other tobacco and non-tobacco glycosyltransferase may be used.

[0221] As noted above, such glycosyltransferases may glycosylate the cannabinoids and/or functionalized cannabinoids in a plant or plant cell suspension culture as generally described here. Naturally, other glycosyltransferase genes from alternative sources may be included in the current invention.

[0222] As noted above, in one embodiment, one or more glycosyltransferases may be targeted or localized to a portion of the plant cell. For example, in this preferred embodiment, cannabinoid glycosylation may be localized to the trichome allowing cannabinoids to accumulate at higher-then wild-type levels in that structure. In one exemplary embodiment, an artificially modified glycosyltransferase may be generated. In this example embodiment, a UDP glycosyltransferase (76G1) may be fused with a trichome-targeting sequence at its N-terminal tail. This trichome targeting sequence may be recognized by the cell and cause it to be transported to the trichome. This artificial gene construct is identified as SEQ ID NO. 9200 (gene), or SEQ ID NO. 9201 (protein). In one embodiment, a trichome targeting sequence or domain may be derived from any number of synthases. For example, in one embodiment a THCA Synthase Trichome domain (SEQ ID NO. 9221) may be coupled with a glycosyltransferase as generally described above. Moreover, in another example, a CBDA Synthase Trichome targeting domain (SEQ ID NO. 9222) may be coupled with a glycosyltransferase as generally described above.

[0223] In one embodiment, the inventive technology may include the in vivo generation of one or more cannabinoid glucuronides. As also noted above, UDP-glucuronosyltransferases catalyze the transfer of the glucuronosyl group from uridine 5′-diphospho-glucuronic acid (UDP-glucuronic acid) to substrate molecules that contain oxygen, nitrogen, sulfur or carboxyl functional groups. Glucuronidation of a compound, such as a cannabinoid may modulate the bioavailability, activity, and clearance rate of a compound. As such, in one embodiment, the invention may include a cannabinoid production, accumulation and modification system that may generate water-soluble cannabinoid glucuronides. In one preferred embodiment, a plant, such as Cannabis or tobacco, or another eukaryotic cell, such as yeast, may be genetically modified to express one or more endogenous and/or heterologous UDP-glucuronosyltransferases. Such a UDP-glucuronosyltransferases may be expressed in cannabinoid producing plant, non-cannabinoid producing plant, cell suspension culture, or yeast culture. Non-limiting examples of UDP-glucuronosyltransferases may include UGT1A1, UGT1A3, UGT1A4, UGT1A6, UGT1A7, UGT1A8, UGT1A9, UGT1A1O, UGT2B4, UGT2B7, UGT2BI5, and UGT2BI7—there nucleotide and amino acid sequences being generally known to those of ordinary skill in the art. These UDP-glucuronosyltransferases may be a recombinant UDP-glucuronosyltransferases. In additional embodiments, a UDP-glucuronosyltransferase may be codon optimized for expression in, for example yeast. Methods of making, transforming plant cells, and expressing recombinant UDP-glucuronosyltransferases are known in the art. In a preferred embodiment, the cannabinoid producing plant or cell suspension culture may be Cannabis. In another embodiment, one or more UDP-glucuronosyltransferases and/or a homolog/ortholog of a UDP-glucuronosyltransferase, may be expressed in a cannabinoid-producing plant, such as Cannabis, or may be over-expressed in an endogenous plant and/or plant cell culture system or in yeast. In a preferred embodiment, a UDP-glucuronosyltransferase may be targeted or localized to a portion of the plant cell. For example, in this preferred embodiment, cannabinoid glucuronidation may be localized to the trichome allowing cannabinoids to accumulate at higher-then wild-type levels in that structure. In one exemplary embodiment, an artificially modified UDP-glucuronosyltransferase may be generated. In this embodiment, a UDP-glucuronosyltransferase may be fused with a trichome-targeting sequence at its N-terminal tail. This trichome targeting sequence may be recognized by the cell and cause it to be transported to the trichome. In one embodiment, a trichome targeting sequence or domain may be derived from any number of synthases. For example, in one embodiment a THCA Synthase trichome domain (SEQ ID NO. 9221) may be coupled with a UDP-glucuronosyltransferase as generally described above. Moreover, in another example, a CBDA Synthase trichome targeting domain (SEQ ID NO. 9222) may be coupled with a UDP-glucuronosyltransferase as generally described above. In another embodiment, a UDP-glucuronosyltransferase may further be targeted to the cytosol as generally described herein.

[0224] In another embodiment, invention may include an embodiment where transiently modified cannabinoids may be passively and/or actively excreted from a cell or into a cell wall. In one exemplary model, an exogenous ATP-binding cassette transporter (ABC transporters or ABCt) or other similar molecular structure may recognize the glycosyl or glucuronic acid or acetyl functional group (conjugate) on the transiently modified cannabinoid and actively transport it across the cell wall/membrane and into the surrounding media.

[0225] In one embodiment, a plant may be transformed to express a heterologous ABC transporter. In this embodiment, an ABCt may facilitate cannabinoid transport outside the cells in suspension cultures, such as a Cannabis or tobacco cell suspension culture. In this preferred embodiment, a human multi-drug transported (ABCG2) may be expressed in a plant cell suspension culture of the same respectively. ABCG2 is a plasma membrane directed protein and may further be identified as SEQ ID NO. 9190 (gene), or 9190 (protein).

[0226] Generally, a trichome structure, such as in Cannabis or tobacco, will have very little to no substrate for a glycosyltransferase enzyme to use to effectuate glycosylation. To resolve this problem, in one embodiment, the invention may include systems, methods and compositions to increase substrates for glycosyltransferase, namely select sugars in a trichome. In one preferred embodiment, the invention may include the targeted or localization of sugar transport to the trichome. In this preferred embodiment, an exogenous or endogenous UDP-glucose/UDP-galactose transporter (UTR1) may be expressed in a trichome producing plant, such as Cannabis or tobacco and the like. In this embodiment, the UDP-glucose/UDP-galactose transporter (UTR1) may be modified to include a plasma-membrane targeting sequence and/or domain. With this targeting domain, the UDP-glucose/UDP-galactose transporter (UTR1) may allow the artificial fusion protein to be anchored to the plasma membrane. In this configuration, sugar substrates from the cytosol may pass through the plasma membrane bound UDP-glucose/UDP-galactose transporter (PM-UTR1) into the trichome. In this embodiment, substrates for glycosyltransferase may be localized to the trichome and allowed to accumulate further allowing enhanced glycosylation of cannabinoids in the trichome. In one example, SEQ ID NO. 9202 is identified as the polynucleotide gene sequence for a heterologous UDP-glucose/galactose transporter (UTR1) from Arabidopsis thaliana having a plasma-membrane targeting sequence replacing a tonoplast targeting sequence. The plasma membrane targeting sequence of this exemplary fusion protein may include the following sequence (see SEQ ID NO 9202) TGCTCCATAATGAACTTAATGTGTGGGTCTACCTGCGCCGCT, or a sequence having 70-99% homology with the sequence.

[0227] It should be noted that a number of combinations and permutations of the genes/proteins described herein may be co-expressed and thereby accomplish one or more of the goals of the current invention. Such combinations are exemplary of preferred embodiments only, and not limiting in any way.

[0228] In one embodiment, a gene, such as a cannabinoid synthase, or a gene fragment corresponding with, for example a signal domain may be inhibited, downregulated, disrupted, or may even be knocked-out. One of ordinary skill in the art will recognize the many processes that can accomplish this without undue experimentation. In other embodiment, a knock-out may mean overexpression of a modified endo- or exogenous gene compared to the wild-type version.

[0229] For example, in one embodiment high levels of cannabinoid glycosylation may be generated by co-expressing CYP3A4 and CYP oxidoreductase (cytochrome P450 with P450 oxidoreductase) and at least one endogenous glycosyltransferases in N. benthamiana. In another embodiment, one or more of the endogenous or exogenous gene may be expressed in a plant or plant cell culture with the co-expression of myb and/or a catalase. In this configuration, there exists an additive effect of over-expressing a Myb transcription factor and a catalase, one or more of which may be targeted or localized, in the synthesis of water-soluble cannabinoids (glycosylated and hydroxylated) in Cannabis sativa.

[0230] In certain embodiments, endocannabinoids may be functionalized and/or acetylated and/or glycosylated as generally described herein.

[0231] All sequences described herein include sequences having between 70-99% homology with the sequence identified.

[0232] The inventive technology may further include novel cannabinoid compounds as well as their in vivo generation. As demonstrated in FIGS. 36 and 37 respectively, the invention includes modified cannabinoid compounds identified as: 36B, 36C, 36D, 37A, 37B, 37C, 37D, 37E and 37F and/or a physiologically acceptable salt thereof. In one preferred embodiment, the invention may include a pharmaceutical composition as active ingredient an effective amount or dose of one or more compounds identified as 36A, 36B, 36C, 36D, 37B, 37C, 37D, 37E and 37F and/or a physiologically acceptable salt thereof, wherein the active ingredient is provided together with pharmaceutically tolerable adjuvants and/or excipients in the pharmaceutical composition. Such pharmaceutical composition may optionally be in combination with one or more further active ingredients. In one embodiment, one of the aforementioned compositions may act as a prodrug. The term “prodrug” is taken to mean compounds according to the invention which have been modified by means of, for example, sugars and which are cleaved in the organism to form the effective compounds according to the invention. The terms “effective amount” or “effective dose” or “dose” are interchangeably used herein and denote an amount of the pharmaceutical compound having a prophylactically or therapeutically relevant effect on a disease or pathological conditions, i.e. which causes in a tissue, system, animal or human a biological or medical response which is sought or desired, for example, by a researcher or physician. Pharmaceutical formulations can be administered in the form of dosage units which comprise a predetermined amount of active ingredient per dosage unit. The concentration of the prophylactically or therapeutically active ingredient in the formulation may vary from about 0.1 to 100 wt %. Preferably, the compound of formula (I) or the pharmaceutically acceptable salts thereof are administered in doses of approximately 0.5 to 1000 mg, more preferably between 1 and 700 mg, most preferably 5 and 100 mg per dose unit. Generally, such a dose range is appropriate for total daily incorporation. In other terms, the daily dose is preferably between approximately 0.02 and 100 mg/kg of body weight. The specific dose for each patient depends, however, on a wide variety of factors as already described in the present specification (e.g. depending on the condition treated, the method of administration and the age, weight and condition of the patient). Preferred dosage unit formulations are those which comprise a daily dose or part-dose, as indicated above, or a corresponding fraction thereof of an active ingredient. Furthermore, pharmaceutical formulations of this type can be prepared using a process which is generally known in the pharmaceutical art.

[0233] In the meaning of the present invention, the compound is further defined to include pharmaceutically usable derivatives, solvates, prodrugs, tautomers, enantiomers, racemates and stereoisomers thereof, including mixtures thereof in all ratios.

[0234] In one embodiment, the current invention may include systems, methods and compositions for the efficient production of cannabidiolic acid (CBDA) in yeast coupled with a system of hydrogen peroxide detoxification. In this embodiment, the inventive technology may include the generation of a genetically modified yeast cell.

[0235] In one embodiment, the inventive system may include: 1) transforming a yeast cell with a first nucleotide sequence comprising the nucleotide sequence expressing an acyl-activating enzyme and expressing a mutant prenyltransferase; and 2) transforming the yeast cell with a second nucleotide sequence comprising the nucleotide sequence expressing olivetolic synthase, expressing olivetolic acid cyclase and expressing aromatic prenyltransferase; 3) and transforming a yeast cell with a third nucleotide sequence expressing a catalase gene.

[0236] In another embodiment, the inventive system may include the step of: 1) transforming a yeast cell with a first nucleotide sequence expressing an acyl-activating enzyme and expressing a mutant prenyltransferase; 2) transforming a yeast cell with a second nucleotide sequence expressing olivetolic synthase and expressing olivetolic acid cyclase; and transforming a yeast cell with a third nucleotide sequence expressing aromatic prenyltransferase and expressing cannabidiolic acid synthase; and 3) transforming a yeast cell with a third nucleotide sequence expressing a catalase gene.

[0237] Additional embodiments of the invention may further include: 1) transforming a yeast strain with a first nucleotide sequence expressing an acyl-activating enzyme; 2) transforming the yeast strain with a second nucleotide sequence expressing a mutant prenyltransferase; 3) transforming the yeast strain with a third nucleotide sequence expressing olivetolic synthase; 4) transforming the yeast strain with a fourth nucleotide sequence expressing olivetolic acid cyclase; 5) transforming the yeast strain with a fifth nucleotide sequence expressing aromatic prenyltransferase; 6) transforming the yeast strain with a sixth nucleotide expressing cannabidiolic acid synthase; and 7) transforming the yeast strain with a sixth nucleotide expressing a catalase.

[0238] Additional embodiments of the invention may further include: 1) transforming a yeast cell with a first nucleotide sequence expressing an acyl-activating enzyme and expressing a mutant prenyltransferase; 2) transforming the yeast cell with a second nucleotide sequence expressing olivetolic synthase and expressing olivetolic acid cyclase; 3) and transforming the yeast cell with a third nucleotide sequence expressing aromatic prenyltransferase and expressing cannabidiolic acid synthase; and 7) transforming the yeast cell with a fourth nucleotide expressing a catalase.

[0239] Additional embodiments of the invention may further include: 1) transforming a yeast cell with a first nucleotide sequence expressing an acyl-activating enzyme and expressing a mutant prenyltransferase; 2) transforming the yeast cell with a second nucleotide sequence expressing olivetolic synthase and expressing olivetolic acid cyclase; 3) transforming the yeast cell with a third nucleotide sequence expressing aromatic prenyltransferase and expressing cannabidiolic acid synthase, and 7) transforming the yeast cell with a fourth nucleotide expressing a catalase.

[0240] Sequence listings for the above identified sequences can be found in specification index NOs 1 and 2 filed in application Ser. No. 15/815,651, both of which are incorporated herein by reference. In particular, the following sequences are specifically incorporated by reference: iSEQ. ID. NO. 1; iSEQ. ID. NO. 2; iSEQ. ID. NO. 4; iSEQ. ID. NO. 5; iSEQ. ID. NO. 6; iSEQ. ID. NO. 7; iSEQ. ID. NO. 8; iSEQ. ID. NO. 9; iSEQ. ID. NO. 10; iSEQ. ID. NO. 11; iSEQ. ID. NO. 12; iSEQ. ID. NO. 13; iSEQ. ID. NO. 14; iSEQ. ID. NO. 15; iSEQ. ID. NO. 16; iSEQ. ID. NO. 23; iSEQ. ID. NO. 24; iSEQ. ID. NO. 22; iSEQ. ID. NO. 25; iSEQ. ID. NO. 26; iSEQ. ID. NO. 27; and iSEQ. ID. NO. 28. (The above sequences are marked with an “i” to denote their incorporation by reference.

[0241] In one embodiment, the invention may include systems, methods and compositions for the expression of exogenous, or heterologous genes in a yeast cell that may allow the biomodification and/or secretion of cannabinoids generated in a yeast cell. Specifically, the invention may allow the generation of cannabinoids and/or cannabinoid precursors in a genetically modified yeast cell, which may further be functionalized and/or modified into a water-soluble form. This embodiment may include transforming a yeast cell to express one or more of the following: heterologous cytochrome P450, and/or a heterologous P450 oxidoreductase, and/or a glycosyltransferase and/or heterologous ABC transporter. Similar to the above example, the genes may further be codon optimized for expression in a yeast cell that is configured to produce one or more cannabinoids or cannabinoid precursors, such as those genetically modified yeast cells described in U.S. Pat. No. 9,822,384, and U.S. patent application Ser. No. 15/815,651. In this embodiment, the exogenous catalase may be capable of generating water-soluble cannabinoid in one or more of the yeast cells identified in U.S. Pat. No. 9,822,384, and U.S. patent application Ser. No. 15/815,651, both of which are hereby incorporated in their entirety.

[0242] In one embodiment, the current invention may include systems, methods and compositions for the efficient production of cannabidiolic acid (CBDA) in yeast coupled with a system of biotransformation of the cannabinoids into a water-soluble form. In this embodiment, the inventive technology may include the generation of a genetically modified yeast cell.

[0243] In one embodiment, the inventive system may include: 1) transforming a yeast cell with a first nucleotide sequence comprising the nucleotide sequence expressing an acyl-activating enzyme and expressing a mutant prenyltransferase; and 2) transforming the yeast cell with a second nucleotide sequence comprising the nucleotide sequence expressing olivetolic synthase, expressing olivetolic acid cyclase and expressing aromatic prenyltransferase.; 3) and transforming a yeast cell to express one or more of the following: heterologous cytochrome P450, and/or a heterologous P450 oxidoreductase, and/or a glycosyltransferase and/or heterologous ABC transporter, and/or a catalase. In this embodiment, the heterologous cytochrome P450, and/or a heterologous P450 oxidoreductase, and/or a glycosyltransferase and/or heterologous ABC transporter, and/or a catalase, the sequences identified herein may further be codon optimized for expression in yeast. Such codon optimization being generally within the knowledge and ability of one of ordinary skill in the art.

[0244] In another embodiment, the inventive system may include the step of: 1) transforming a yeast cell with a first nucleotide sequence expressing an acyl-activating enzyme and expressing a mutant prenyltransferase; 2) transforming a yeast cell with a second nucleotide sequence expressing olivetolic synthase and expressing olivetolic acid cyclase; and transforming a yeast cell with a third nucleotide sequence expressing aromatic prenyltransferase and expressing cannabidiolic acid synthase; 3) and transforming a yeast cell to express one or more of the following: heterologous cytochrome P450, and/or a heterologous P450 oxidoreductase, and/or a glycosyltransferase and/or heterologous ABC transporter, and/or a catalase.

[0245] Additional embodiments of the invention may further include: 1) transforming a yeast strain with a first nucleotide sequence expressing an acyl-activating enzyme; 2) transforming the yeast strain with a second nucleotide sequence expressing a mutant prenyltransferase; 3) transforming the yeast strain with a third nucleotide sequence expressing olivetolic synthase; 4) transforming the yeast strain with a fourth nucleotide sequence expressing olivetolic acid cyclase; 5) transforming the yeast strain with a fifth nucleotide sequence expressing aromatic prenyltransferase; 6) transforming the yeast strain with a sixth nucleotide expressing cannabidiolic acid synthase; and 7) and transforming a yeast cell to express one or more of the following: heterologous cytochrome P450, and/or a heterologous P450 oxidoreductase, and/or a glycosyltransferase and/or heterologous ABC transporter, and/or a catalase.

[0246] Additional embodiments of the invention may further include: 1) transforming a yeast cell with a first nucleotide sequence expressing an acyl-activating enzyme and expressing a mutant prenyltransferase; 2) transforming the yeast cell with a second nucleotide sequence expressing olivetolic synthase and expressing olivetolic acid cyclase; 3) and transforming the yeast cell with a third nucleotide sequence expressing aromatic prenyltransferase and expressing cannabidiolic acid synthase; and 7) and transforming a yeast cell to express one or more of the following: heterologous cytochrome P450, and/or a heterologous P450 oxidoreductase, and/or a glycosyltransferase and/or heterologous ABC transporter, and/or a catalase.

[0247] Additional embodiments of the invention may further include: 1) transforming a yeast cell with a first nucleotide sequence expressing an acyl-activating enzyme and expressing a mutant prenyltransferase; 2) transforming the yeast cell with a second nucleotide sequence expressing olivetolic synthase and expressing olivetolic acid cyclase; 3) transforming the yeast cell with a third nucleotide sequence expressing aromatic prenyltransferase and expressing cannabidiolic acid synthase, and 7) and transforming a yeast cell to express one or more of the following: heterologous cytochrome P450, and/or a heterologous P450 oxidoreductase, and/or a glycosyltransferase and/or heterologous ABC transporter, and/or a catalase.

[0248] Sequence listings for the above identified sequences can be found in specification index NOs 1 and 2 filed in application Ser. No. 15/815,651, both of which are incorporated herein by reference. In particular, the following sequences are specifically incorporated by reference: iSEQ. ID. NO. 1; iSEQ. ID. NO. 2; iSEQ. ID. NO. 4; iSEQ. ID. NO. 5; iSEQ. ID. NO. 6; iSEQ. ID. NO. 7; iSEQ. ID. NO. 8; iSEQ. ID. NO. 9; iSEQ. ID. NO. 10; iSEQ. ID. NO. 11; iSEQ. ID. NO. 12; iSEQ. ID. NO. 13; iSEQ. ID. NO. 14; iSEQ. ID. NO. 15; iSEQ. ID. NO. 16; iSEQ. ID. NO. 23; iSEQ. ID. NO. 24; iSEQ. ID. NO. 22; iSEQ. ID. NO. 25; iSEQ. ID. NO. 26; iSEQ. ID. NO. 27; and iSEQ. ID. NO. 28. (The above sequences are marked with an “i” to denote their incorporation by reference.

[0249] The invention may further include systems, method and compositions for the generation of water-soluble cannabinoids in a cell culture system expressing an endogenous glycosyltransferase. In this embodiment, one or more cannabinoids, such as in the form of a cannabinoid extract, may be introduced to a tobacco cell culture expressing one or more endogenous glycosyltransferase that may generate water-soluble cannabinoids. In some embodiment, a tobacco cell culture may be further genetically modified to express an endogenous glycosyltransferase which may be operably linked to a promoter. In this embodiment, such a promotor may be an inducible, constitutive or other promotor. In this preferred embodiment, such an endogenous glycosyltransferase may cause the overexpression of the protein generating a more robust cannabinoid biotransformation system.

[0250] As noted above, present invention allows the scaled production of water-soluble cannabinoids. Because of this enhanced solubility, the invention allows for the addition of such water-soluble cannabinoid to a variety of compositions without requiring oils and or emulsions that are generally required to maintain the non-modified cannabinoids in suspension. As a result, the present invention may all for the production of a variety of compositions for both the food and beverage industry, as well as pharmaceutical applications that do not required oils and emulsion suspensions and the like.

[0251] In one embodiment the invention may include aqueous compositions containing one or more water-soluble cannabinoids that may be introduced to a food or beverage. In a preferred embodiment, the invention may include an aqueous solution containing one or more dissolved water-soluble cannabinoids. In this embodiment, such water-soluble cannabinoid may include a glycosylated cannabinoid, and/or an acetylated cannabinoid, and/or a mixture of both. Here, the glycosylated cannabinoid, and/or said acetylated cannabinoid were generated in vivo as generally described herein, or in vitro. In additional embodiment, the water-soluble cannabinoid may be an isolated non-psychoactive, such as CBD and the like. Moreover, in this embodiment, the aqueous may contain one or more of the following: saline, purified water, propylene glycol, deionized water, and/or an alcohol such as ethanol as well as a pH buffer that may allow the aqueous solution to be maintained at a pH below 7.4. Additional embodiments may include the addition an acid of base, such as formic acid, or ammonium hydroxide.

[0252] In another embodiment, the invention may include a consumable food additive having at least one water-soluble cannabinoid, such as a glycosylated and/or an acetylated cannabinoid, and/or a mixture of both, where such water-soluble cannabinoids may be generated in vivo and/or in vitro. This consumable food additive may further include one or more a food additive polysaccharides, such as dextrin and/or maltodextrin, as well as an emulsifier. Example emulisifiers may include, but not be limited to: gum arabic, modified starch, pectin, xanthan gum, gum ghatti, gum tragacanth, fenugreek gum, mesquite gum, mono-glycerides and di-glycerides of long chain fatty acids, sucrose monoesters, sorbitan esters, polyethoxylated glycerols, stearic acid, palmitic acid, mono-glycerides, di-glycerides, propylene glycol esters, lecithin, lactylated mono- and di-glycerides, propylene glycol monoesters, polyglycerol esters, diacetylated tartaric acid esters of mono- and di-glycerides, citric acid esters of monoglycerides, stearoyl-2-lactylates, polysorbates, succinylated monoglycerides, acetylated monoglycerides, ethoxylated monoglycerides, quillaia, whey protein isolate, casein, soy protein, vegetable protein, pullulan, sodium alginate, guar gum, locust bean gum, tragacanth gum, tamarind gum, carrageenan, furcellaran, Gellan gum, psyllium, curdlan, konjac mannan, agar, and cellulose derivatives, or combinations thereof.

[0253] The consumable food additive of the invention may be a homogenous composition and may further comprising a flavoring agent. Exemplary flavoring agents may include: sucrose (sugar), glucose, fructose, sorbitol, mannitol, corn syrup, high fructose corn syrup, saccharin, aspartame, sucralose, acesulfame potassium (acesulfame-K), neotame. The consumable food additive of the invention may also contain one or more coloring agents. Exemplary coloring agents may include: FD&C Blue Nos. 1 and 2, FD&C Green No. 3, FD&C Red Nos. 3 and 40, FD&C Yellow Nos. 5 and 6, Orange B, Citrus Red No. 2, annatto extract, beta-carotene, grape skin extract, cochineal extract or carmine, paprika oleoresin, caramel color, fruit and vegetable juices, saffron, Monosodium glutamate (MSG), hydrolyzed soy protein, autolyzed yeast extract, disodium guanylate or inosinate.

[0254] The consumable food additive of the invention may also contain one or more surfactants, such as glycerol monostearate and polysorbate 80. The consumable food additive of the invention may also contain one or more preservatives. Exemplary preservatives may include ascorbic acid, citric acid, sodium benzoate, calcium propionate, sodium erythorbate, sodium nitrite, calcium sorbate, potassium sorbate, BHA, BHT, EDTA, tocopherols. The consumable food additive of the invention may also contain one or more nutrient supplements, such as: thiamine hydrochloride, riboflavin, niacin, niacinamide, folate or folic acid, beta carotene, potassium iodide, iron or ferrous sulfate, alpha tocopherols, ascorbic acid, Vitamin D, amino acids, multi-vitamin, fish oil, co-enzyme Q-10, and calcium.

[0255] In one embodiment, the invention may include a consumable fluid containing at least one dissolved water-soluble cannabinoid. In one preferred embodiment, this consumable fluid may be added to a drink or beverage to infused it with the dissolved water-soluble cannabinoid generated in an in vivo system as generally herein described, or through an in vitro process, for example as identified by Zipp et al. which is incorporated herein by reference. As noted above, such water-soluble cannabinoid may include a water-soluble glycosylated cannabinoid and/or a water-soluble acetylated cannabinoid, and/or a mixture of both. The consumable fluid may include a food additive polysaccharide such as maltodextrin and/or dextrin, which may further be in an aqueous form and/or solution. For example, in one embodiment, and aqueous maltodextrin solution may include a quantity of sorbic acid and an acidifying agent to provide a food grade aqueous solution of maltodextrin having a pH of 2-4 and a sorbic acid content of 0.02-0.1% by weight.

[0256] In certain embodiments, the consumable fluid may include water, as well as an alcoholic beverage; a non-alcoholic beverage, a noncarbonated beverage, a carbonated beverage, a cola, a root beer, a fruit-flavored beverage, a citrus-flavored beverage, a fruit juice, a fruit-containing beverage, a vegetable juice, a vegetable containing beverage, a tea, a coffee, a dairy beverage, a protein containing beverage, a shake, a sports drink, an energy drink, and a flavored water. The consumable fluid may further include at least one additional ingredients, including but not limited to: xanthan gum, cellulose gum, whey protein hydrolysate, ascorbic acid, citric acid, malic acid, sodium benzoate, sodium citrate, sugar, phosphoric acid, and water.

[0257] In one embodiment, the invention may include a consumable gel having at least one water-soluble cannabinoid and gelatin in an aqueous solution. In a preferred embodiment, the consumable gel may include a water-soluble glycosylated cannabinoid and/or a water-soluble acetylated cannabinoid, or a mixture of both, generated in an in vivo system, such as a whole plant or cell suspension culture system as generally herein described.

[0258] Additional embodiments may include a liquid composition having at least one water-soluble cannabinoid solubilized in a first quantity of water; and at least one of: xanthan gum, cellulose gum, whey protein hydrolysate, ascorbic acid, citric acid, malic acid, sodium benzoate, sodium citrate, sugar, phosphoric acid, and/or a sugar alcohol. In this embodiment, a water-soluble cannabinoid may include a glycosylated water-soluble cannabinoid, an acetylated water-soluble cannabinoid, or a mixture of both. In one preferred embodiment, the composition may further include a quantity of ethanol. Here, the amount of water-soluble cannabinoid may include: less than 10 mass % water; more than 95 mass % water; about 0.1 mg to about 1000 mg of the water-soluble cannabinoid; about 0.1 mg to about 500 mg of the water-soluble cannabinoid; about 0.1 mg to about 200 mg of the water-soluble cannabinoid; about 0.1 mg to about 100 mg of the water-soluble cannabinoid; about 0.1 mg to about 100 mg of the water-soluble cannabinoid; about 0.1 mg to about 10 mg of the water-soluble cannabinoid; about 0.5 mg to about 5 mg of the water-soluble cannabinoid; about 1 mg/kg to 5 mg/kg (body weight) in a human of the water-soluble cannabinoid.

[0259] In alternative embodiment, the composition may include at least one water-soluble cannabinoid in the range of 50 mg/L to 300 mg/L; at least one water-soluble cannabinoid in the range of 50 mg/L to 100 mg/L; at least one water-soluble cannabinoid in the range of 50 mg/L to 500 mg/L; at least one water-soluble cannabinoid over 500 mg/L; at least one water-soluble cannabinoid under 50 mg/L. Additional embodiments may include one or more of the following additional components: a flavoring agent; a coloring agent; a coloring agent; and/or caffeine.

[0260] In one embodiment, the invention may include a liquid composition having at least one water-soluble cannabinoid solubilized in said first quantity of water and a first quantity of ethanol in a liquid state. In a preferred embodiment, a first quantity of ethanol in a liquid state may be between 1% to 20% weight by volume of the liquid composition. In this embodiment, a water-soluble cannabinoid may include a glycosylated water-soluble cannabinoid, an acetylated water-soluble cannabinoid, or a mixture of both. Such water-soluble cannabinoids may be generated in an in vivo and/or in vitro system as herein identified. In a preferred embodiment, the ethanol, or ethyl alcohol component may be up to about ninety-nine point nine-five percent (99.95%) by weight and the water-soluble cannabinoid about zero point zero five percent (0.05%) by weight. In another embodiment,

[0261] Examples of the preferred embodiment may include liquid ethyl alcohol compositions having one or more water-soluble cannabinoids wherein said ethyl alcohol has a proof greater than 100, and/or less than 100. Additional examples of a liquid composition containing ethyl alcohol and at least one water-soluble cannabinoid may include, beer, wine and/or distilled spirit.

[0262] Additional embodiments of the invention may include a chewing gum composition having a first quantity of at least one water-soluble cannabinoid. In a preferred embodiment, a chewing gum composition may further include a gum base comprising a buffering agent selected from the group consisting of acetates, glycinates, phosphates, carbonates, glycerophosphates, citrates, borates, and mixtures thereof. Additional components may include at least one sweetening agent; and at least one flavoring agent. As noted above, in a preferred embodiment, a water-soluble cannabinoid may include at least one water-soluble acetylated cannabinoid, and/or at least one water-soluble glycosylated cannabinoid, or a mixture of the two. In this embodiment, such water soluble glycosylated cannabinoid, and/or said acetylated cannabinoid may have been glycosylated and/or acetylated in vivo respectively.

[0263] In one embodiment, the chewing gum composition described above may include:
[0264] 0.01 to 1% by weight of at least one water-soluble cannabinoid;
[0265] 25 to 85% by weight of a gum base;
[0266] 10 to 35% by weight of at least one sweetening agent; and
[0267] 1 to 10% by weight of a flavoring agent.

[0268] Here, such flavoring agents may include: menthol flavor, eucalyptus, mint flavor and/or L-menthol. Sweetening agents may include one or more of the following: xylitol, sorbitol, isomalt, aspartame, sucralose, acesulfame potassium, and saccharin. Additional preferred embodiment may include a chewing gum having a pharmaceutically acceptable excipient selected from the group consisting of: fillers, disintegrants, binders, lubricants, and antioxidants. The chewing gum composition may further be non-disintegrating and also include one or more coloring and/or flavoring agents.

[0269] The invention may further include a composition for a water-soluble cannabinoid infused solution comprising essentially of: water and/or purified water, at least one water-soluble cannabinoid, and at least one flavoring agent. A water-soluble cannabinoid infused solution of the invention may further include a sweetener selected from the group consisting of: glucose, sucrose, invert sugar, corn syrup, stevia extract powder, stevioside, steviol, aspartame, saccharin, saccharin salts, sucralose, potassium acetosulfam, sorbitol, xylitol, mannitol, erythritol, lactitol, alitame, miraculin, monellin, and thaumatin or a combination of the same. Additional components of the water-soluble cannabinoid infused solution may include, but not be limited to: sodium chloride, sodium chloride solution, glycerin, a coloring agent, and a demulcent. As to this last potential component, in certain embodiment, a demulcent may include: pectin, glycerin, honey, methylcellulose, and/or propylene glycol. As noted above, in a preferred embodiment, a water-soluble cannabinoid may include at least one water-soluble acetylated cannabinoid, and/or at least one water-soluble glycosylated cannabinoid, or a mixture of the two. In this embodiment, such water soluble glycosylated cannabinoid, and/or said acetylated cannabinoid may have been glycosylated and/or acetylated in vivo respectively.

[0270] The invention may further include a composition for a water-soluble cannabinoid infused anesthetic solution having water, or purified water, at least one water-soluble cannabinoid, and at least one oral anesthetic. In a preferred embodiment, an anesthetic may include benzocaine, and/or phenol in a quantity of between 0.1% to 15% volume by weight.

[0271] Additional embodiments may include a water-soluble cannabinoid infused anesthetic solution having a sweetener which may be selected from the group consisting of: glucose, sucrose, invert sugar, corn syrup, stevia extract powder, stevioside, steviol, aspartame, saccharin, saccharin salts, sucralose, potassium acetosulfam, sorbitol, xylitol, mannitol, erythritol, lactitol, alitame, miraculin, monellin, and thaumatin or a combination of the same. Additional components of the water-soluble cannabinoid infused solution may include, but not be limited to: sodium chloride, sodium chloride solution, glycerin, a coloring agent a demulcent. In a preferred embodiment, a demulcent may selected from the group consisting of: pectin, glycerin, honey, methylcellulose, and propylene glycol. As noted above, in a preferred embodiment, a water-soluble cannabinoid may include at least one water-soluble acetylated cannabinoid, and/or at least one water-soluble glycosylated cannabinoid, or a mixture of the two. In this embodiment, such water soluble glycosylated cannabinoid, and/or said acetylated cannabinoid may have been glycosylated and/or acetylated in vivo respectively.

[0272] The invention may further include a composition for a hard lozenge for rapid delivery of water-soluble cannabinoids through the oral mucosa. In this embodiment, such a hard lozenge composition may include: a crystalized sugar base, and at least one water-soluble cannabinoid, wherein the hard lozenge has a moisture content between 0.1 to 2%. In this embodiment, the water-soluble cannabinoid may be added to the sugar based when it is in a liquefied form and prior to the evaporation of the majority of water content. Such a hard lozenge may further be referred to as a candy.

[0273] In a preferred embodiment, a crystalized sugar base may be formed from one or more of the following: sucrose, invert sugar, corn syrup, and isomalt or a combination of the same. Additional components may include at least one acidulant. Examples of acidulants may include, but not be limited to: citric acid, tartaric acid, fumaric acid, and malic acid. Additional components may include at least one pH adjustor. Examples of pH adjustors may include, but not be limited to: calcium carbonate, sodium bicarbonate, and magnesium trisilicate.

[0274] In another preferred embodiment, the composition may include at least one anesthetic. Example of such anesthetics may include benzocaine, and phenol. In this embodiment, first quantity of anesthetic may be between 1 mg to 15 mg per lozenge. Additional embodiments may include a quantity of menthol. In this embodiment, such a quantity of menthol may be between 1 mg to 20 mg. The hard lozenge composition may also include a demulcent, for example: pectin, glycerin, honey, methylcellulose, propylene glycol, and glycerin. In this embodiment, a demulcent may be in a quantity between 1 mg to 10 mg. As noted above, in a preferred embodiment, a water-soluble cannabinoid may include at least one water-soluble acetylated cannabinoid, and/or at least one water-soluble glycosylated cannabinoid, or a mixture of the two. In this embodiment, such water soluble glycosylated cannabinoid, and/or said acetylated cannabinoid may have been glycosylated and/or acetylated in vivo respectively.

[0275] The invention may include a chewable lozenge for rapid delivery of water-soluble cannabinoids through the oral mucosa. In a preferred embodiment, the compositions may include: a glycerinated gelatin base, at least one sweetener; and at least one water-soluble cannabinoid dissolved in a first quantity of water. In this embodiment, a sweetener may include sweetener selected from the group consisting of: glucose, sucrose, invert sugar, corn syrup, stevia extract powder, stevioside, steviol, aspartame, saccharin, saccharin salts, sucralose, potassium acetosulfam, sorbitol, xylitol, mannitol, erythritol, lactitol, alitame, miraculin, monellin, and thaumatin or a combination of the same.

Additional components may include at least one acidulant. Examples of acidulants may include, but not be limited to: citric acid, tartaric acid, fumaric acid, and malic acid. Additional components may include at least one pH adjustor. Examples of pH adjustors may include, but not be limited to: calcium carbonate, sodium bicarbonate, and magnesium trisilicate.

[0276] In another preferred embodiment, the composition may include at least one anesthetic. Example of such anesthetics may include benzocaine, and phenol. In this embodiment, first quantity of anesthetic may be between 1 mg to 15 mg per lozenge. Additional embodiments may include a quantity of menthol. In this embodiment, such a quantity of menthol may be between 1 mg to 20 mg. The chewable lozenge composition may also include a demulcent, for example: pectin, glycerin, honey, methylcellulose, propylene glycol, and glycerin. In this embodiment, a demulcent may be in a quantity between 1 mg to 10 mg. As noted above, in a preferred embodiment, a water-soluble cannabinoid may include at least one water-soluble acetylated cannabinoid, and/or at least one water-soluble glycosylated cannabinoid, or a mixture of the two. In this embodiment, such water soluble glycosylated cannabinoid, and/or said acetylated cannabinoid may have been glycosylated and/or acetylated in vivo respectively.

[0277] The invention may include a soft lozenge for rapid delivery of water-soluble cannabinoids through the oral mucosa. In a preferred embodiment, the compositions may include: polyethylene glycol base, at least one sweetener; and at least one water-soluble cannabinoid dissolved in a first quantity of water. In this embodiment, a sweetener may include sweetener selected from the group consisting of: glucose, sucrose, invert sugar, corn syrup, stevia extract powder, stevioside, steviol, aspartame, saccharin, saccharin salts, sucralose, potassium acetosulfam, sorbitol, xylitol, mannitol, erythritol, lactitol, alitame, miraculin, monellin, and thaumatin or a combination of the same. Additional components may include at least one acidulant. Examples of acidulants may include, but not be limited to: citric acid, tartaric acid, fumaric acid, and malic acid. Additional components may include at least one pH adjustor. Examples of pH adjustors may include, but not be limited to: calcium carbonate, sodium bicarbonate, and magnesium trisilicate.

[0278] In another preferred embodiment, the composition may include at least one anesthetic. Example of such anesthetics may include benzocaine, and phenol. In this embodiment, first quantity of anesthetic may be between 1 mg to 15 mg per lozenge. Additional embodiments may include a quantity of menthol. In this embodiment, such a quantity of menthol may be between 1 mg to 20 mg. The soft lozenge composition may also include a demulcent, for example: pectin, glycerin, honey, methylcellulose, propylene glycol, and glycerin. In this embodiment, a demulcent may be in a quantity between 1 mg to 10 mg. As noted above, in a preferred embodiment, a water-soluble cannabinoid may include at least one water-soluble acetylated cannabinoid, and/or at least one water-soluble glycosylated cannabinoid, or a mixture of the two. In this embodiment, such water soluble glycosylated cannabinoid, and/or said acetylated cannabinoid may have been glycosylated and/or acetylated in vivo respectively.

[0279] In another embodiment, the invention may include a tablet or capsule consisting essentially of a water-soluble glycosylated cannabinoid and a pharmaceutically acceptable excipient. Example may include solid, semi-solid and aqueous excipients such as: maltodextrin, whey protein isolate, xanthan gum, guar gum, diglycerides, monoglycerides, carboxymethyl cellulose, glycerin, gelatin, polyethylene glycol and water-based excipients.

[0280] In a preferred embodiment, a water-soluble cannabinoid may include at least one water-soluble acetylated cannabinoid, and/or at least one water-soluble glycosylated cannabinoid, or a mixture of the two. In this embodiment, such water soluble glycosylated cannabinoid, and/or said acetylated cannabinoid may have been glycosylated and/or acetylated in vivo respectively. Examples of such in vivo systems being generally described herein, including in plant, as well as cell culture systems including Cannabis cell culture, tobacco cell culture and yeast cell culture systems. In one embodiment, a tablet or capsule may include an amount of water-soluble cannabinoid of 5 milligrams or less. Alternative embodiments may include an amount of water-soluble cannabinoid between 5 milligrams and 200 milligrams. Still other embodiments may include a tablet or capsule having amount of water-soluble cannabinoid that is more than 200 milligrams.

[0281] The invention may further include a method of manufacturing and packaging a cannabinoid dosage, consisting of the following steps: 1) preparing a fill solution with a desired concentration of a water-soluble cannabinoid in a liquid carrier wherein said cannabinoid solubilized in said liquid carrier; 2) encapsulating said fill solution in capsules; 3) packaging said capsules in a closed packaging system; and 4) removing atmospheric air from the capsules. In one embodiment, the step of removing of atmospheric air consists of purging the packaging system with an inert gas, such as, for example, nitrogen gas, such that said packaging system provides a room temperature stable product. In one preferred embodiment, the packaging system may include a plaster package, which may be constructed of material that minimizes exposure to moisture and air.

[0282] In one embodiment a preferred liquid carrier may include a water-based carrier, such as for example an aqueous sodium chloride solution. In a preferred embodiment, a water-soluble cannabinoid may include at least one water-soluble acetylated cannabinoid, and/or at least one water-soluble glycosylated cannabinoid, or a mixture of the two. In this embodiment, such water soluble glycosylated cannabinoid, and/or said acetylated cannabinoid may have been glycosylated and/or acetylated in vivo respectively. Examples of such in vivo systems being generally described herein, including in plant, as well as cell culture systems including Cannabis cell culture, tobacco cell culture and yeast cell culture systems. In one embodiment, a desired cannabinoid concentration may be about 1-10% w/w, while in other embodiments it may be about 1.5-6.5% w/w. Alternative embodiments may include an amount of water-soluble cannabinoid between 5 milligrams and 200 milligrams. Still other embodiments may include a tablet or capsule having amount of water-soluble cannabinoid that is more than 200 milligrams.

[0283] The invention may include an oral pharmaceutical solution, such as a sub-lingual spray, consisting essentially of a water-soluble cannabinoid, 30-33% w/w water, about 50% w/w alcohol, 0.01% w/w butylated hydroxylanisole (BHA) or 0.1% w/w ethylenediaminetetraacetic acid (EDTA) and 5-21% w/w co-solvent, having a combined total of 100%, wherein said co-solvent is selected from the group consisting of propylene glycol, polyethylene glycol and combinations thereof, and wherein said water-soluble cannabinoid is a glycosylated cannabinoid, an acetylated cannabinoid or a mixture of the two. In an alternative embodiment, such a oral pharmaceutical solution may consist essentially of 0.1 to 5% w/w of said water-soluble cannabinoid, about 50% w/w alcohol, 5.5% w/w propylene glycol, 12% w/w polyethylene glycol and 30-33% w/w water. In a preferred composition, the alcohol component may be ethanol.

[0284] The invention may include an oral pharmaceutical solution, such as a sublingual spray, consisting essentially of about 0.1% to 1% w/w water-soluble cannabinoid, about 50% w/w alcohol, 5.5% w/w propylene glycol, 12% w/w polyethylene glycol, 30-33% w/w water, 0.01% w/w butylated hydroxyanisole, having a combined total of 100%, and wherein said water-soluble cannabinoid is a glycosylated cannabinoid, an acetylated cannabinoid or a mixture of the two wherein that were generated in vivo. In an alternative embodiment, such a oral pharmaceutical solution may consist essentially of 0.54% w/w water-soluble cannabinoid, 31.9% w/w water, 12% w/w polyethylene glycol 400, 5.5% w/w propylene glycol, 0.01% w/w butylated hydroxyanisole, 0.05% w/w sucralose, and 50% w/w alcohol, wherein the a the alcohol components may be ethanol.

[0285] The invention may include a solution for nasal and/or sublingual administration of a cannabinoid including: 1) an excipient of propylene glycol, ethanol anhydrous, or a mixture of both; and 2) a water-soluble cannabinoid which may include glycosylated cannabinoid an acetylated cannabinoid or a mixture of the two generated in vivo and/or in vitro. In a preferred embodiment, the composition may further include a topical decongestant, which may include phenylephrine hydrochloride, Oxymetazoline hydrochloride, and Xylometazoline in certain preferred embodiments. The composition may further include an antihistamine, and/or a steroid. Preferably, the steroid component is a corticosteroid selected from the group consisting of: neclomethasone dipropionate, budesonide, ciclesonide, flunisolide, fluticasone furoate, fluticasone propionate, mometasone, triamcinolone acetonide. In alternative embodiment, the solution for nasal and/or sublingual administration of a cannabinoid may further comprise at least one of the following: benzalkonium chloride solution, benzyl alcohol, boric acid, purified water, sodium borate, polysorbate 80, phenylethyl alcohol, microcrystalline cellulose, carboxymethylcellulose sodium, dextrose, dipasic, sodium phosphate, edetate disodium, monobasic sodium phosphate, propylene glycol.

[0286] The invention may further include an aqueous solution for nasal and/or sublingual administration of a cannabinoid comprising: a water and/or saline solution; and a water-soluble cannabinoid which may include a glycosylated cannabinoid, an acetylated cannabinoid or a mixture of the two generated in vivo and/or in vitro. In a preferred embodiment, the composition may further include a topical decongestant, which may include phenylephrine hydrochloride, Oxymetazoline hydrochloride, and Xylometazoline in certain preferred embodiments. The composition may further include an antihistamine, and/or a steroid. Preferably, the steroid component is a corticosteroid selected from the group consisting of: neclomethasone dipropionate, budesonide, ciclesonide, flunisolide, fluticasone furoate, fluticasone propionate, mometasone, triamcinolone acetonide. In alternative embodiment, the aqueous solution may further comprise at least one of the following: benzalkonium chloride solution, benzyl alcohol, boric acid, purified water, sodium borate, polysorbate 80, phenylethyl alcohol, microcrystalline cellulose, carboxymethylcellulose sodium, dextrose, dipasic, sodium phosphate, edetate disodium, monobasic sodium phosphate, propylene glycol.

[0287] The invention may include a topical formulation for the transdermal delivery of water-soluble cannabinoid. In a preferred embodiment, a topical formulation for the transdermal delivery of water-soluble cannabinoid may include a water-soluble glycosylated cannabinoid, and/or water-soluble acetylated cannabinoid, or a mixture of both, and a pharmaceutically acceptable excipient. Here, a glycosylated cannabinoid and/or acetylated cannabinoid may be generated in vivo and/or in vitro. Preferably a pharmaceutically acceptable excipient may include one or more: gels, ointments, cataplasms, poultices, pastes, creams, lotions, plasters and jellies or even polyethylene glycol. Additional embodiments may further include one or more of the following components: a quantity of capsaicin; a quantity of benzocaine; a quantity of lidocaine; a quantity of camphor; a quantity of benzoin resin; a quantity of methylsalicilate; a quantity of triethanolamine salicylate; a quantity of hydrocortisone; a quantity of salicylic acid.

[0288] The invention may include a gel for transdermal administration of a water soluble-cannabinoid which may be generated in vitro and/or in vivo. In this embodiment, the mixture preferably contains from 15% to about 90% ethanol, about 10% to about 60% buffered aqueous solution or water, about 0.1 to about 25% propylene glycol, from about 0.1 to about 20% of a gelling agent, from about 0.1 to about 20% of a base, from about 0.1 to about 20% of an absorption enhancer and from about 1% to about 25% polyethylene glycol and a water-soluble cannabinoid such as a glycosylated cannabinoid, and/or acetylated cannabinoid, and/or a mixture of the two.

[0289] In another embodiment, the invention may further include a transdermal composition having a pharmaceutically effective amount of a water-soluble cannabinoid for delivery of the cannabinoid to the bloodstream of a user. This transdermal composition may include a pharmaceutically acceptable excipient and at least one water-soluble cannabinoid, such as a glycosylated cannabinoid, an acetylated cannabinoid, and a mixture of both, wherein the cannabinoid is capable of diffusing from the composition into the bloodstream of the user. In a preferred embodiment, a pharmaceutically acceptable excipient to create a transdermal dosage form selected from the group consisting of: gels, ointments, cataplasms, poultices, pastes, creams, lotions, plasters and jellies. The transdermal composition may further include one or more surfactants. In one preferred embodiment, the surfactant may include a surfactant-lecithin organogel, which may further be present in an amount of between about between about 95% and about 98% w/w. In an alternative embodiment, a surfactant-lecithin organogel comprises lecithin and PPG-2 myristyl ether propionate and/or high molecular weight polyacrylic acid polymers. The transdermal composition may further include a quantity of isopropyl myristate.

[0290] The invention may further include transdermal composition having one or more permeation enhancers to facilitate transfer of the water-soluble cannabinoid across a dermal layer. In a preferred embodiment, a permeation enhancer may include one or more of the following: propylene glycol monolaurate, diethylene glycol monoethyl ether, an oleoyl macrogolglyceride, a caprylocaproyl macrogolglyceride, and an oleyl alcohol,

[0291] The invention may also include a liquid cannabinoid liniment composition consisting of water, isopropyl alcohol solution and a water-soluble cannabinoid, such as glycosylated cannabinoid, and/or said acetylated cannabinoid which may further have been generated in vivo. This liquid cannabinoid liniment composition may further include approximately 97.5% to about 99.5% by weight of 70% isopropyl alcohol solution and from about 0.5% to about 2.5% by weight of a water-soluble cannabinoid mixture.

[0292] Based on to improved solubility and other physical properties, as well as cost advantage and scalability of the invention's in vivo water-soluble production platform, the invention may include one or more commercial infusions. For example, commercially available products, such a lip balm, soap, shampoos, lotions, creams and cosmetics may be infused with one or more water-soluble cannabinoids.

[0293] As generally described herein, the invention may include one or more plants, such as a tobacco plant and/or cell culture that may be genetically modified to produce, for example water-soluble glycosylated cannabinoids in vivo. As such, in one preferred embodiment, the invention may include a tobacco plant and or cell that contain at least one water-soluble cannabinoid. In a preferred embodiment, a tobacco plant containing a quantity of water-soluble cannabinoids may be used to generate a water-soluble cannabinoid infused tobacco product such as a cigarette, pipe tobacco, chewing tobacco, cigar, and smokeless tobacco. In one embodiment, the tobacco plant may be treated with one or more glycosidase inhibitors. In a preferred embodiment, since the cannabinoid being introduced to the tobacco plant may be controlled, the inventive tobacco plant may generate one or more selected water-cannabinoids. For example, in one embodiment, the genetically modified tobacco plant may be introduced to a single cannabinoid, such as a non-psychoactive CBD compound, while in other embodiment, the genetically modified tobacco plant may be introduced to a cannabinoid extract containing a full and/or partial entourage of cannabinoid compounds.

[0294] The invention may further include a novel composition that may be used to supplement a cigarette, or other tobacco-based product. In this embodiment, the composition may include at least one water-soluble cannabinoid dissolved in an aqueous solution. This aqueous solution may be wherein said composition may be introduced to a tobacco product, such as a cigarette and/or a tobacco leaf such that the aqueous solution may evaporate generating a cigarette and/or a tobacco leaf that contains the aforementioned water-soluble cannabinoid(s), which may further have been generated in vivo as generally described herein.

[0295] On one embodiment the invention may include one or more method of treating a medical condition in a mammal. In this embodiment, the novel method may include of administering a therapeutically effective amount of a water-soluble cannabinoid, such as an in vivo generated glycosylated cannabinoid, and/or an acetylated cannabinoid, and/or a mixture of both or a pharmaceutically acceptable salt thereof, wherein the medical condition is selected from the group consisting of: obesity, post-traumatic stress syndrome, anorexia, nausea, emesis, pain, wasting syndrome, HIV-wasting, chemotherapy induced nausea and vomiting, alcohol use disorders, anti-tumor, amyotrophic lateral sclerosis, glioblastoma multiforme, glioma, increased intraocular pressure, glaucoma, Cannabis use disorders, Tourette's syndrome, dystonia, multiple sclerosis, inflammatory bowel disorders, arthritis, dermatitis, Rheumatoid arthritis, systemic lupus erythematosus, anti-inflammatory, anti-convulsant, anti-psychotic, anti-oxidant, neuroprotective, anti-cancer, immunomodulatory effects, peripheral neuropathic pain, neuropathic pain associated with post-herpetic neuralgia, diabetic neuropathy, shingles, burns, actinic keratosis, oral cavity sores and ulcers, post-episiotomy pain, psoriasis, pruritis, contact dermatitis, eczema, bullous dermatitis herpetiformis, exfoliative dermatitis, mycosis fungoides, pemphigus, severe erythema multiforme (e.g., Stevens-Johnson syndrome), seborrheic dermatitis, ankylosing spondylitis, psoriatic arthritis, Reiter's syndrome, gout, chondrocalcinosis, joint pain secondary to dysmenorrhea, fibromyalgia, musculoskeletal pain, neuropathic-postoperative complications, polymyositis, acute nonspecific tenosynovitis, bursitis, epicondylitis, post-traumatic osteoarthritis, synovitis, and juvenile rheumatoid arthritis. In a preferred embodiment, the pharmaceutical composition may be administered by a route selected from the group consisting of: transdermal, topical, oral, buccal, sublingual, intra-venous, intra-muscular, vaginal, rectal, ocular, nasal and follicular. The amount of water-soluble cannabinoids may be a therapeutically effective amount, which may be determined by the patient's age, weight, medical condition cannabinoid-delivered, route of delivery and the like. In one embodiment, a therapeutically effective amount may be 50 mg or less of a water-soluble cannabinoid. In another embodiment, a therapeutically effective amount may be 50 mg or more of a water-soluble cannabinoid.

[0296] It should be noted that for any of the above composition, unless otherwise stated, an effective amount of water-soluble cannabinoids may include amounts between: 0.01 mg to 0.1 mg; 0.01 mg to 0.5 mg; 0.01 mg to 1 mg; 0.01 mg to 5 mg; 0.01 mg to 10 mg; 0.01 mg to 25 mg; 0.01 mg to 50 mg; 0.01 mg to 75 mg; 0.01 mg to 100 mg; 0.01 mg to 125 mg; 0.01 mg to 150 mg; 0.01 mg to 175 mg; 0.01 mg to 200 mg; 0.01 mg to 225 mg; 0.01 mg to 250 mg; 0.01 mg to 275 mg; 0.01 mg to 300 mg; 0.01 mg to 225 mg; 0.01 mg to 350 mg; 0.01 mg to 375 mg; 0.01 mg to 400 mg; 0.01 mg to 425 mg; 0.01 mg to 450 mg; 0.01 mg to 475 mg; 0.01 mg to 500 mg; 0.01 mg to 525 mg; 0.01 mg to 550 mg; 0.01 mg to 575 mg; 0.01 mg to 600 mg; 0.01 mg to 625 mg; 0.01 mg to 650 mg; 0.01 mg to 675 mg; 0.01 mg to 700 mg; 0.01 mg to 725 mg; 0.01 mg to 750 mg; 0.01 mg to 775 mg; 0.01 mg to 800 mg; 0.01 mg to 825 mg; 0.01 mg to 950 mg; 0.01 mg to 875 mg; 0.01 mg to 900 mg; 0.01 mg to 925 mg; 0.01 mg to 950 mg; 0.01 mg to 975 mg; 0.01 mg to 1000 mg; 0.01 mg to 2000 mg; 0.01 mg to 3000 mg; 0.01 mg to 4000 mg; 01 mg to 5000 mg; 0.01 mg to 0.1 mg/kg.; 0.01 mg to 0.5 mg/kg; 01 mg to 1 mg/kg; 0.01 mg to 5 mg/kg; 0.01 mg to 10 mg/kg; 0.01 mg to 25 mg/kg; 0.01 mg to 50 mg/kg; 0.01 mg to 75 mg/kg; and 0.01 mg to 100 mg/kg.

[0297] The modified cannabinoids compounds of the present invention are useful for a variety of therapeutic applications. For example, the compounds are useful for treating or alleviating symptoms of diseases and disorders involving CB1 and CB2 receptors, including appetite loss, nausea and vomiting, pain, multiple sclerosis and epilepsy. For example, they may be used to treat pain (i.e. as analgesics) in a variety of applications including but not limited to pain management. In additional embodiments, such modified cannabinoids compounds may be used as an appetite suppressant. Additional embodiment may include administering the modified cannabinoids compounds.

[0298] By “treating” the present inventors mean that the compound is administered in order to alleviate symptoms of the disease or disorder being treated. Those of skill in the art will recognize that the symptoms of the disease or disorder that is treated may be completely eliminated, or may simply be lessened. Further, the compounds may be administered in combination with other drugs or treatment modalities, such as with chemotherapy or other cancer-fighting drugs.

[0299] Implementation may generally involve identifying patients suffering from the indicated disorders and administering the compounds of the present invention in an acceptable form by an appropriate route. The exact dosage to be administered may vary depending on the age, gender, weight and overall health status of the individual patient, as well as the precise etiology of the disease. However, in general, for administration in mammals (e.g. humans), dosages in the range of from about 0.01 to about 300 mg of compound per kg of body weight per 24 hr., and more preferably about 0.01 to about 100 mg of compound per kg of body weight per 24 hr., are effective.

[0300] Administration may be oral or parenteral, including intravenously, intramuscularly, subcutaneously, intradermal injection, intraperitoneal injection, etc., or by other routes (e.g. transdermal, sublingual, oral, rectal and buccal delivery, inhalation of an aerosol, etc.). In a preferred embodiment of the invention, the water-soluble cannabinoid analogs are provided orally or intravenously.

[0301] In particular, the phenolic esters of the invention are preferentially administered systemically in order to afford an opportunity for metabolic activation via in vivo cleavage of the ester. In addition, the water soluble compounds with azole moieties at the pentyl side chain do not require in vivo activation and may be suitable for direct administration (e.g. site specific injection).

[0302] The compounds may be administered in the pure form or in a pharmaceutically acceptable formulation including suitable elixirs, binders, and the like (generally referred to a “carriers”) or as pharmaceutically acceptable salts (e.g. alkali metal salts such as sodium, potassium, calcium or lithium salts, ammonium, etc.) or other complexes. It should be understood that the pharmaceutically acceptable formulations include liquid and solid materials conventionally utilized to prepare both injectable dosage forms and solid dosage forms such as tablets and capsules and aerosolized dosage forms. In addition, the compounds may be formulated with aqueous or oil based vehicles. Water may be used as the carrier for the preparation of compositions (e.g. injectable compositions), which may also include conventional buffers and agents to render the composition isotonic. Other potential additives and other materials (preferably those which are generally regarded as safe [GRAS]) include: colorants; flavorings; surfactants (TWEEN, oleic acid, etc.); solvents, stabilizers, elixirs, and binders or encapsulants (lactose, liposomes, etc). Solid diluents and excipients include lactose, starch, conventional disintergrating agents, coatings and the like. Preservatives such as methyl paraben or benzalkium chloride may also be used. Depending on the formulation, it is expected that the active composition will consist of about 1% to about 99% of the composition and the vehicular “carrier” will constitute about 1% to about 99% of the composition. The pharmaceutical compositions of the present invention may include any suitable pharmaceutically acceptable additives or adjuncts to the extent that they do not hinder or interfere with the therapeutic effect of the active compound.

[0303] The administration of the compounds of the present invention may be intermittent, bolus dose, or at a gradual or continuous, constant or controlled rate to a patient. In addition, the time of day and the number of times per day that the pharmaceutical formulation is administered may vary are and best determined by a skilled practitioner such as a physician. Further, the effective dose can vary depending upon factors such as the mode of delivery, gender, age, and other conditions of the patient, as well as the extent or progression of the disease. The compounds may be provided alone, in a mixture containing two or more of the compounds, or in combination with other medications or treatment modalities. The compounds may also be added to blood ex vivo and then be provided to the patient.

[0304] Genes encoding by a combination polynucleotide and/or a homologue thereof, may be introduced into a plant, and/or plant cell using several types of transformation approaches developed for the generation of transgenic plants. Standard transformation techniques, such as Ti-plasmid Agrobacterium-mediated transformation, particle bombardment, microinjection, and electroporation may be utilized to construct stably transformed transgenic plants.

[0305] As used herein, a “cannabinoid” is a chemical compound (such as cannabinol, THC or cannabidiol) that is found in the plant species Cannabis among others like Echinacea; Acmella oleracea; Helichrysum umbraculigerum; Radula marginata (Liverwort) and Theobroma cacao, and metabolites and synthetic analogues thereof that may or may not have psychoactive properties. Cannabinoids therefore include (without limitation) compounds (such as THC) that have high affinity for the cannabinoid receptor (for example Ki<250 nM), and compounds that do not have significant affinity for the cannabinoid receptor (such as cannabidiol, CBD). Cannabinoids also include compounds that have a characteristic dibenzopyran ring structure (of the type seen in THC) and cannabinoids which do not possess a pyran ring (such as cannabidiol). Hence a partial list of cannabinoids includes THC, CBD, dimethyl heptylpentyl cannabidiol (DMHP-CBD), 6,12-dihydro-6-hydroxy-cannabidiol (described in U.S. Pat. No. 5,227,537, incorporated by reference); (3 S,4R)-7-hydroxy-Δ6-tetrahydrocannabinol homologs and derivatives described in U.S. Pat. No. 4,876,276, incorporated by reference; (+)-4-[4-DMH-2,6-diacetoxy-phenyl]-2-carboxy-6,6-dimethylbicyclo[3.1.1]hept-2-en, and other 4-phenylpinene derivatives disclosed in U.S. Pat. No. 5,434,295, which is incorporated by reference; and cannabidiol (−)(CBD) analogs such as (−)CBD-monomethylether, (−)CBD dimethyl ether; (−)CBD diacetate; (−)3′-acetyl-CBD monoacetate; and ±AF11, all of which are disclosed in Consroe et al., J. Clin. Phannacol. 21:428S-436S, 1981, which is also incorporated by reference. Many other cannabinoids are similarly disclosed in Agurell et al., Pharmacol. Rev. 38:31-43, 1986, which is also incorporated by reference.

[0306] As claimed herein, the term “cannabinoid” may also include different modified forms of a cannabinoid such as a hydroxylated cannabinoid or cannabinoid carboxylic acid. For example, if a glycosyltransferase were to be capable of glycosylating a cannabinoid, it would include the term cannabinoid as defined elsewhere, as well as the aforementioned modified forms. It may further include multiple glycosylation moieties.

[0307] Examples of cannabinoids are tetrahydrocannabinol, cannabidiol, cannabigerol, cannabichromene, cannabicyclol, cannabivarin, cannabielsoin, cannabicitran, cannabigerolic acid, cannabigerolic acid monomethylether, cannabigerol monomethylether, cannabigerovarinic acid, cannabigerovarin, cannabichromenic acid, cannabichromevarinic acid, cannabichromevarin, cannabidolic acid, cannabidiol monomethylether, cannabidiol-C4, cannabidivarinic acid, cannabidiorcol, delta-9-tetrahydrocannabinolic acid A, delta-9-tetrahydrocannabinolic acid B, delta-9-tetrahydrocannabinolic acid-C4, delta-9-tetrahydrocannabivarinic acid, delta-9-tetrahydrocannabivarin, delta-9-tetrahydrocannabiorcolic acid, delta-9-tetrahydrocannabiorcol, delta-7-cis-iso-tetrahydrocannabivarin, delta-8-tetrahydrocannabiniolic acid, delta-8-tetrahydrocannabinol, cannabicyclolic acid, cannabicylovarin, cannabielsoic acid A, cannabielsoic acid B, cannabinolic acid, cannabinol methylether, cannabinol-C4, cannabinol-C2, cannabiorcol, 10-ethoxy-9-hydroxy-delta-6a-tetrahydrocannabinol, 8,9-dihydroxy-delta-6a-tetrahydrocannabinol, cannabitriolvarin, ethoxy-cannabitriolvarin, dehydrocannabifuran, cannabifuran, cannabichromanon, cannabicitran, 10-oxo-delta-6a-tetrahydrocannabinol, delta-9-cis-tetrahydrocannabinol, 3, 4, 5, 6-tetrahydro-7-hydroxy-alpha-alpha-2-trimethyl-9-n-propyl-2, 6-methano-2H-1-benzoxocin-5-methanol-cannabiripsol, trihydroxy-delta-9-tetrahydrocannabinol, and cannabinol. Examples of cannabinoids within the context of this disclosure include tetrahydrocannabinol and cannabidiol.

[0308] The term “endocannabinoid” refer to compounds including arachidonoyl ethanolamide (anandamide, AEA), 2-arachidonoyl ethanolamide (2-AG), 1-arachidonoyl ethanolamide (1-AG), and docosahexaenoyl ethanolamide (DHEA, synaptamide), oleoyl ethanolamide (OEA), eicsapentaenoyl ethanolamide, prostaglandin ethanolamide, docosahexaenoyl ethanolamide, linolenoyl ethanolamide, 5(Z),8(Z),11 (Z)-eicosatrienoic acid ethanolamide (mead acid ethanolamide), heptadecanoul ethanolamide, stearoyl ethanolamide, docosaenoyl ethanolamide, nervonoyl ethanolamide, tricosanoyl ethanolamide, lignoceroyl ethanolamide, myristoyl ethanolamide, pentadecanoyl ethanolamide, palmitoleoyl ethanolamide, docosahexaenoic acid (DHA). Particularly preferred endocannabinoids are AEA, 2-AG, 1-AG, and DHEA.

[0309] Hydroxylation is a chemical process that introduces a hydroxyl group (—OH) into an organic compound. Acetylation is a chemical reaction that adds an acetyl chemical group. Glycosylation is the coupling of a glycosyl donor, to a glycosyl acceptor forming a glycoside.

[0310] The term “prodrug” refers to a precursor of a biologically active pharmaceutical agent (drug). Prodrugs must undergo a chemical or a metabolic conversion to become a biologically active pharmaceutical agent. A prodrug can be converted ex vivo to the biologically active pharmaceutical agent by chemical transformative processes. In vivo, a prodrug is converted to the biologically active pharmaceutical agent by the action of a metabolic process, an enzymatic process or a degradative process that removes the prodrug moiety to form the biologically active pharmaceutical agent.

[0311] The term “glycosidase inhibitor” and as used in the present invention is used to mean a compound, which can inhibit glycosidase enzymes which catalyst the hydrolysis of glycosidic bonds. Techniques for determining whether a compound acts as a glycosidase inhibitor will be well known to the skilled person, but may include, for example use of substrates such as p-nitrophenyl-glycosides, where the presence of an inhibitor will reduce the release of the colored p-nitrophenol when an appropriate glycosidase is present.

[0312] As used herein, the term “homologous” with regard to a contiguous nucleic acid sequence, refers to contiguous nucleotide sequences that hybridize under appropriate conditions to the reference nucleic acid sequence. For example, homologous sequences may have from about 70%-100, or more generally 80% to 100% sequence identity, such as about 81%; about 82%; about 83%; about 84%; about 85%; about 86%; about 87%; about 88%; about 89%; about 90%; about 91%; about 92%; about 93%; about 94% about 95%; about 96%; about 97%; about 98%; about 98.5%; about 99%; about 99.5%; and about 100%. The property of substantial homology is closely related to specific hybridization. For example, a nucleic acid molecule is specifically hybridizable when there is a sufficient degree of complementarity to avoid non-specific binding of the nucleic acid to non-target sequences under conditions where specific binding is desired, for example, under stringent hybridization conditions.

[0313] The term, “operably linked,” when used in reference to a regulatory sequence and a coding sequence, means that the regulatory sequence affects the expression of the linked coding sequence. “Regulatory sequences,” or “control elements,” refer to nucleotide sequences that influence the timing and level/amount of transcription, RNA processing or stability, or translation of the associated coding sequence. Regulatory sequences may include promoters; translation leader sequences; introns; enhancers; stem-loop structures; repressor binding sequences; termination sequences; polyadenylation recognition sequences; etc. Particular regulatory sequences may be located upstream and/or downstream of a coding sequence operably linked thereto. Also, particular regulatory sequences operably linked to a coding sequence may be located on the associated complementary strand of a double-stranded nucleic acid molecule.

[0314] As used herein, the term “promoter” refers to a region of DNA that may be upstream from the start of transcription, and that may be involved in recognition and binding of RNA polymerase and other proteins to initiate transcription. A promoter may be operably linked to a coding sequence for expression in a cell, or a promoter may be operably linked to a nucleotide sequence encoding a signal sequence which may be operably linked to a coding sequence for expression in a cell. A “plant promoter” may be a promoter capable of initiating transcription in plant cells. Examples of promoters under developmental control include promoters that preferentially initiate transcription in certain tissues, such as leaves, roots, seeds, fibers, xylem vessels, tracheids, or sclerenchyma. Such promoters are referred to as “tissue-preferred.” Promoters which initiate transcription only in certain tissues are referred to as “tissue-specific.”

[0315] A “cell type-specific” promoter primarily drives expression in certain cell types in one or more organs, for example, vascular cells in roots or leaves. An “inducible” promoter may be a promoter which may be under environmental control. Examples of environmental conditions that may initiate transcription by inducible promoters include anaerobic conditions and the presence of light. Tissue-specific, tissue-preferred, cell type specific, and inducible promoters constitute the class of “non-constitutive” promoters. A “constitutive” promoter is a promoter which may be active under most environmental conditions or in most cell or tissue types.

[0316] Any inducible promoter can be used in some embodiments of the invention. See Ward et al. (1993) Plant Mol. Biol. 22:361-366. With an inducible promoter, the rate of transcription increases in response to an inducing agent. Exemplary inducible promoters include, but are not limited to: Promoters from the ACEI system that responds to copper; In2 gene from maize that responds to benzenesulfonamide herbicide safeners; Tet repressor from Tn10; and the inducible promoter from a steroid hormone gene, the transcriptional activity of which may be induced by a glucocorticosteroid hormone are general examples (Schena et al. (1991) Proc. Natl. Acad. Sci. USA 88:0421).

[0317] As used herein, the term “transformation” or “genetically modified” refers to the transfer of one or more nucleic acid molecule(s) into a cell. A plant is “transformed” or “genetically modified” by a nucleic acid molecule transduced into the plant when the nucleic acid molecule becomes stably replicated by the plant. As used herein, the term “transformation” or “genetically modified” encompasses all techniques by which a nucleic acid molecule can be introduced into, such as a plant.

[0318] The term “vector” refers to some means by which DNA, RNA, a protein, or polypeptide can be introduced into a host. The polynucleotides, protein, and polypeptide which are to be introduced into a host can be therapeutic or prophylactic in nature; can encode or be an antigen; can be regulatory in nature, etc. There are various types of vectors including virus, plasmid, bacteriophages, cosmids, and bacteria.

[0319] As is known in the art, different organisms preferentially utilize different codons for generating polypeptides. Such “codon usage” preferences may be used in the design of nucleic acid molecules encoding the proteins and chimeras of the invention in order to optimize expression in a particular host cell system.

[0320] An “expression vector” is nucleic acid capable of replicating in a selected host cell or organism. An expression vector can replicate as an autonomous structure, or alternatively can integrate, in whole or in part, into the host cell chromosomes or the nucleic acids of an organelle, or it is used as a shuttle for delivering foreign DNA to cells, and thus replicate along with the host cell genome. Thus, an expression vector are polynucleotides capable of replicating in a selected host cell, organelle, or organism, e.g., a plasmid, virus, artificial chromosome, nucleic acid fragment, and for which certain genes on the expression vector (including genes of interest) are transcribed and translated into a polypeptide or protein within the cell, organelle or organism; or any suitable construct known in the art, which comprises an “expression cassette.” In contrast, as described in the examples herein, a “cassette” is a polynucleotide containing a section of an expression vector of this invention. The use of the cassettes assists in the assembly of the expression vectors. An expression vector is a replicon, such as plasmid, phage, virus, chimeric virus, or cosmid, and which contains the desired polynucleotide sequence operably linked to the expression control sequence(s).

[0321] A polynucleotide sequence is operably linked to an expression control sequence(s) (e.g., a promoter and, optionally, an enhancer) when the expression control sequence controls and regulates the transcription and/or translation of that polynucleotide sequence.

[0322] Unless otherwise indicated, a particular nucleic acid sequence also implicitly encompasses conservatively modified variants thereof (e.g., degenerate codon substitutions), the complementary (or complement) sequence, and the reverse complement sequence, as well as the sequence explicitly indicated. Specifically, degenerate codon substitutions may be achieved by generating sequences in which the third position of one or more selected (or all) codons is substituted with mixed-base and/or deoxyinosine residues (see e.g., Batzer et al., Nucleic Acid Res. 19:5081 (1991); Ohtsuka et al., J. Biol. Chem. 260:2605-2608 (1985); and Rossolini et al., Mol. Cell. Probes 8:91-98 (1994)). Because of the degeneracy of nucleic acid codons, one can use various different polynucleotides to encode identical polypeptides. Table 1a, infra, contains information about which nucleic acid codons encode which amino acids.

TABLE 4
Amino acid Nucleic acid codons

| Amino Acid | Nucleic Acid Codons |
|---|---|
| Ala/A | GCT, GCC, GCA, GCG |
| Arg/R | CGT, CGC, CGA, CGG, AGA, |
| | AGG |
| Asn/N | AAT, AAC |
| Asp/D | GAT, GAC |
| Cys/C | TGT, TGC |
| Gln/Q | CAA, CAG |
| Glu/E | GAA, GAG |
| Gly/G | GGT, GGC, GGA, GGG |
| His/H | CAT, CAC |
| Ile/I | ATT, ATC, ATA |
| Leu/L | TTA, TTG, CTT, CTC, CTA, CTG |
| Lys/K | AAA, AAG |
| Met/M | ATG |
| Phe/F | TTT, TTC |
| Pro/P | CCT, CCC, CCA, CCG |
| Ser/S | TCT, TCC, TCA, TCG, AGT, AGC |
| Thr/T | ACT, ACC, ACA, ACG |
| Trp/W | TGG |
| Tyr/Y | TAT, TAC |
| Val/V | GTT, GTC, GTA, GTG |

[0323] The term “plant” or “plant system” includes whole plants, plant organs, progeny of whole plants or plant organs, embryos, somatic embryos, embryo-like structures, protocorms, protocorm-like bodies (PLBs), and culture and/or suspensions of plant cells. Plant organs comprise, e.g., shoot vegetative organs/structures (e.g., leaves, stems and tubers), roots, flowers and floral organs/structures (e.g., bracts, sepals, petals, stamens, carpels, anthers and ovules), seed (including embryo, endosperm, and seed coat) and fruit (the mature ovary), plant tissue (e.g., vascular tissue, ground tissue, and the like) and cells (e.g., guard cells, egg cells, trichomes and the like). The invention may also include Cannabaceae and other Cannabis strains, such as C. sativa generally.

[0324] The term “expression,” as used herein, or “expression of a coding sequence” (for example, a gene or a transgene) refers to the process by which the coded information of a nucleic acid transcriptional unit (including, e.g., genomic DNA or cDNA) is converted into an operational, non-operational, or structural part of a cell, often including the synthesis of a protein. Gene expression can be influenced by external signals; for example, exposure of a cell, tissue, or organism to an agent that increases or decreases gene expression. Expression of a gene can also be regulated anywhere in the pathway from DNA to RNA to protein. Regulation of gene expression occurs, for example, through controls acting on transcription, translation, RNA transport and processing, degradation of intermediary molecules such as mRNA, or through activation, inactivation, compartmentalization, or degradation of specific protein molecules after they have been made, or by combinations thereof. Gene expression can be measured at the RNA level or the protein level by any method known in the art, including, without limitation, Northern blot, RT-PCR, Western blot, or in vitro, in situ, or in vivo protein activity assay(s).

[0325] The term “nucleic acid” or “nucleic acid molecules” include single- and double-stranded forms of DNA; single-stranded forms of RNA; and double-stranded forms of RNA (dsRNA). The term “nucleotide sequence” or “nucleic acid sequence” refers to both the sense and antisense strands of a nucleic acid as either individual single strands or in the duplex. The term “ribonucleic acid” (RNA) is inclusive of iRNA (inhibitory RNA), dsRNA (double stranded RNA), siRNA (small interfering RNA), mRNA (messenger RNA), miRNA (micro-RNA), hpRNA (hairpin RNA), tRNA (transfer RNA), whether charged or discharged with a corresponding acetylated amino acid), and cRNA (complementary RNA). The term “deoxyribonucleic acid” (DNA) is inclusive of cDNA, genomic DNA, and DNA-RNA hybrids. The terms “nucleic acid segment” and “nucleotide sequence segment,” or more generally “segment,” will be understood by those in the art as a functional term that includes both genomic sequences, ribosomal RNA sequences, transfer RNA sequences, messenger RNA sequences, operon sequences, and smaller engineered nucleotide sequences that encoded or may be adapted to encode, peptides, polypeptides, or proteins.

[0326] The term “gene” or “sequence” refers to a coding region operably joined to appropriate regulatory sequences capable of regulating the expression of the gene product (e.g., a polypeptide or a functional RNA) in some manner. A gene includes untranslated regulatory regions of DNA (e.g., promoters, enhancers, repressors, etc.) preceding (up-stream) and following (down-stream) the coding region (open reading frame, ORF) as well as, where applicable, intervening sequences (i.e., introns) between individual coding regions (i.e., exons). The term “structural gene” as used herein is intended to mean a DNA sequence that is transcribed into mRNA which is then translated into a sequence of amino acids characteristic of a specific polypeptide.

[0327] A nucleic acid molecule may include either or both naturally occurring and modified nucleotides linked together by naturally occurring and/or non-naturally occurring nucleotide linkages. Nucleic acid molecules may be modified chemically or biochemically, or may contain non-natural or derivatized nucleotide bases, as will be readily appreciated by those of skill in the art. Such modifications include, for example, labels, methylation, substitution of one or more of the naturally occurring nucleotides with an analog, internucleotide modifications (e.g., uncharged linkages: for example, methyl phosphonates, phosphotriesters, phosphoramidates, carbamates, etc.; charged linkages: for example, phosphorothioates, phosphorodithioates, etc.; pendent moieties: for example, peptides; intercalators: for example, acridine, psoralen, etc.; chelators; alkylators; and modified linkages: for example, alpha anomeric nucleic acids, etc.). The term “nucleic acid molecule” also includes any topological conformation, including single-stranded, double-stranded, partially duplexed, triplexed, hair-pinned, circular, and padlocked conformations.

[0328] As used herein with respect to DNA, the term “coding sequence,” “structural nucleotide sequence,” or “structural nucleic acid molecule” refers to a nucleotide sequence that is ultimately translated into a polypeptide, via transcription and mRNA, when placed under the control of appropriate regulatory sequences. With respect to RNA, the term “coding sequence” refers to a nucleotide sequence that is translated into a peptide, polypeptide, or protein. The boundaries of a coding sequence are determined by a translation start codon at the 5′-terminus and a translation stop codon at the 3′-terminus. Coding sequences include, but are not limited to: genomic DNA; cDNA; EST; and recombinant nucleotide sequences.

[0329] The term “sequence identity” or “identity,” as used herein in the context of two nucleic acid or polypeptide sequences, refers to the residues in the two sequences that are the same when aligned for maximum correspondence over a specified comparison window.

[0330] The term “recombinant” when used with reference, e.g., to a cell, or nucleic acid, protein, or vector, indicates that the cell, organism, nucleic acid, protein or vector, has been modified by the introduction of a heterologous nucleic acid or protein, or the alteration of a native nucleic acid or protein, or that the cell is derived from a cell so modified. Thus, for example, recombinant cells may express genes that are not found within the native (nonrecombinant or wild-type) form of the cell or express native genes that are otherwise abnormally expressed—over-expressed, under expressed or not expressed at all.

[0331] The terms “approximately” and “about” refer to a quantity, level, value or amount that varies by as much as 30%, or in another embodiment by as much as 20%, and in a third embodiment by as much as 10% to a reference quantity, level, value or amount. As used herein, the singular form “a,” “an,” and “the” include plural references unless the context clearly dictates otherwise.

[0332] As used herein, “heterologous” or “exogenous” in reference to a nucleic acid is a nucleic acid that originates from a foreign species, or is synthetically designed, or, if from the same species, is substantially modified from its native form in composition and/or genomic locus by deliberate human intervention. A heterologous protein may originate from a foreign species or, if from the same species, is substantially modified from its original form by deliberate human intervention. By “host cell” is meant a cell which contains an introduced nucleic acid construct and supports the replication and/or expression of the construct. Host cells may be prokaryotic cells such as E. coli, or eukaryotic cells such as fungi, yeast, insect, amphibian, nematode, or mammalian cells. Alternatively, the host cells are monocotyledonous or dicotyledonous plant cells. An example of a monocotyledonous host cell is a maize host cell.

### EXAMPLES

### Example 1: Functionalization of Cannabinoids by Cytochrome P450s

[0333] The present inventors have demonstrated that cannabinoids can be functionalized in an in vivo plant system. Specifically, the present inventors utilized cytochrome P450 monooxygenases (CYP) to modify or functionalize the chemical structure of cannabinoids. As shown below, CYPs do this by inserting an oxygen atom into hydrophobic molecules to make them more reactive and hydrophilic. A representative reaction may include the generalized reaction in FIG. 13.

[0334] The P450 enzyme system involves several cytochrome P450 species and nonspecific cytochrome P450 oxidoreductases. As shown in FIG. 5, the present inventors used a human cytochrome P450 (CYP3A4) in a double construct with an exemplary human cytochrome P450 oxidoreductase, both expressed under the control of the constitutive CaMV 35S promoter with 5′ untranslated regions to enhance translation. Protein and DNA sequences for the functionalization of cannabinoids (CYP3A4 and P450 oxidoreductase) are identified as SEQ ID NO's. 9182-9185. Expression was confirmed using RT-PCR utilizing the forward and reverse primers identified in Table 3 below. As noted above, the present inventors demonstrated that overexpressing of P450s generated functionalized cannabinoids which could then be glycosylated, rendering them water-soluble.

### Example 2: P450 Overexpression Enhances In Vivo Hydroxylation and Glycosylation of Cannabinoids in Plant Systems

[0335] The present inventors have demonstrated that overexpression enhanced in vivo hydroxylation and glycosylation of CBDA in an exemplary plant system. Specifically, as generally shown in FIG. 6, the present inventors demonstrate that infiltration of tobacco leaves with Agrobacterium carrying CYP3A4 and P450 oxidoreductase was accomplished as described in herein. Confirmation of expression was done using RT-PCR 2-3 days after infiltration (FIG. 6).

[0336] As generally shown in FIG. 7, the present inventors demonstrate that overexpression of the CYP3A4+P450 oxidoreductase construct and subsequent feeding of at least one cannabinoid, in this case CBDA, upon confirmation of expression resulted in in vivo glycosylation of CBDA in tobacco leaves (FIG. 7). On average, glycosylation increased 3-fold in transgenic N. benthamiana plants compared to the control while hydroxylation increased up to 13-fold. As such, in certain embodiment, tobacco glycosyltransferases may be utilized as key targets in the current inventive technology for glycosylation of cannabinoids.

### Example 3: Identification of Modified Water-Soluble Cannabinoids by Mass Spectrometry

[0337] The present inventors demonstrated the biosynthesis of modified functionalized as well as water-soluble cannabinoids in both in vitro as well as in vivo plant system. Specifically, the present inventors identified the cannabinoid biotransformations associated with the gene constructs in both in vitro assays and transient leaf expression. Through the use of accurate mass spectrometry measurements, the present inventors were able to identify and confirm the biosynthesis of modified water-soluble cannabinoids.

[0338] Specifically, as generally shown in FIGS. 1-4, the present inventors were able to identify the glycosylated water-soluble cannabinoids in the chromatographic analysis and were able to produce extracted ion chromatograms for peak integration. For example, FIG. 1 panel B, illustrates the identification of multiple constitutional cannabinoid isomers of a single glycoside moiety, while in FIG. 2 panel B, an example of multiple constitutional isomers of the cytochrome P450 oxidation are illustrated. Peak areas for each identified molecule were used for relative quantification between treatments. Based on these results we confirmed biosynthesis of modified cannabinoid molecules containing up to two glycosides moieties, O acetyl glycoside, as well as hydroxylation (R—OH) biotransformations. Summaries of those identifications are presented in FIGS. 36 and 37 for CBGA and CBDA respectively.

[0339] Tables 1 and 2 are provided below further demonstrating the production of the select modified cannabinoid molecules. Generally referring to Tables 1-2 below, the present inventors demonstrated that based on the reduced retention time in the water: acetonitrile HPLC gradient, the glycosylated and hydroxylated cannabinoids, which eluted earlier than their non-modified forms, are demonstrated to be more water soluble than their non-modified forms.

### Example 4: Generation of Heterologous Cytosolic Synthesis and Glycosylation Gene Constructs for Expressions in Tobacco Leaves and Cell Suspensions

[0340] As shown in FIG. 8, the present inventors generated a triple gene construct for expression of cannabidiolic acid (CBDA) synthase in which the trichome targeting sequence had been removed, and the glycosyltransferase 76G1 from Stevia rebaudiana. In this construct the multi-drug ABC transporter ABCG2 was also included.

[0341] In one embodiment of the present inventive technology, the gene construct may be used to transform a plant cell that may further be configured to be cultured in a suspension culture. In one preferred embodiment, a Cannabis cell may be transformed with the construct generally outline in FIG. 8. In this preferred embodiment, cannabinoids produced by the Cannabis cells in the cell culture may be functionalize through the overexpression of the CYP3A4+P450 oxidoreductase as described above, and further glycosylated by the expression and action of the heterologous UDP glycosyltransferase (76G1) from Stevia rebaudiana referend above. Moreover, as generally outline herein, the cannabinoids may be modified so as to be functionalized and/or glycosylated, or generally water-soluble, and may then be secreted into the cell wall area, in the case of a whole plant, or the surrounding media in suspension cultures, with the aid of the ABC transporter. In one embodiment, this construct may be used for synthesis and modification of cannabinoids in cell suspension cultures, utilizing tobacco bright yellow cells or Cannabis cells.

[0342] As generally shown in FIG. 9, in vivo expression of CBDA synthase, UDP glycosyltransferase 76G1 and ABCG2 was confirmed. Reverse and forward primers used in the RT-PCR reactions are provided below in Table 4 below.

[0343] The gene and protein sequence identifications for CBDA synthase are provided as SEQ ID NO's 9186 and 9187 respectively. It should be noted that a variety of cannabinoid synthase genes/proteins may be used with the current inventive technology, CBDA synthase being exemplary only. Indeed, it is specifically contemplated that the synthase enzyme associated with any of the cannabinoids identified herein may be incorporated into the current invention without undue experimentation. In one embodiment, one or more of such exogenous or endogenous synthase enzyme may further have the trichome targeting sequence excised, again, a step that can be readily accomplished without undue experimentation. Example may THCA synthase, CBG synthase, THCA synthase, CBDA synthase or CBCA synthase, which may in this embodiment have their trichome targeting sequence had been removed.

[0344] The gene and protein sequence identifications for glycosyltransferase 76G1 from Stevia rebaudiana are provided as SEQ ID NO's. 9188, and 9189 respectively. The gene and protein sequence identifications for the multi-drug ABC transporter ABCG2 are provided as SEQ ID NO's 9190 and 9191 respectively.

### Example 5: In Vivo Cytosolic Synthesis and Glycosylation of Cannabinoids in N. benthamiana Leaves and Cell Suspensions

[0345] As shown in FIG. 10, the present inventors demonstrate that in plants, in this embodiment N. benthamiana, expressing the above referenced cytosolic construct, glycosylation of CBGA occurred as well as formation of modified or hydroxylated CBDA. The glycosylation of CBGA evidences in vivo glycosylation of cannabinoids by overexpressing a glycosyltransferase in N. benthamiana plants. The presence of glycosylated cannabinoids in wild type plants suggests the presence of a strong glycosyltransferase in tobacco. As such, in one embodiment, over expression of a heterologous or homologous tobacco glycosyltransferase may expressed or overexpressed resulting in the enhanced in vivo biosynthesis of water-soluble cannabinoids in whole plants, as well as in suspension cultures. For example, in one embodiment, a heterologous tobacco glycosyltransferase may be expressed in a Cannabis plant or cell culture resulting in the in vivo biosynthesis of water-soluble cannabinoids in the Cannabis plant and/or a Cannabis suspension cultures.

### Example 6: Water Soluble Cannabinoid Production Systems Utilizing MTB Transcription Factor and/or Catalase

[0346] The present inventors have developed a plurality of systems for the biosynthesis and modification of cannabinoids based on cellular location using novel methods of protein targeting. As shown in Table 10, the present inventors designed such novel systems and methods to enhance production and modification (glycosylation, acetylation and functionalization) of cannabinoids as well as to mitigate toxicity resulting from cannabinoid accumulation. Certain embodiments, included the expression of a MYB transcription factor and a catalase (FIG. 27) to degrade hydrogen peroxide resulting from CBDA synthase activity. In one preferred embodiment, the present inventors used Arabidopsis thaliana or an E. coli catalase gene and a predicted Cannabis MYB transcription factor involved in elevating genes involved in cannabinoid biosynthesis. DNA and protein sequences for Cannabis predicted MYB transcription factor (SEQ ID NOs. 9192-9293, DNA and amino acid sequences respectively), Arabidopsis thaliana catalase SEQ ID NOs. 9194-9195, DNA and amino acid sequences respectively) and/or E. coli catalase (SEQ ID NO. 9196-9197, DNA and amino acid sequences).

### Example 7: Enhanced In Vivo Cytosolic Synthesis and Glycosylation of Cannabinoids in Tobacco Leaves and Cell Suspensions

[0347] The present inventors have demonstrated the enhanced in vivo modification of cannabinoids in transgenic plants co-infected with constructs for glycosylation, P450-mediated functionalization (hydroxylation) and detoxification of hydrogen peroxide by catalase. As further shown in FIG. 11, functionalization and glycosylation, mainly of the substrate CBGA was observed in transgenic tobacco plants overexpressing CBDA synthase, UDP glycosyltransferase and ABC transporter but increased when overexpression of this construct was coupled with cytochrome P450, MYB transcription factor and catalase. As previously noted, overexpression of a cytochrome P450 enhanced glycosylation of cannabinoids. As such, the present inventor demonstrated the formation and glycosylation of CBDA in vivo in transiently transformed tobacco leaves fed with the precursor CBGA.

[0348] The present inventors also compared the activities of endogenous and transgenic glycosyltransferase activities in tobacco. Specifically, as shown in FIG. 12, the present inventor performed in vitro assays of UDP glycosyltransferase and CBDA synthase. Short assays of 3 hours at 30° C. did not reveal any difference in glycosylation of CBGA between the wild type and transgenic N. benthamiana plants, suggesting endogenous glycosylation. In extended assays (14 hours), there was a significant difference in the detection of glycosylated CBGA in transgenic plants compared to the wild type demonstrating increased glycosylation activity in transgenic plants.

[0349] In certain embodiment, glycosyltransferases from tobacco, or other plants may be used as herein described. In one embodiment, one or more heterologous or homologous glycosyltransferases may be expressed or over expressed in a plant, such as tobacco or Cannabis. Gene and protein sequences for exemplary glycosyltransferases are identified below in Table 9.

### Example 8: Generation of Trichome-Targeted Cannabinoid Synthesis and Glycosylation Constructs of Cannabidiolic Acid (CBDA)

[0350] As shown in FIGS. 14-15, the present inventors demonstrated a system of trichome-targeted synthesis and synthesis and glycosylation of cannabinoid compounds, such as CBDA. By targeting CBDA synthase, a UDP-glucose/UDP-galactose transporter (PM-UTR1) targeted to the plasma, and a Stevia UDP-glycosyltransferase 76G1 (tsUGT) to the trichomes, these genes may produce and accumulate, in this case CBDA and its glycosylated derivatives (primary, secondary glycoside), as well as novel CBDA derivatives, in the trichomes.

[0351] SEQ ID NO. 9198 is identified as the polynucleotide gene sequence for a CBDA synthase having a trichome targeting sequence. SEQ ID NO. 9199 is identified as the corresponding protein sequence for a CBDA synthase having a trichome targeting domain.

[0352] SEQ ID NO. 9200 is identified as the polynucleotide gene sequence for a trichome-targeted UDP-glycosyltransferase (76G1) coding sequence, in this instance being optimized for Arabidopsis thaliana expression, although other codon optimized versions fall within the scope of this invention. SEQ ID NO. 9201 is identified as the corresponding protein sequence for a UDP-glycosyltransferase (76G1) having a trichome targeting domain.

[0353] SEQ ID NO. 9202 is identified as the polynucleotide gene sequence for a UDP-glucose/galactose transporter (UTR1) having a plasma-membrane targeting sequence.

### Example 9: Trichome-Targeted Synthesis and Glycosylation of Cannabidiolic Acid (CBDA)

[0354] As shown in FIGS. 16-17, gene expression of CBDA synthase, tsUGT and PM-UTR1 in N. benthamiana infiltrated leaves was confirmed 2 DPI (Days Post Infiltration of Agrobacterium Ti-plasmid constructs) via RT-PCR (FIGS. 19 and 20). As expected, CBGA substrate was detected in all infiltrated leaves and wild type control (no Agrobacterium infiltration). CBGA primary and secondary glycosides were also detected in all infiltrated leaves and wild-type control, further demonstrating an endogenous glycosyltransferase activity acting upon CBGA. Moreover, CBGA acetylated primary glycoside was detected in all samples, including WT control, providing evidence of endogenous acetylation. CBDA was detected at marginal levels in samples infiltrated with both trichome and cell suspension constructs, but not in wild type plants.

### Example 10: Cytosolic-Targeted Synthesis and Glycosylation of Cannabidiolic Acid (CBDA)

[0355] The present inventors have demonstrated a system of cytosolic-targeted cannabinoid synthesis and glycosylation. By targeting or localizing, CBDA synthase (CBDAs) and UDP-glycosyltransferase 76G1 (UGT) to the cytosol, the present inventors demonstrated that plants expressing these heterologous genes produce and accumulate, in this embodiment, CBDA and its glycosylated derivatives (primary, secondary glycoside), as well as other CBDA derivatives, in the cytosol. As shown in FIG. 18, a gene expression vector for the cytosolic cannabinoid production system was generated. This construct included a cauliflower mosaic 35S promoter; AtADH 5′-UTR, enhancer element; cytCBDAs, cannabidiolic acid synthase with the trichome target sequence removed; HSP terminator; cytUGT76G1, UDP glycosyltransferase from Stevia rebaudiana.

[0356] SEQ ID NO. 9203 is identified as the polynucleotide gene sequence for a, cannabidiolic acid synthase with the trichome target sequence removed (cytCBDAs). SEQ ID NO. 9204 is identified as the corresponding protein sequence of cytCBDAs.

[0357] SEQ ID NO. 9205 is identified as the polynucleotide gene sequence for a, Cytosolic-targeted UDP-glycosyltransferase (UGT76G1) coding sequence (optimized for Arabidopsis thaliana expression) (cytUGT76G1 or cytUTG). SEQ ID NO. 9206 is identified as the corresponding protein sequence of cytUGT76G1 or cytUTG.

[0358] As an exemplary plant model, N. benthamiana plants were grown from seed and after 4 weeks of vegetative growth, leaves were co-infiltrated with Agrobacterium tumefaciens GV3101 carrying the following constructs: Cytosolic CBDAs+Cytosolic UGT in pRI201-AN or cell suspension construct, Myb/catalase in pRI201-AN, and p19 silencing suppressor in pDGB3alpha2. Agrobacterium density was normalized to 2 at absorbance of 600 nm using a spectrophotometer and cultures co-infiltrated in same ratio (1:1:1). After 2 and 4 days post-Agrobacterium infiltration (DPI), 1 mL CBGA (2.7 mM) dissolved in 0.1% Tween 20 (Sigma-Aldrich) or 0.1% Triton X-100 (Sigma-Aldrich) was infiltrated to each leaf. In a second embodiment using the cytosolic construct, 4 mM UDP-glucose was added to the CBGA media before feeding. Three biological replicates were used. RT-PCR primers are outlined in Table 5 below.

[0359] As shown in FIGS. 19-20, gene expression of cytCBDAs and cytUGT was confirmed via RT-PCR after 1 and 2 DPI. No expression of ABC transporter (ABCt) was observed after 1 DPI in leaves infiltrated cells suspension construct. This does not impact this experiment as the role of ABCt was to facilitate cannabinoid transport outside the cells in suspension cultures. As shown in FIG. 21, CBGA and its glycosylated and acetylated derivatives were detected in concentrations higher than in the trichome construct infiltrated leaves, except for secondary glycosides. Moreover, CBDA was detected in higher concentrations (up to 34 ppm) in leaves infiltrated with the cell suspension construct, compared to the trichome construct experiments (up to 2.6 ppm). As shown in FIG. 22, when UDP-glucose 4 mM (substrate for UGT) was provided together with CBGA (substrate for CBDAs), the present inventors detected low levels of glycosylated and hydroxylated CBDA in leaves infiltrated with both the cytosolic and cell suspension construct, but not in the WT control. This result demonstrates the novel in plant synthesis, glycosylation and hydroxylation of CBDA in the surrogate plant N. benthamiana, as demonstrated by the Extracted Ion Chromatograms shown in FIG. 23.

### Example 11: Hydroxylation and Glycosylation of Cannabinoids in Cannabis sativa

[0360] The present inventors demonstrate the glycosylation and hydroxylation of cannabinoids in Cannabis sativa. To further confirm our findings using N. benthamiana as a plant model, we performed Agrobacterium infiltration of the same plasmid constructs described in the section above in various strains of Cannabis sativa (see FIG. 24 Sample IDs). As shown in FIGS. 24-26, expression of the select genetic constructs in C. sativa, as in N. benthamiana, demonstrate synthesis and accumulation of hydroxylated and/or glycosylated cannabinoids, in this case CBDA. A comparison of the results using different Agrobacterium genetic constructs is presented in Table 8 below.

[0361] As the present inventors have demonstrated, in one embodiment, where the cytosolic construct was con-transformed with the Myb/catalase (MYBCAT) expression vector, yielded the highest detection of CBDA and CBDA glycoside, demonstrating the role of these genes in mitigating toxicity effects due to hydrogen peroxide accumulation (catalase) and overall increase in cannabinoid synthesis (Myb transcription factor).

### Example 12: Intracellular Expression of Glycosyltransferases in Yeast Cells

[0362] Four glycosyltransferases from Nicotiana tabacum (NtGT1, NtGT2, NtGT4, NtGT5), one from Stevia rebaudiana (UGT76G1), and Escherichia coli catalase E (Kat-E) encoding sequences were codon-optimized for expression in Pichia pastoris, synthesized by Genewiz, and cloned into pPink-HC or pPINK-αHC vector as described in the PichiaPink expression system manual (Invitrogen). The assembled constructs were verified by restriction enzyme digestion and DNA sequencing. Each of the constructs was used to transform the wild-type strain (strain 4). Transgene expression in transgenic yeast and expression was verified by RT-PCR (FIG. 41). The list of primers used in PCR verification of transgene expression is shown in Table 13. Codon optimized DNA and corresponding amino acid sequence identities are as follows: NtGT1 (SEQ ID NO. 9232, and SEQ ID NO. 9233 respectively); NtGT2 (SEQ ID NO. 9234, and SEQ ID NO. 9235 respectively); NtGT3 (SEQ ID NO. 9236, and SEQ ID NO. 59237 respectively); NtGT4 (SEQ ID NO. 9238, and SEQ ID NO. 9239 respectively); NtGT5 (SEQ ID NO. 9240, and SEQ ID NO. 9241 respectively); UGT76G1 (SEQ ID NO. 9242, and SEQ ID NO. 9243 respectively); Kat-E (SEQ ID NO. 9246, and SEQ ID NO. 9247 respectively). Additional codon optimized exogenous glycosyltransferases that may be used with the current invention may include, but not be limited to: UGT73A10 (SEQ ID NO. 9244, and SEQ ID NO. 9245 respectively);

### Example 13: Introducing CBDA to Yeast Cells in Acetonitrile

[0363] The present inventors demonstrated that after transformation of vectors into the wild type yeast strain, white colonies were selected and transferred into 250 mL flasks containing 50 mL YPG media (yeast extract, peptone, glycerol). After overnight growth (the cultures reached an OD₆₀₀˜1), 100% methanol was added at 5% v/v to induce gene expression overnight. The following morning, cultures were aliquoted into 3×10 mL cultures, centrifuged and resuspended in fresh YPG media with 2.5% v/v methanol, and 50 uL of CBDA in acetonitrile (1 mg/mL, Cayman Chem) was added to a final concentration of 14 uM. After 72hs, the samples were centrifuged down and the cell pellet and supernatant were separately frozen in liquid nitrogen and stored at −80° C. for further LC/MS analysis of cannabinoids.

### Example 14: Glycosylation of CBDA by NtGT4

[0364] The present inventors demonstrate that intracellular expression of NtGT4 (construct outlined in FIG. 42), the UGT 73-like glycosyltransferase from Nicotiana tabacum, led to the highest level of glycosylation of CBDA (FIGS. 43 A and B). The CBDA glycoside was detected in the pellet (FIG. 43B) as well as in the supernatant (FIG. 9A) suggesting that the yeast is secreting the product into the media, presumably by an endogenous ABC transporter. Overall, glycosylation by NtGT4 was significantly higher than by any other glycosyltransferase tested. NtGT1, NtGT2 and the Stevia UGT76G1 had only trace levels of CBDA glycosides that were not significantly different in yield from the untransformed wild-type strain.

### Example 15: Glycosylation of CBDA by NtGT5

[0365] The present inventors demonstrate that intracellular expression of NtGT5, the 7-deoxyloganetin glycosyltransferase-like from Nicotiana tabacum, led to glycosylation of CBDA (FIGS. 43 and 44). The present inventors further demonstrate that NtGT5 is not only capable of catalyzing the same R—OH position as NtGT4 but preferentially glycosylates a different and less water-soluble position than NtGT4. (Generally panels B &E of FIG. 37)

### Example 16: Introducing CBD Oil Extract to Yeast Cells

[0366] 50 mL cultures of transgenic yeast were induced with methanol after 24 hours of growth in YPG and fed with 227 uM cannabidiol (CBD) in the form of a commercial diluted CBD oil (Minnerva Canna). After 72hs, the samples were centrifuged down and pellet and supernatant were separately frozen in liquid nitrogen and stored at −80° C. for LC/MS analysis of cannabinoids. As in the CBDA feeding experiments, the present inventors demonstrate that NtGT4 and NtGT5 yielded the highest levels of glycosylation in different positions on CBD oil feeding experiments (FIG. 44). CBDA glycosides were detected in both supernatant (FIGS. 45A, D and F) and pellet (FIGS. 45 B, C and E). Oil extract feeding allowed the present inventors to investigate glycosylation of other cannabinoids. NtGT5 glycosylated the cannabinoid precursor CBGA (FIG. 45).

### Example 17: Extracellular Glycosylation of Cannabinoids

[0367] As described above, in one exemplary embodiment, an expression vector was used by the present inventors to secrete proteins into the media for an extracellular glycosylation of cannabinoids. Transgenic yeast lines expressing glycosyltransferases with the α-factor secretion signal (FIG. 35A) were fed CBD oil extract as previously described and analyzed for glycosylated cannabinoids. There was no glycosylation in the pellets as expected since the enzymes were secreted into the media. There was only minimal glycosylation in the supernatant (FIG. 46) in comparison with the intracellular system.

### Example 18: Time Course Analysis of Intracellular Cannabinoid Glycosylation

[0368] To determine the optimum time for cannabinoid glycosylation in yeast, the present inventors set up a time course experiment. Transgenic yeast expressing NtGT4 intracellularly were fed with CBDA (27 μM) and incubated for up to 96 hours. Samples were collected at different time points during the incubation and analyzed for the formation of CBDA glycosides (See FIG. 47). In both pellet and supernatant, a reciprocal relationship was observed by the present inventors between CBDA loss and CBDA glycoside production. For the supernatant (media), CBDA depletion was most likely due to uptake by the yeast. In the pellet, CBDA depletion can be explained by its glycosylation into CBDA glycosides. The optimal time for CBDA glycosylation was 48 hours, after which CBDA levels increased and CBDA glycosides dropped, suggesting that there is possibly an inducible and competing glycosidase activity present in the yeast that is turning over the CBDA glycoside. To prevent this glycosidase, the present inventors may introduce glycosidase inhibitors to preserve CBDA glycosides or suppress the expression of the endogenous glycosidases. In additional embodiment, the present inventors may overexpress an ABC transporter to speed up secretion of CBDA glycosides into the media. One example may include the expression of a multi-drug resistant transporter ABCG2 (SEQ ID No. 9248 and SEQ ID No. 9249) in tobacco. Through transcriptomics may also be employed by to identify possible candidates in yeast overexpressing glycosyltransferases.

### Example 18: Glycosylation of Cannabinoids in Tobacco Bright Yellow Cells

[0369] Similar to yeast suspension cultures, plant cell cultures are a viable platform for the production of recombinant proteins because they can be cultivated under sterile conditions and can be scaled up in fermenters for industrial level production. One of the most widely used cell lines in plant biology is the tobacco Bright Yellow 2 (BY2) cell line developed in 1968 at the Hatano Tobacco Experimental Station, Japan Tobacco Company. BY2 cells have a doubling time of 16-24 hours, multiplying up to a 100-fold in 7 days t al., 2016), can be easily transformed by Agrobacterium mediated transformation and require basic plant growth media for maintenance. As described above, the prevent inventors demonstrated endogenous glycosylation in tobacco leading to the possibility of using tobacco suspension cultures as a postharvest glycosylation platform. In this embodiment, the present inventors introduced wild-type and transgenic BY2 cells expressing the Stevia glycosyltransferase UGT76G1 (SEQ ID NO. 9242 and SEQ ID NO. 9243) and the multidrug resistance transporter ABCG2 (319C) (SEQ ID NO. 9248 and SEQ ID NO. 9249) with 504 CBDA in acetonitrile and grew the cultures for 3 days. Confirmation of transgene expression in BY2 cells was done by RT-PCR with primers amplifying a ≈0.5 kb region of the transgene (FIG. 48).

[0370] For the CBDA 1×O acetyl glycoside, glycosylation was observed in the wild type more than in transgenic lines. For all other forms of glycosylated CBDA, the transgenic line 319C had increased glycosylation compared to the wild type. The present inventors ran a comparison between glycosylation in yeast and tobacco yields, normalizing with pellet mass (FIG. 49).

[0371] As demonstrated in the figures, in general, a more diverse range of glycosylated products were obtained in tobacco compared to yeast (see chromatograms in FIGS. 38, 39 and 40). The common compounds produced were the CBDA 1× glycoside and the CBDA 2× glycoside. For the 1× glycoside, glycosylation in yeast lines overexpressing NtGT4 was significantly higher than in the BY2 cells overexpressing the Stevia UGT76G1. However, for the 2× glycoside (predicted to be more water-soluble than 1× glycoside), BY2 cells demonstrated higher glycosylation rate than the yeast (FIG. 49B). However, in BY2 cell cultures, low amounts of CBDA glycosides (<6 arbitrary units, normalized to fresh weight) compared to yeast cells (50-200 normalized arbitrary units) were detected in the supernatant, suggesting lower secretion in tobacco suspension cultures. In certain embodiments, co-expressing the tobacco NtGT4 and NtGT5 with an ABC transporter, such as ABCG2, under constitutive promoters in BY2 cells may increase glycosylation in tobacco and make BY2 cell cultures providing an alternative platform for production of water-soluble cannabinoids.

[0372] Additional embodiments of the current invention may include the transformation of tobacco, yeast or plant cells, such as Cannabis, with one or more exogenous P450 genes. In one preferred embodiment, this may include Cytochrome P450 (CYP3A4) from Mus musculus (SEQ ID NO. 9250 and 9251) as well as P450 oxidoreductase gene (CYP oxidoreductase) from Mus musculus (SEQ ID NO. 9252 and 9253). In some embodiment, the aforementioned gene may be codon optimized for expression in yeast cells.

### Example 19: Acetylated Cannabinoid Glycosides Exhibit Enhanced Stability in Solution

[0373] As generally described in FIGS. 50A-B and 51A-B, and Tables 14-19, the present inventors demonstrate that acetylated cannabinoid glycosides exhibit enhanced stability of the sugar moiety in solution compared to non-glycosylated cannabinoids, or cannabinoid glycosides. Due to this enhanced stability of the sugar moiety, acetylated cannabinoid glycosides exhibit both improved water solubility and/or chemical stability in solution, as well as enhanced resistance to chemical degradation into alternative cannabinoid forms over time.

[0374] In FIGS. 50A-B and 51A-B, the present inventors demonstrated the loss of CBDA and 1×CBDA glycoside and the quantity of 1×CBD glycoside formed, presumably from decarboxylation of 1×CBDA glycoside over time. As also demonstrated in FIGS. 50 and 51, and Tables 14-19, the present inventors demonstrate that CBD 0-Acetyl Glycoside was not found to decrease in any sample after day 7. Rather, levels increased slightly in all treatments. The absence of any residual UGTs were cross-check and confirmed as the samples were purified by SPE, washed and eluted in 30% and 65%-100% ethanol, respectively.

### Example 20: Identification of UGT Enzymes Having Activity Towards Cannabinoid Compounds

[0375] The present inventors identified 171,569 UDP-UGTs from the literature and as characterized in publicly available databases. The sequences contained a total of 52,613 unique, characterized UDP-UGT sequences. Using proprietary filtering and unsupervised machine learning, it was established that these 52,613 sequences may be represented by 23,062 high potential representative sequences protecting groupings of 90% homology around each sequence. The large number of representative sequences is indicative of extreme diversity in sequence homology within the protein class. Due to this diversity, representative sequences were further grouped based on homology to known characterized structures of UDP-UGTs with a 30% sequence homology threshold to the structural template, a value well within field standards for structure homology. Structural homology of the enzymes appears to be much better conserved within the proteins than sequence homology. This allowed the present inventors to capture 9299 representative sequences in 40 structural groupings classified further into 3 larger structural groupings (Gram+Bacteria, GT-A, and GT-B). The representative sequence for each structural grouping was then docked in silico with both THC and CBD and ranked by strength of predicted interaction. The present inventors have identified 9299 representatives (representing 90% homology to a larger number of sequences) UDP-UGTs predicted to have some action on cannabinoids including THC and CBD. These can be further represented in 40 structural groupings including primarily GT-A and GT-B fold enzymes but also including a few other unique structural groupings from gram positive bacteria that do not fit within GT-A/GT-B classification. While each sequence homology representative assigned to each structural group is expected to have some activity on cannabinoids based on known or computationally predicted activity of the structural representative, efficiency variation from sequence to sequence is expected and each sequence may be either more or less effective in glycosylation that the tested structural representative sequence. All predicted binding affinities presented here are representative of acceptably strong molecular interactions.

[0376] All 90% sequence homology representatives are provided as amino acid sequence in the appropriate structural grouping identified below. Structural groupings Identified by 4-digit RCSB PBD ID code representing best structural template with number of sequences in group:

[0377] GRAM+

[0378] 1182 sequences_30/5tzk_sequences (SEQ ID NO. 1-1182)

[0379] 40 sequences_30/3bcv_sequences (SEQ ID NO. 1183-1222)

[0380] 583 sequences_30/5hea_sequences (SEQ ID NO. 1223-1805)

[0381] 20 sequences_30/6h21_sequences (SEQ ID NO, 1806-1825)

[0382] GT-A

[0383] 3 sequences_30/1g9r_sequences (SEQ ID NO. 1826-1828)

[0384] 157 sequences_30/2z86_sequences (SEQ ID NO. 1829-1985)

[0385] 468 sequences_30/3 ckj_sequences (SEQ ID NO. 1986-2453)

[0386] 673 sequences_30/3e25_sequences (SEQ ID NO. 2454-3126)

[0387] 304 sequences_30/3fly_sequences (SEQ ID NO. 3127-3430)

[0388] 51 sequences_30/4dec_sequences (SEQ ID NO, 3431-3481)

[0389] 158 sequences_30/5mlz_sequences (SEQ ID NO. 3482-3639)

[0390] 54 sequences_30/5nv4_sequences (SEQ ID NO, 3640-3693)

[0391] 1006 sequences_30/6fsn_sequences (SEQ ID NO. 3694-4699)

[0392] 560 sequences_30/6p61_sequences (SEQ ID NO. 4700-5259)

[0393] GT-B

[0394] 1031 sequences_30/2acv_sequences (SEQ ID NO. 5260-6290)

[0395] 663 sequences_30/2 iya_sequences (SEQ ID NO. 6290-6953)

[0396] 531 sequences_30/3 hbf_sequences (SEQ ID NO. 6954-7484)

[0397] 514 sequences_30/5gl5_sequences (SEQ ID NO. 7485-7998)

[0398] 245 sequences_30/3c48_sequences (SEQ ID NO. 7999-8243)

[0399] 2.43 sequences_30/5nlm_sequences (SEQ ID NO. 8244-8486)

[0400] 126 sequences_30/5 du2_sequences (SEQ ID NO. 8487-8612)

[0401] 76 sequences_30/2c1x_sequences (SEQ ID NOs. 8613-8688)

[0402] 70 sequences_30/5zfk_sequences (SEQ ID NOs. 8689-8758)

[0403] 58 sequences_30/4 rel_sequences (SEQ ID NOs. 8759-8816)

[0404] 57 sequences_30/3otg_sequences (SEQ ID NOs. 8817-8873)

[0405] 48 sequences_30/5v2j_sequences (SEQ NOs. 8874-8921)

[0406] 44 sequences. 30/2 r60sequences (SEQ ID NOs. 8922-8%5)

[0407] 42 sequences_30/4amg_sequences (SEQ ID NOs. 8966-9007)

[0408] 39 sequences_30/4 n9w_sequences (SEQ ID NOs. 9008-9046)

[0409] 36 sequences_30/2pq6_sequences (SEQ ID NOs. 9047-9082)

[0410] 29 sequences_30/4wyi_sequences (SEQ ID NOs. 9083-9111)

[0411] 22 sequences_30/6bk0_sequences (SEQ ID NOs. 9112-9133)

[0412] 16 sequences_30/6inf_sequences (SEQ. ID NOs. 9134-9149)

[0413] 9 sequences_30/3ia7_sequences (SEQ NOs. 9150-9158)

[0414] 7 sequences_30/5d01_sequences (SEQ ID NOs. 9159-9165)

[0415] 5 sequences_30/6ij9_sequences (SEQ. ID NOs. 9166-9170)

[0416] 5 sequences_30/6d9t_sequences (SEQ ID NOs, 9171-9175)

[0417] 5 sequences_30/2jjm_sequences (SEQ ID NOs. 9176-9180)

[0418] 1 sequences_30/3mbo_sequences (SEQ ID NO. 9181)

### Example 21: Functional-Structural Grouping of UGT Enzymes

[0419] The Carbohydrate-Active enZyme database (CAZy) currently groups UGTs (GTs) into 110 functional families comprising the so-called Leloir GTs (dependent on sugar nucleotides like UDP-glucose) and the non-Leloir GTs (non-sugar nucleotide-dependent). The Leloir GTs, which are the focus in this application, have been found to adopt one of two structural folds, termed the GT-A and GT-B folds. The GT-A fold consists of a single domain with a seven-stranded β-sheet flanked on both sides of the sheet by several α-helices (FIG. 58). Some bacterial GTs that adopt the GT-A fold also contain an additional tetratricopeptide repeat (TPR) motif that mediates the assembly of oligomers (FIG. 59). The GT-B fold consists of two distinct N-terminal and C-terminal domains that both adopt Rossmann-like folds (FIG. 60). The substrate is bound closer to the N-terminal domain while the sugar nucleotide is bound closer to the C-terminal domain. Of the 110 functional families listed in the CAZy database, 21 and 18 of these were respectively found to adopt the GT-B and GT-A folds.

SUPPLEMENTAL TABLE 1
UDP−UGT Structural Representative Cannabinoid
Predicted Binding Affinity Tables:
Gram+ Bacterial UDP-UGTs CBD Binding

| Structure | Affinity | Units |
|---|---|---|
| 5tzk/min_ligand_CBD_01.pdbqt.log | −9.18445 | (kcal/mol) |
| 3bcv/min_ligand_CBD_01.pdbqt.log | −8.87895 | (kcal/mol) |
| 5hea/min_ligand_CBD_10.pdbqt.log | −8.58535 | (kcal/mol) |
| 6h21/min_ligand_CBD_10.pdbqt.log | −8.02499 | (kcal/mol) |

Gram+ Bacterial UDP-UGTs THC Binding

| Structure | Affinity | Units |
|---|---|---|
| 5tzk/min_ligand_THC_04.pdbqt.log | −10.76935 | (kcal/mol) |
| 5hea/min_ligand_THC_01.pdbqt.log | −9.44755 | (kcal/mol) |
| 6h21/min_ligand_THC_04.pdbqt.log | −8.46399 | (kcal/mol) |
| 3bcv/min_ligand_THC_01.pdbqt.log | −7.63992 | (kcal/mol) |

GT-A UDP-UGTs CBD Binding

| Structure | Affinity | Units |
|---|---|---|
| 6p61c1/min_ligand_CBD_04.pdbqt.log | −10.94076 | (kcal/mol) |
| 2z86c1/min_ligand_CBD_05.pdbqt.log | −10.7412 | (kcal/mol) |
| 5nv4/min_ligand_CBD_08.pdbqt.log | −10.473 | (kcal/mol) |
| 3f1y/min_ligand_CBD_04.pdbqt.log | −10.18567 | (kcal/mol) |
| 3ckj/min_ligand_CBD_03.pdbqt.log | −8.43406 | (kcal/mol) |
| 6fsn/min_ligand_CBD_1.pdbqt.log | −7.49086 | (kcal/mol) |
| 1g9r/min_ligand_CBD_01.pdbqt.log | −7.3355 | (kcal/mol) |
| 3e25/min_ligand_CBD_03.pdbqt.log | −6.68012 | (kcal/mol) |
| 5mlz/min_ligand_CBD_2.pdbqt.log | −6.35057 | (kcal/mol) |
| 4dec/min_ligand_CBD_05.pdbqt.log | −4.73222 | (kcal/mol) |

GT-A UDP-UGTs THC Binding

| Structure | Affinity | Units |
|---|---|---|
| 2z86/min_ligand_THC_01.pdbqt.log | −10.78944 | (kcal/mol) |
| 3f1y/min_ligand_THC_04.pdbqt.log | −10.65424 | (kcal/mol) |
| 6p61/min_ligand_THC_03.pdbqt.log | −10.64424 | (kcal/mol) |
| 5nv4/min_ligand_THC_10.pdbqt.log | −9.39469 | (kcal/mol) |
| 3ckj/min_ligand_THC_08.pdbqt.log | −8.40829 | (kcal/mol) |
| 6fsn/min_ligand_THC_2.pdbqt.log | −7.73952 | (kcal/mol) |
| 3e25/min_ligand_THC_10.pdbqt.log | −6.95711 | (kcal/mol) |
| 1g9r/min_ligand_THC_02.pdbqt.log | −6.65493 | (kcal/mol) |
| 4dec/min_ligand_THC_01.pdbqt.log | −6.05658 | (kcal/mol) |

GT-B UDP-UGTs CBD Binding

| Structure | Affinity | Units |
|---|---|---|
| 3otg/min_ligand_CBD_01.pdbqt.log | −15.46188 | (kcal/mol) |
| 3hbf/min_ligand_CBD_06.pdbqt.log | −11.14495 | (kcal/mol) |
| 5nlm/min_ligand_CBD_07.pdbqt.log | −9.32883 | (kcal/mol) |
| 2c1x/min_ligand_CBD_06.pdbqt.log | −8.6653 | (kcal/mol) |
| 6d9t/min_ligand_CBD_02.pdbqt.log | −8.23633 | (kcal/mol) |
| 5v2j/min_ligand_CBD_07.pdbqt.log | −8.21936 | (kcal/mol) |
| 4rel/min_ligand_CBD_05.pdbqt.log | −7.98206 | (kcal/mol) |
| 6inf/min_ligand_CBD_10.pdbqt.log | −7.9467 | (kcal/mol) |
| 5gl5/min_ligand_CBD_05.pdbqt.log | −7.8509 | (kcal/mol) |
| 6ij9/min_ligand_CBD_06.pdbqt.log | −7.61328 | (kcal/mol) |
| 2jjm/min_ligand_CBD_05.pdbqt.log | −7.52191 | (kcal/mol) |
| 5du2/min_ligand_CBD_04.pdbqt.log | −7.32558 | (kcal/mol) |
| 2pq6/min_ligand_CBD_05.pdbqt.log | −7.27422 | (kcal/mol) |
| 2iya/min_ligand_CBD_07.pdbqt.log | −6.92545 | (kcal/mol) |
| 3ia7/min_ligand_CBD_02.pdbqt.log | −6.76971 | (kcal/mol) |
| 4amg/min_ligand_CBD_09.pdbqt.log | −6.72897 | (kcal/mol) |
| 5d01/min_ligand_CBD_09.pdbqt.log | −6.55769 | (kcal/mol) |
| 3c48/min_ligand_CBD_3.pdbqt.log | −6.52731 | (kcal/mol) |
| 2r60/min_ligand_CBD_07.pdbqt.log | −6.43231 | (kcal/mol) |
| 4wyi/min_ligand_CBD_01.pdbqt.log | −6.3941 | (kcal/mol) |
| 6bk0/min_ligand_CBD_06.pdbqt.log | −6.0637 | (kcal/mol) |
| 3mbo/min_ligand_CBD_02.pdbqt.log | −5.92157 | (kcal/mol) |
| 2acv/min_ligand_CBD_02.pdbqt.log | −5.37595 | (kcal/mol) |
| 4n9w/min_ligand_CBD_09.pdbqt.log | −5.32776 | (kcal/mol) |
| 5zfk/min_ligand_CBD_10.pdbqt.log | −5.1177 | (kcal/mol) |

GT-B UDP-UGTs THC Binding

| Structure | Affinity | Units |
|---|---|---|
| 3otg/min_ligand_THC_4.pdbqt.log | −15.36588 | (kcal/mol) |
| 3hbf/min_ligand_THC_02.pdbqt.log | −10.84724 | (kcal/mol) |
| 5v2j/min_ligand_THC_08.pdbqt.log | −9.85188 | (kcal/mol) |
| 4amg/min_ligand_THC_02.pdbqt.log | −9.13889 | (kcal/mol) |
| 2c1x/min_ligand_THC_02.pdbqt.log | −8.50937 | (kcal/mol) |
| 2jjm/min_ligand_THC_09.pdbqt.log | −8.32614 | (kcal/mol) |
| 6d9t/min_ligand_THC_08.pdbqt.log | −8.12303 | (kcal/mol) |
| 4rel/min_ligand_THC_07.pdbqt.log | −7.83388 | (kcal/mol) |
| 2pq6/min_ligand_THC_01.pdbqt.log | −7.68854 | (kcal/mol) |
| 2r60/min_ligand_THC_01.pdbqt.log | −7.60612 | (kcal/mol) |
| 5nlm/min_ligand_THC_08.pdbqt.log | −7.58146 | (kcal/mol) |
| 6inf/min_ligand_THC_09.pdbqt.log | −7.08419 | (kcal/mol) |
| 5gl5/min_ligand_THC_01.pdbqt.log | −7.03571 | (kcal/mol) |
| 5d01/min_ligand_THC_5.pdbqt.log | −6.98384 | (kcal/mol) |
| 5du2/min_ligand_THC_01.pdbqt.log | −6.78902 | (kcal/mol) |
| 6ij9/min_ligand_THC_1.pdbqt.log | −6.60719 | (kcal/mol) |
| 2iya/min_ligand_THC_07.pdbqt.log | −6.36888 | (kcal/mol) |
| 2acv/min_ligand_THC_01.pdbqt.log | −6.26508 | (kcal/mol) |
| 6bk0/min_ligand_THC_04.pdbqt.log | −5.81022 | (kcal/mol) |
| 4wyi/min_ligand_THC_1.pdbqt.log | −5.72502 | (kcal/mol) |
| 3ia7/min_ligand_THC_02.pdbqt.log | −5.70649 | (kcal/mol) |
| 3c48/min_ligand_THC_3.pdbqt.log | −5.65728 | (kcal/mol) |
| 5zfk/min_ligand_THC_1.pdbqt.log | −5.63526 | (kcal/mol) |
| 3mbo/min_ligand_THC_02.pdbqt.log | −5.544 | (kcal/mol) |
| 4n9w/min_ligand_THC_02.pdbqt.log | −5.3822 | (kcal/mol) |

SUPPLEMENTAL TABLE 2
Amino Acid sequences of cannabinoid-binding
UDP-UGTs according to structural groupings

| GRAM+ | SEQ ID NO. |
|---|---|
| 5tzk | (SEQ ID NOs. 1-1182) |
| 3bcv | (SEQ ID NOs. 1183-1222) |
| 5hea | (SEQ ID NOs. 1223-1805) |
| 6h21 | (SEQ ID NOs. 1806-1825) |
| GT-A | SEQ ID NO. |
| 1g9r | (SEQ ID NOs. 1826-1828) |
| 2z86 | (SEQ ID NOs. 1829-1985) |
| 3ckj | (SEQ ID NOs. 1986-2453) |
| 3e25 | (SEQ ID NOs. 2454-3126) |
| 3f1y | (SEQ ID NOs. 3127-3430) |
| 4dec | (SEQ ID NOs. 3431-3481) |
| 5mlz | (SEQ ID NOs. 3482-3639) |
| 5nv4 | (SEQ ID NOs. 3640-3693) |
| 6fsn | (SEQ ID NOs. 3694-4699) |
| 6p61 | (SEQ ID NOs. 4700-5259) |
| GT-B | SEQ ID NO. |
| 2acv | (SEQ ID NOs. 5260-6290) |
| 2iya | (SEQ ID NOs. 6290-6953) |
| 3hbf | (SEQ ID NOs. 6954-7484) |
| 5gl5 | (SEQ ID NOs. 7485-7998) |
| 3c48 | (SEQ ID NOs. 7999-8243) |
| 5nlm | (SEQ ID NOs. 8244-8486) |
| 5du2 | (SEQ ID NOs. 8487-8612) |
| 2c1x | (SEQ ID NOs. 8613-8688) |
| 5zfk | (SEQ ID NOs. 8689-8758) |
| 4rel | (SEQ ID NOs. 8759-8816) |
| 3otg | (SEQ ID NOs. 8817-8873) |
| 5v2j | (SEQ ID NOs. 8874-8921) |
| 2r60 | (SEQ ID NOs. 8922-8965) |
| 4amg | (SEQ ID NOs. 8966-9007) |
| 4n9w | (SEQ ID NOs. 9008-9046) |
| 2pq6 | (SEQ ID NOs. 9047-9082) |
| 4wyi | (SEQ ID NOs. 9083-9111) |
| 6bk0 | (SEQ ID NOs. 9112-9133) |
| 6inf | (SEQ ID NOs. 9112-9133) |
| 3ia7 | (SEQ ID NOs. 9150-9158) |
| 5d01 | (SEQ ID NOs. 9159-9165) |
| 6ij9 | (SEQ ID NOs. 9166-9170) |
| 6d9t | (SEQ ID NOs. 9171-9175) |
| 2jjm | (SEQ ID NOs. 9176-9180) |
| 3mbo | (SEQ ID NO. 9181) |

### Materials and Methods

### Materials and Methods Example 1: Use of a Tobacco as an Exemplary Plant System for the In Vivo Functionalization and Glycosylation of Cannabinoids.

[0420] The present inventors demonstrated the in vivo functionalization and glycosylation of cannabinoids in a model plant system. Specifically, the present inventors used N. benthamiana (tobacco) as a model system to demonstrate in vivo functionalization and glycosylation of cannabinoids. In this embodiment, transient transformation through Agrobacterium infiltration was performed in N. benthamiana. The present inventors demonstrated expression of heterologous genes that were expressed in transformed N. benthamiana using a number of heterologous gene expression vectors (described below). In this exemplary embodiment, upon confirmation of expression of the heterologous genes that would functionalize and glycosylate cannabinoid molecules, the present inventors introduced to the plants select cannabinoid compounds. In this embodiment, the present inventors introduced to the transgenic N. benthamiana plants cannabigerolic acid (CBGA) and/or cannabidiolic acid (CBDA). The present inventors also demonstrated the in vivo functionalization and glycosylation of cannabinoids in a cell suspension culture. Specifically, the inventors used exemplary tobacco bright yellow (BY2) cells as a cell suspension system for studies of cannabinoid production, functionalization and/or glycosylation.

Materials and Methods Example 2: Transient Transformation of the Exemplary Plant Model Nicotiana benthamiana.

[0421] The present inventors used Agrobacterium tumefaciens Ti-plasmid-mediated transformation with the plant expression vector pRI201-AN (Takara Bio USA), a binary vector for high-level expression of a foreign gene in dicotyledonous plants carrying the constitutive 35S promoter and an Arabidopsis thaliana Alcohol dehydrogenase (AtAdh) as a translational enhancer (Matsui et al. 2012). N. benthamiana was transiently transformed according to the method described by Sparkes et al. 2006. Overnight cultures of Agrobacterium strain GV3101 were transferred to a 250 mL flask with 50 mL LB medium supplemented with 50 mg/L of Kanamycin, 50 mg/L of Gentamycin and 10 mg/L of Rifampicin and grown for 4-8 hours until the optical density at 600 nm (0D600) reached approximately between 0.75 and 1. The cells were pelleted in a centrifuge at room temperature and resuspended in 45 mL of infiltration medium containing 5 g/L D-glucose, 10 mM MES, 10 mM MgCl2 and 100 μM acetosyringone. 1 ml of the solution was used to infiltrate the leaves using a 1 mL syringe. Expression of the transgene(s) was confirmed 2-4 days after infiltration by RT-PCR. For RT-PCR analysis, 100 mg of leaf tissue were frozen in liquid nitrogen and ground in a TissueLyser (QIAGEN Inc, USA). RNA was extracted following the EZNA plant RNA extraction kit (Omega Bio-tek Inc, USA). Up to a microgram of total RNA was used to synthesize cDNA using the superscript III cDNA synthesis kit (Thermo Fisher Scientific, USA). The cDNA was used to check for the expression of transgene(s) by RT-PCR.

Materials and Methods Example 3: Introduction of Select Cannabinoid Substrate(s) to the Transgenic N. benthamiana Strain.

[0422] Select enzyme substrates were introduced to the transgenic or genetically modified N. benthamiana strain two days after Agrobacterium infiltration and upon confirmation of transgene expression by RT-PCR. In this example, approximately 277 μM cannabigerolic acid (CBGA) and/or cannabidiolic acid (CBDA) was dissolved in 1 mL of buffer containing 10 mM IVIES, 10 mM MgCl2 and 0.1% Triton X100 or 0.1% Tween20 and applied to the transformed leaves either by infiltration or by dabbing with a cotton applicator. Plants were harvested after 1-4 days, weighed for fresh weight and frozen at −80° C. before conducting LC-MS analysis for the presence of modified cannabinoids.

### Materials and Methods Example 4: In Vitro Assays for CBDA Synthase and Glycosyltransferase Activity.

[0423] CBDA synthase is generally active in the pH range 4-6 (Taura et al. 1996) while glycosyltransferases are typically active in the pH range 5.0 to 7.0 (Rini and Esko, 2017). Based on this difference in optimal pH for enzyme activity, the present inventors generated a single extraction buffer for a combined assay of CBDA synthase and UDP glycosyltransferase at pH 6 and 30° C. in in vitro assays (Priest et al., 2006). The present inventors ground the transformed leaf tissue in liquid nitrogen. A grinding buffer was added consisting of 50 mM IVIES, pH 6, 1 mM EDTA, 5 mM β-mercaptoethanol and 0.1% Triton X-100 was added at 5:1 ratio of buffer to fresh weight of plant using a mortar and pestle. The extract was filtered on ice through 2 layers of cheesecloth to remove debris and centrifuged at 21000 g for 5 minutes at 4° C. The supernatant was used in subsequent assays. Protein concentration of the supernatant was quantified by the Bradford assay, using bovine serum albumin as the standard. To start the reaction, 100-200 μg of crude total protein was used. The assay was carried out with and without UDP-glucose to check if glycosylation of cannabinoid substrate was preventing downstream reactions or transport of CBGA. Wild type plants were used as controls to separate endogenous from overexpressed UDP glycosyltransferase activity. The reaction was started by adding 100 μg of protein, and 8 mM uridine diphosphate glucose (UDPG) as the sugar-nucleotide donor to a reaction mixture consisting of approximately 277 μM CBGA, 0.1% (w/v) Triton X-100, 3 mM MgCl2 and 50 mM MES (pH 6.0). The reaction was incubated at 30° C. for 3h or overnight for 14 hours. The reaction was terminated by freezing in liquid nitrogen and the samples were stored at −80° C. before LC-MS analysis.

### Materials and Methods Example 5: Trichome-Targeted Synthesis and Glycosylation.

[0424] As an exemplary plant model, N. benthamiana plants were grown from seed and, after 4 weeks of vegetative growth, the leaves were co-infiltrated with Agrobacterium tumefaciens GV3101 carrying the following constructs: Trichome CBDAs+trichome UGT in pRI201-AN (trichome construct), PM-UTR1 in pRI201-AN, and p19 silencing suppressor in pDGB3alpha2. In a second experiment, leaves were also infiltrated with the Agrobacterium expressing a Ti-plasmid with the Myb/catalase genes. Agrobacterium density was normalized to 1 or 2 at absorbance of 600 nm using a spectrophotometer and cultures co-infiltrated in same ratio (1:1:1). After 1 and 4 days post-Agrobacterium infiltration (DPI), 1 mL CBGA (277 μM) dissolved in 0.1% Tween20 (Sigma-Aldrich) or 3% DMSO (Sigma-Aldrich) was infiltrated to each leaf. Three biological replicates were used. The experiment was repeated twice. After preliminary results, Agrobacterium densities of 2 at OD₆₀₀ were selected for all following infiltration experiments. Moreover, 0.1% Tween20 was chosen over DMSO 3% due to better solubilizing CBGA substrate.

[0425] In this embodiment, leaf samples were collected at 2 DPI and immediately frozen in liquid nitrogen. RNA extraction was done using RNA plant mini-kit as described by manufacturer (Qiagen). cDNA was synthesized using RNA to cDNA Ecodry Premix as described by manufacturer (Takara). Template cDNA was normalized to 50 ng of corresponding total RNA per reaction. Annealing temperature in Celsius: 60. Extension time: 15s. 35 cycles. Q5 DNA polymerase kit used as described by manufacturer (New England Biolabs). RT-PCR primers are outlined in Table 5 below.

Materials and Methods Example 6: Transient Transformation of Cannabis sativa.

[0426] The present inventors performed Agrobacterium tumefaciens-mediated transient transformation of Cannabis sativa. The experimental groups consisted of young leaves of high CBD variety (˜10% in dried flowers) and trichome leaves of high THC variety (˜20% dried flowers).

[0427] To transform leaves of high CBD varieties, the present inventors germinated 100 seeds three times; this was done to ensure that a sufficient number of plants would be available for all 9 independent transformation events. To transform trichome leaves, the present inventors used small trichome-containing leaves of several varieties known to be high THC varieties. Experimental set up consisted of 2 different Agrobacterium tumefaciens strains. For transient transformation of Agrobacterium strain EHA 105, the present inventors grew cells in 10 ml of LB medium supplemented with 100 mg/L of Rifampicin and 50 mg/L of Kanamycin and for Agrobacterium strain GV3101::6000 cells were grown with 50 mg/L of Kanamycin, 25 mg/L of Gentamycin and 50 mg/L of Rifampicin. A single Agrobacterium colony was used for inoculation and grown overnight. Then, 1 ml of this culture was inoculated into 500 ml of aforementioned LB medium supplemented with 20 μM acetosyringone. Agrobacteria were grown to OD₆₀₀ of approximately between 1 and 1.5. The cells were pelleted in a centrifuge at room temperature and resuspended in infiltration medium containing 10 mM IVIES, 10 mM MgCl2 and 200 μM acetosyringone to an OD₆₀₀ of 0.5.

[0428] Bacterial culture was then used for three different types of Cannabis sativa transformations. In all cases, transformation was done in the form of co-transformation, mixing all relevant strains (plasmids) in equal proportion of cell numbers. First, for the present inventors infiltrated young (two weeks old) fully expended Cannabis sativa plants using 1 ml syringe. Prior to transformation, plants were kept under plastic cover, to ensure maximum softness of the leaves. Infiltration was performed from abaxial side, ensuring that the entire surface of the leaf is infiltrated at 12/h/12h day/night at 22° C.

[0429] Second, the present inventors vacuum infiltrated detached young (two weeks old) fully expended Cannabis sativa leaves. Prior to transformation, plants were kept under plastic cover, to ensure maximum softness of the leaves. Leaves were then placed on half-strength Murashige and Skoog (1962) (½ MS) agar supplemented with 61.8 mM ammonium nitrate and incubated for 5 days at 12/h/12h day/night at 22° C.

[0430] Third, trichome leaves were detached, placed into 50 ml Falcon tubes and vacuum infiltrated with aforementioned bacterial solution 2× for 10 min each. Leaves were then placed on ½ MS agar supplemented with 61.8 mM ammonium nitrate and incubated for 5 days.

[0431] All experiments were done in triplicates, with the fourth replicate done for collection of DNA/RNA and staining X-gluc for measuring the activity of beta-glucuronidase (GUS) after co-infiltration with Agrobacterium-containing GUS gene. In all cases, leaves were harvested after 5 days of transformation, frozen in liquid nitrogen and stored at −80° C.

Materials and Methods Example 7: Extraction of Water-Soluble Cannabinoids from N. benthamiana.

[0432] Fresh transformed plant material was harvested from greenhouse experiments in 15 or 50 mL polypropylene centrifuge tubes and flash frozen in liquid N₂. The frozen plant material was enzymatically quenched by submersing the plant material in boiling methanol for 2 min. The methanol-quenched material was homogenised using a P-10-35 homogenizer (Kinematica, Bohemia N.Y.). The homogenate was extracted by brief agitation in a final volume of 10 mL or 30 mL 70% methanol (v/v) respective to tube size. The resulting extracts were clarified by centrifugation at 2,500 rpm at 4° C. for 15 minutes in a Beckman J-6B floor centrifuge (Beckman Coulter, Indianapolis Ind.). The supernatant was transferred into a polypropylene tube and evaporated under a stream of N₂ at 45° C. until dried. The extracts were reconstituted in methanol containing 20 μg/mL of the internal standard 7-Hydroxyoumarin (Sigma-Aldrich, H24003). The reconstituted extracts were placed into 1.5 mL microfuge tubes and clarified in a microcentrifuge at 10,000 g for 15 min. 500 μL of the supernatant was transferred to a 2 mL auto sampler vial and kept at 4° C. until analysis. In vitro assays sample preparation: samples were syringed filtered through 0.45 μm PVDF membrane into a 2 mL auto sampler vial.

Materials and Methods Example 8: Extraction of Water-Soluble Cannabinoids from Cannabis sativa.

[0433] Fresh plant material was harvested from plants grown in chamber in 1.5 mL polypropylene centrifuge tubes and flash frozen in liquid N₂. The frozen plant material was homogenized using pestle and mortar and enzymatically quenched by submersing the plant material in boiling 100% ethanol for 2 min. Homogenized solution was diluted to 70% ethanol. The resulting extracts were clarified by centrifugation at 2,500 rpm at 4° C. for 15 minutes in Eppendorf centrifuge (Centrifuge 5415 R). The supernatant was transferred into a polypropylene tube and concentrated three times using vacuum centrifuge (Speedvac SC110, Savant). 2 μl of 20 μg/mL of the internal standard Umbelliferone (Sigma-Aldrich, H24003) was added to 98 μl of concentrated extract and taken for analysis.

### Materials and Methods Example 9: Liquid Chromatography Mass Spectrometry Used to Confirm Functionalization and Glycosylation of Cannabinoids.

[0434] The present inventor used liquid chromatography mass spectrometry to confirm functionalization and glycosylation of cannabinoids in the exemplary plant systems described herein. Specifically, mass spectrometry was performed on a quadrupole time-of-flight (QTOF) mass spectrometer (QTOF Micro, Waters, Manchester, UK) equipped with a Lockspray™ electrospray ion source coupled to a Waters Acquity UPLC system (Waters, Manchester, UK). Mass spectra were collected in the negative electrospray ionization mode (ESI−). The nebulization gas was set to 400 L/h at a temperature of 350° C., the cone gas was set to 15 L/H and the source temperature was set to 110° C. A capillary voltage and cone voltage were set to 2500 and 35 V, respectively. The MCP detector voltage was set to 2500 V. The Q-TOF micro MS acquisition rate was set to 1.0 s with a 0.1 s interscan delay. The scan range was from 100 to 1500 m/z. Data was collected in continuum mode. A lockmass solution of 50 ppm raffinose (503.1612 m/z) in 50:50 water:methanol was delivered at 20 μL/min through an auxiliary pump and acquired every 10 s during the MS acquisition. Separations were performed on a Waters HSS T3 C18 column (2.1×100 mm, particle size 1.8 μm) using a Waters ACQUITY UPLC System, equipped with an ACQUITY Binary Solvent Manager, ACQUITY Column Manager and ACQUITY Sample Manager (10 μL sample loop, partial loop injection mode, 5 μL injection volume, 4° C.). Eluents A and B were water and acetonitrile, respectively, both containing 0.1% formic acid. Elution was performed isocratically for 0.5 min at 10% eluent B and then linear gradient 100% eluent B in 14.5 min, and isocratically for 3 min at 100% eluent B. The column was re-equilibrated for 6 min. The flow rate was set to 250 μL/min and the column temperature was maintained at 30° C.

### Materials and Methods Example 10: Data Processing.

[0435] Identification of individual cannabinoid analogs was performed by the present inventors, by their corresponding accurate mass shifts by Metabolynx (Waters Corp., Milford, USA). The method parameters for data processing were set as follows: retention time range 0.1-18 min, mass range 100-1500 Da, retention time tolerance 0.2 min, mass tolerance 0.05 Da, peak intensity threshold 14. Accurate mass measure of the continuum data was performed using the raffinose lock mass. Raw chromatographic data were additionally processed for extracted ion chromatogram sand peak area integration using Masslynx 4.1 (Waters Corp., Milford, USA). The select cannabinoids, CBGA and CBDA were identified and quantitated using certified reference materials (Cerilliant, Round Rock, Tex.). All chemical structures and physiochemical and constitutional properties were generated using ChemDoodle version 8.1.0 (IChemLabs™ Chesterfield, Va.).

### Materials and Methods Example 11: Yeast Cell Gene Expression System.

[0436] The present inventors generated an exemplary yeast-cell expression system based on the methylotrophic yeast Pichia pastoris (Komagataella phaffii) was used in this work. The Pichiapink™ system includes protease-deficient host strains and allows both intracellular as well as secreted protein production. In addition, the use of the inducible promoter alcohol oxidase (AOX1) uncouples growth from production of desired proteins, so that cells are not stressed by the accumulation of recombinant protein during growth phase yeast strain 4 (herein referred to as wild-type, WT), a double knockout for proteases prb1, pep4 (to avoid degradation of desired protein), was the background strain in the present inventor's yeast transformations. For secretion of proteins into the media, genes of interest were cloned in frame into the vector pPINK-αHC which contains the Saccharomyces cerevisiae α-mating factor pre-sequence for secreted expression of recombinant proteins. For intracellular production of proteins, the vector pPINK-HC was used. Both vectors contained the ADE2 marker for selection on minimal media lacking adenine (FIG. 35). Transformation and selection of transformants was conducted according to the manufacturer's instructions (Invitrogen). Such example is non-limiting, as a variety of expression vectors may be used with the current invention.

### Materials and Methods Example 12: Analysis of Yeast System Transgene Expression.

[0437] Expression analysis for introduced transgenes was carried out by RT-PCR. For yeast, 2 mL of a 2-day old culture induced by methanol was centrifuged in a microfuge tube. The pellet was ground in a TissueLyser (QIAGEN Inc, USA). RNA was extracted following the EZNA plant RNA extraction kit (Omega Bio-tek Inc, USA). Up to a microgram of total RNA was used to synthesize cDNA using the superscript III cDNA synthesis kit (Thermo Fisher Scientific, USA). The cDNA was used to check for the expression of transgenes by RT-PCR.

### Materials and Methods Example 13: Transformation of Tobacco BY2 Cells for Cell Suspension Expression System.

[0438] The present inventors used Agrobacterium Ti-plasmid mediated transformation with the plant expression vector pRI201-AN (Takara Bio USA), a binary vector for high-level expression of a foreign gene in dicotyledonous plants carrying the constitutive 35S promoter and an Arabidopsis Alcohol dehydrogenase (AtAdh) as a translational enhancer. 5 mL of LB containing 50 mg/L kanamycin was inoculated with a single colony of Agrobacterium tumefaciens strain GV3101 carrying a binary vector for the expression of the glycosyltransferase 76G1 from Stevia rebaudiana (SEQ ID NO. 9242 and SEQ ID NO. 9243) and the multi-drug ABC transporter ABCG2 (SEQ ID NO. 9248 and SEQ ID NO. 9249). The Agrobacterium culture was grown overnight at 180 rpm and 28° C. to an OD₆₀₀ of 0.6 to 0.8. For transformation, 10 ml of 3-day old BY2 cell cultures was incubated with 500 ul of the Agrobacterium culture and 10 μl of 100 mM acetosyringone for 48 hours in the dark at room temperature in sterile 50 mL falcon tubes. After 48 hours, the cells were washed twice in Murashige and Skoog medium supplemented with 500 mg/L carbenicillin before plating on selective media (Murashige and Skoog supplemented with 500 mg/L carbenicillin and 50 mg/L kanamycin). Calli were picked at 4 weeks and re-plated for further screening for transgene expression.

### Materials and Methods Example 14: Statistical Analysis of Yeast and Tobacco Expressions Systems.

[0439] All experimental treatments were carried out in triplicates. Data were analyzed using GraphPad Prism software package (http://www.graphpad.com/prism/Prism.htm). Student's t-test and one-way analysis of variance (ANOVA) with Dunnett's Multiple Comparison test for comparing multiple lines with the control were used. All analyses for significant differences were performed at P≤0.05.

Materials and Methods Example 15: Yeast and/or Tobacco Cell Suspension Sample Preparation for the Analysis of Water-Soluble Cannabinoids.

[0440] Cell suspension cultures were harvested by centrifugation in 15 or 50 mL polypropylene centrifuge tubes. The supernatants were transferred to a new centrifuge tube and both the cell pellet and supernatant was flash frozen in liquid N2. Cell pellets were freeze dried and ˜100 mg of material was extracted by bead milling with 250 uL volume of 0.1 mm zirconia beads in 1 mL of 70% methanol:water (v/v) containing 20 μg/mL of the internal standard 7-hydroxyoumarin (Sigma-Aldrich, H24003). The resulting extracts were clarified by centrifugation at 13,000 rcf for 10 minutes. The clarified supernatant was transferred into a 2 mL autosampler. Supernatants were concentrated by freeze drying 2-fold and spiked at 20 μg/mL of the internal standard 7-hydroxyoumarin final concentration. A 1 mL aliquot was transferred to a 2 mL autosampler.

### Materials and Methods Example 16: Liquid Chromatography Mass Spectrometry for Yeast and Tobacco Suspension Culture Systems.

[0441] Mass spectrometry was performed on a quadrupole time-of-flight (QTOF) mass spectrometer (QTOF Ultima, Waters, Manchester, UK) equipped with a Lockspray™ electrospray ion source coupled to a Waters Acquity UPLC system (Waters, Manchester, UK). Mass spectra were collected in the negative electrospray ionization mode (ESI−). The nebulization gas was set to 650 L/h at a temperature of 500° C., the cone gas was set to 15 L/H and the source temperature was set to 110° C. A capillary voltage and cone voltage were set to 2500 and 35 V, respectively. The MCP detector voltage was set to 2200 V. The Q-TOF Ultima MS acquisition rate was set to 0.25 s with a 0.1 s interscan delay. The scan range was from 100 to 1500 m/z. Data was collected in continuum mode. A lockmass solution of 50 ppm raffinose (503.1612 m/z) in 50:50 water:methanol was delivered at 20 μL/min through an auxiliary pump and acquired every 10 s during the MS acquisition. Separations were performed on a Waters BEH C18 column (2.1×50 mm, particle size 1.8 μm) using a Waters ACQUITY UPLC System, equipped with an ACQUITY Binary Solvent Manager, and ACQUITY Sample Manager (20 μL sample loop, partial loop injection mode, 5 μL (Cell extracts) or 10 μL (Supernatant) injection volume, 4° C.). Eluents A and B were water and acetonitrile, respectively, both containing 0.1% formic acid. Elution was performed isocratically for 0.1 min at 8% eluent B and then linear gradient 100% eluent B in 6.0 min, and isocratically for 1 min at 100% eluent B. The column was re-equilibrated for 1.5 min. The flow rate was set to 500 μL/min and the column temperature was maintained at 40° C.

### Materials and Methods Example 17: Data Processing for Individual Cannabinoid Analogs in Yeast and Tobacco Suspension Culture Systems.

[0442] Identification of individual cannabinoid analogs was performed, by their corresponding accurate mass shifts by Metabolynx (Waters Corp., Milford, USA). The method parameters for data processing were set as follows: retention time range 0.1-7.5 min, mass range 100-1500 Da, retention time tolerance 0.2 min, mass tolerance 0.05 Da, peak intensity threshold 14. Accurate mass measure of the continuum data was performed using the raffinose lock mass. Raw chromatographic data were additionally processed for extracted ion chromatogram sand peak area integration using Masslynx 4.1 (Waters Corp., Milford, USA). CBGA and CBDA were identified and quantitated using certified reference materials (Cerilliant, Round Rock, Tex.). All chemical structures and physiochemical and constitutional properties were generated using ChemDoodle version 8.1.0 (IChemLabs™, Chesterfield, Va.).

### Materials and Methods Example 18: Spectral Analysis of Water Soluble Cannabinoids Identification of Modified Cannabinoids by Mass Spectrometry.

[0443] The present inventors identified the cannabinoid bio-transformations associated with the gene constructs expressed in tobacco cell suspension and yeast cultures. Based on the predicted glycosylation reactions and empirical information from the chromatographic assays, we predicted the most likely glycosylation events that would occur to the parent molecules CBGA and CBDA along with their physiochemical and constitutional properties (FIGS. 36 and 37, respectively). With this information and through the use of accurate mass measurements, we were able to identify the molecules in the chromatographic analysis and produce extracted ion chromatograms for peak integration as illustrated in FIGS. 38-40. Peak areas for each identified molecule were used for relative quantification between treatments. Based on these results we identified cannabinoid molecules containing up to two glycosides moieties and an O-acetyl glycoside. Summaries of those identifications are presented in Tables 11 and 12 for exemplary cannabinoids CBGA and CBDA respectively.

### Materials and Methods Example 19: Cannabinoid Stability in Solution.

[0444] The present inventors generated a stock solution of the CBD/CBDA+glycosides mixture in water which was further diluted 10× in all treatment solutions. A 10 mL starting volume was used for all treatments, and all treatments were prepared in triplicate. The initial molar concentration of each substrate was as follows: CBD: 1.85 μM; CBDA: 5.83 μM; 1×CBDA Gly: 0.40 μM; and 1×CBD 0-Acetyl Gly: 0.22 μM. Each sample was incubated at room temperature. Samples were stored in 15 mL polypropylene centrifuge tubes. All samples were shielded from light—tubes were wrapped in aluminum foil. Each sample was prepared in triplicate in the following buffers: water only; pH=3; pH=4; pH=7; pH=8; water only +10 mM ascorbic acid; pH=3+10 mM ascorbic acid; pH=4+10 mM ascorbic acid; pH=7+10 mM ascorbic acid; and pH=8+10 mM ascorbic acid.

[0445] Those skilled in the art will appreciate, or be able to ascertain using no more than routine experimentation, further features and advantages of the invention based on the above-described embodiments. Accordingly, the invention is not to be limited by what has been particularly shown and described. All publications and references are herein expressly incorporated by reference in their entirety.

### Tables

TABLE 1
CBGA Biotransformed Products

| | | | | | | Molecular |
|---|---|---|---|---|---|---|
| | RRT to | Expected | Found | Error | Error | Formula |
| Product | Parent | m/z | m/z | (mDa) | (ppm) | [M − H]− |
| R-OH 1 × Glycoside | 0.58 | 537.2700 | 537.2703 | −0.30 | 0.6 | C28H41O10 |
| 2 × Glycoside | 0.59 | 683.3279 | 683.3258 | 2.10 | −3.1 | C34H51O14 |
| 1 × O acetyl Glycoside | 0.73 | 563.2856 | 563.2844 | 1.20 | −2.1 | C30H43O10 |
| 1 × Glycoside #1 | 0.74 | 521.2751 | 521.2734 | 1.70 | −3.3 | C28H41O9 |
| R-OH #1 | 0.80 | 375.2171 | 375.2224 | −5.30 | 14.1 | C22H31O5 |
| 1 × Glycoside #2 | 0.81 | 521.2751 | 521.2727 | 2.40 | −4.6 | C28H41O9 |
| R-OH #2 | 0.81 | 375.2171 | 375.2237 | −6.60 | 17.6 | C22H31O5 |
| R-OH #3 | 0.94 | 375.2171 | 375.2192 | −2.10 | 5.6 | C22H31O5 |
| CBGA | 1.00 | 359.2222 | 359.2245 | −2.30 | 6.4 | C22H31O4 |

RRT Relative Retention Time to Parent Molecule
R-OH Functionalized by addition of O atom

TABLE 2
CBDA Biotransformed Products

| | | | | | | Molecular |
|---|---|---|---|---|---|---|
| | RRT to | Expected | Found | Error | Error | Formula |
| Product | Parent | m/z | m/z | (mDa) | (ppm) | [M − H]− |
| 2 × Glycoside | 0.56 | 681.3122 | 681.3097 | 2.50 | −3.7 | C34H49O14 |
| R-OH 1 × Glycoside | 0.61 | 535.2543 | 535.2599 | −5.60 | 10.5 | C28H39O10 |
| 1 × Glycoside | 0.71 | 519.2601 | 519.2594 | 0.70 | 1.3 | C28H39O9 |
| 1 × O acetyl Glycoside | 0.71 | 561.2700 | 561.2700 | 0.00 | 0 | C30H41O10 |
| R-OH #1 | 0.84 | 373.2015 | 373.2074 | −5.90 | 15.8 | C22H29O5 |
| R-OH #2 | 0.87 | 373.2015 | 373.2034 | −1.90 | 5.1 | C22H29O5 |
| R-OH #3 | 0.96 | 373.2015 | 373.2040 | −2.50 | −8 | C22H29O5 |
| CBDA | 1.00 | 357.2066 | 357.2122 | −5.60 | 15.7 | C22H29O4 |

RRT Relative Retention Time to Parent Molecule
R-OH Functionalized by addition of O atom′

TABLE 3
Forward and reverse primers for RT-PCR of
CYP3A4 and P450 oxidoreductase.

| Sequence | CYP3A4 | P450 oxidoreductase |
|---|---|---|
| Primers | Forward TGCCTAA | Forward |
| for | TAAAGCTCCTCCTACT | GGAAGAGCTTTGGTTCCTATGT |
| RT-PCR | Reverse GCTCCTG | Reverse |
| | AAACAGTTCCATCTC | GCTCCCAATTCAGCAACAATATC |

SEQ ID NO. 9257 represents the forward primer of CYP3A4; SEQ ID NO. 9258 represents the reverse primer of CYP3A4; SEQ ID NO. 9259 represents the forward primer of P450 oxidoreductase; and SEQ ID NO. 9260 represents the reverse primer of P450 oxidoreductase.

TABLE 4
Forward and reverse primers for CBDA synthase,
UGT76G1 and ABCG2.

| Sequence | CBDA synthase | UGT76G1 | ABCG2 |
|---|---|---|---|
| Primers | Forward primer: | Forward primer: | Forward primer: |
| for | ACATCACAATCACACA | GATTGGAAGAACAAGCTT | CCTTCAGGATTGTCAGGA |
| RT-PCR | AAACTAACAAAAG | CAGGATTTCC | GATG |
| | Reverse primer: | Reverse primer: | Reverse primer: |
| | GGCCATAGTTTCTCAT | CCATCCTGAATGAGTCCA | GCAGGTCCATGAAACAT |
| | CAATGG | AAAAGCTC | CAATC |

SEQ ID NO. 9261 represents the forward primer of CBDA synthase; SEQ ID NO. 9262 represents the reverse primer of CBDA synthase; SEQ ID NO. 9263 represents the forward primer of UGT76G1; SEQ ID NO. 9264 represents the reverse primer of UGT76G1; SEQ ID NO. 9265 represents the forward primer of ABCG2; and SEQ ID NO. 9266 represents the reverse primer of ABCG2.

TABLE 5
Trichome-targeted CBDA synthase (CBDAs), Trichome-targeted
UGT and PM-targeted UTR1.

| | | | Plasma |
|---|---|---|---|
| | Trichome-targeted | Trichome-targeted | membrane-targeted |
| Sequence | CBDAs | UGT | UTR1 |
| Primers | Forward primer: | Forward primer: | Forward primer: |
| for | AAAGATCAAAAGCAA | AGTGCTCAACATTCTCCTT | TTGTTCCTTAAACCTCGC |
| RT-PCR | GTTCTTCACTGT | TTGGTT | CTTTGAC |
| | Reverse primer: | Reverse primer: | Reverse primer: |
| | CCATGCAGTTTGGCTA | TCTGAAGCCAACATCAAC | TCATTATGGAGCACTCCA |
| | TGAACATCT | AATTCCA | CTCTCTG |

SEQ ID NO. 9267 represents the forward primer of Trichome-targeted CBDAs; SEQ ID NO. 9268 represents the reverse primer of Trichome-targeted CBDAs; SEQ ID NO. 9269 represents the forward primer of Trichome-targeted UGT; SEQ ID NO. 9270 represents the reverse primer of Trichome-targeted UGT; SEQ ID NO. 9271 represents the forward primer of Plasma membrane-targeted UTRI; and SEQ ID NO. 9272 represents the reverse primer of Plasma membrane-targeted UTRI.

TABLE 6
Cytosolic-targeted CBDA synthase (cytCBDAs),
Cytosolic-targeted UGT (cytUGT).

| | Cytosolic-targeted | Cytosolic- |
|---|---|---|
| Sequence | CBDA synthase | targeted UGT |
| Primers | Forward primer: | Forward primer: |
| for | AAAGATCAAAAGCAAGTTCTTCACTGT | AGAACTGGAAGAATCCGAACTGGAA |
| RT-PCR | Reverse primer: | Reverse primer: |
| | ATAAACTTCTCCAAGGGTAGCTCCG | AAATCATCGGGACACCTTCACAAAC |

SEQ ID NO. 9273 represents the forward primer of Cytosolic-targeted CBDA synthase; SEQ ID NO. 9274 represents the reverse primer of Cytosolic-targeted CBDA synthase; SEQ ID NO. 9275 represents the forward primer of Cytosolic-targeted UGT; and SEQ ID NO. 9275 represents the reverse primer of Cytosolic-targeted UGT.

TABLE 7
Summary of results from glycosylation and functionalization experiments in N. benthamiana leaves.

| | | | | CBGA | | | |
|---|---|---|---|---|---|---|---|
| | | | CBGA | glycoside + | | CBDA | CBDA |
| | | CBGA | glycoside | acetylated | CBDA | glycoside | Hydroxyl |
| Agrobacterium | Substrate | (relative | (relative | (relative | (relative | (relative | (relative |
| Constructs | fed | amount) | amount) | amount) | amount) | amount) | amount) |
| Trichome CBDA | CBGA | + | + | + | + | ND | ND |
| synthase + trichome | | | | | | | |
| glycosyltransferase + | | | | | | | |
| PM-UTR1) + | | | | | | | |
| Myb/catalase* + P19 | | | | | | | |
| silencing supressor* | | | | | | | |
| Cytosolic CBDA | CBGA | + | +++ | +++ | +++ | ND | ND |
| synthase, | | | | | | | |
| glycosyltransferase and | | | | | | | |
| plasma membrane ABC | | | | | | | |
| transporter) + | | | | | | | |
| Myb/catalase + P19 | | | | | | | |
| silencing suppressor | | | | | | | |
| 201-SUS (cytosolic | CBGA | + | +++ | ++++ | + | + | + |
| CBDA synthase, | | | | | | | |
| glycosyltransferase and | | | | | | | |
| plasma membrane ABC | | | | | | | |
| transporter) | | | | | | | |
| CYP3A4 + oxidoreductase | CBDA | ND | + | ND | +++ | +++++ | +++++ |
| (cytochrome P450 with | | | | | | | |
| P450 oxidoreductase) | | | | | | | |
| Cytosolic CBDA | CBGA | ++++ | +++++ | +++++ | ND | ++ | ++ |
| synthase + cytosolic | | | | | | | |
| glycosyltransferase + | | | | | | | |
| Myb/catalase* + P19 | | | | | | | |
| silencing suppressor* | | | | | | | |
| P450/ | CBGA | + | ++++ | + | ND | ++ | ++ |
| MYBcatalase/cytosolic | | | | | | | |
| CBDA synthase, | | | | | | | |
| glycosyltransferase and | | | | | | | |
| plasma membrane ABC | | | | | | | |
| transporter | | | | | | | |
| No agrobacterium | CBGA | + | + | + | ND | ND | ND |
| (negative control) | | | | | | | |

*Co-infiltration with and without construct was tested in different replicates

TABLE 8
Summary of results from glycosylation and functionalization experiments
in Cannabis sativa leaves.

| | | CBDA | CBDA |
|---|---|---|---|
| | CBDA | glycoside | Hydroxyl |
| | (relative | (relative | (relative |
| Agrobacterium Constructs | amount) | amount) | amount) |
| Trichome CBDA synthase + trichome | ++ | trace | trace |
| glycosyltransferase + plasma | | | |
| membrane-targeted sugar transporter) + | | | |
| Myb/catalase | | | |
| cytosolic CBDA synthase, cytosolic glycosyltransferase + Myb/catalase | +++ | ++++ | +++++ |
| 201-SUS (cytosolic CBDA synthase, | ++ | ++ | ++ |
| glycosyltransferase and plasma | | | |
| membrane ABC transporter) | | | |

TABLE 9
Exemplary Glycosyltransferase sequence identification

| SEQ ID NO. | Name | Organism | Type |
|---|---|---|---|
| SEQ ID NO. 9207 | NtGT5a | Nicotiana tabacum | Amino Acid |
| SEQ ID NO. 9208 | NtGT5a | Nicotiana tabacum | DNA |
| SEQ ID NO. 9209 | NtGT5b | Nicotiana tabacum | Amino Acid |
| SEQ ID NO. 9210 | NtGT5b | Nicotiana tabacum | DNA |
| SEQ ID NO. 9211 | NtGT4 | Nicotiana tabacum | Amino Acid |
| SEQ ID NO. 9212 | NtGT4 | Nicotiana tabacum | DNA |
| SEQ ID NO. 9213 | NtGT1b | Nicotiana tabacum | Amino Acid |
| SEQ ID NO. 9214 | NtGT1b | Nicotiana tabacum | DNA |
| SEQ ID NO. 9215 | NtGT1a | Nicotiana tabacum | Amino Acid |
| SEQ ID NO. 9216 | NtGT1a | Nicotiana tabacum | DNA |
| SEQ ID NO. 9217 | NtGT3 | Nicotiana tabacum | Amino Acid |
| SEQ ID NO. 9218 | NtGT3 | Nicotiana tabacum | DNA |
| SEQ ID NO. 9219 | NtGT2 | Nicotiana tabacum | Amino Acid |
| SEQ ID NO. 9220 | NtGT2 | Nicotiana tabacum | DNA |

TABLE 10
Cannabinoid production cellular compartmentalization models. Different shaded
columns and rows correspond to different exemplary expression constructs used.

| | | | | | | Catalase to |
|---|---|---|---|---|---|---|
| Cannabinoid | | | | | Myb | degrade |
| production/ | | UDP | Cannabinoid | UDP | transcription | H₂O₂ |
| accumulation | CBDA | glycosyl | ABC | glucose | factor for | from CBDA |
| system | Synthase | transferase | transporter | transporter | cannabinoids | Synthase |
| Cytoplasmic | Minus | Required but | No gene | No gene | Express | Express |
| accumulation | trichome | no targeting | required | required | | |
| | target | change | | | | |
| | sequence | | | | | |
| Trichome | No change | Add | No gene | Target to | Express | Express |
| (low pH) | | trichome | required | plasma | | |
| synthesis | | target | | membrane | | |
| | | sequence | | | | |
| Cell | Minus | Required but | Target to | No gene | Express | Express |
| suspension | trichome | no targeting | plasma | required | | |
| cultures | target | change | membrane | | | |
| | sequence | | (PM) | | | |

TABLE 11
CBDA Biotransformed Products

| | | | | | | Molecular |
|---|---|---|---|---|---|---|
| | RRT to | Expected | Found | Error | Error | Formula |
| Product | Parent | m/z | m/z | (mDa) | (ppm) | [M − H]− |
| 1 × Glycoside | 0.72 | 521.2751 | 521.2700 | −5.1 | −9.8 | C28H41O9 |
| CBGA | 1.00 | 359.2222 | 359.2190 | −3.2 | −8.9 | C22H31O4 |

RRT Relative Retention Time to Parent Molecule

TABLE 12
CBDA Biotransformed Products

| | | | | | | Molecular |
|---|---|---|---|---|---|---|
| | RRT to | Expected | Found | Error | Error | Formula |
| Product | Parent | m/z | m/z | (mDa) | (ppm) | [M − H]− |
| 2 × Glycoside | 0.52 | 681.3122 | 681.3076 | −4.76 | −6.8 | C34H49O14 |
| 1 × Glycoside #1 | 0.67 | 519.2594 | 519.2583 | −1.1 | −2.1 | C28H39O9 |
| 1 × O acetyl Glycoside | 0.68 | 561.2700 | 561.2653 | −4.7 | −8.4 | C30H41O10 |
| 1 × Glycoside #2 | 0.80 | 519.2594 | 519.2681 | 8.8 | 16.7 | C28H39O9 |
| CBDA | 1.00 | 357.2066 | 357.2091 | 2.5 | 7.0 | C22H29O4 |

RRT Relative Retention Time to Parent Molecule

[0447] Based on the reduced retention time in the HPLC gradient. The glycosylated cannabinoids, which eluted earlier than their non-modified forms, are demonstrated to be more water-soluble than their non-modified forms.

TABLE 13
RT-PCR primers for confirmation of gene
expression in transgenic intracellular
Pichia and tobacco cultures.

| Target | | |
|---|---|---|
| gene | Forward primer | Reverse primer |
| NtGT1 | ATGAAAACAACAGAACTTG | TGAAGTTGTAGGCCTAGCA |
| | TCTTCA | TGG |
| NtGT2 | ATGGTTCAACCACACGTCT | TTGAATACACCAGTTGGGG |
| | TACTGG | TCG |
| NtGT3 | ATGAAAGAGACTAAAAAAA | CATCACGCAGATTTTGAAT |
| | TTGAGT | ATGG |
| NtGT4 | ATGGCTACTCAGGTGCATA | GGCCTTAGTTAGCTCGACA |
| | AATTGC | CGG |
| NtGT5 | ATGGGCTCTATCGGTGCAG | CGGGGATGAAGTCCAAGGT |
| | AACTAA | TGT |
| Kat-E | ATGTCTCAACATAACGAGA | CGTAGCAAATCCCCTGATG |
| | AAAACC | TCT |
| UGT76G1 | ATGGAGAACAAAACCGAGA | CCTTTAGCATGGGAAAACC |
| | CAACCG | GGA |
| UGT76G1 | GATTGGAAGAACAAGCTTC | CCATCCTGAATGAGTCCAA |
| (for | AGGATTTCC | AAAGCTC |
| tobacco | | |
| BY2 | | |
| cells) | | |
| ABCG2 | CCTTCAGGATTGTCAGGAG | GCAGGTCCATGAAACATCA |
| (for | ATG | ATC |
| tobacco | | |
| BY2 | | |
| cells) | | |

SEQ. ID NO. 9277 represents the forward primer of NtGT1; SEQ. ID NO. 9278 represents the reverse primer of NtGT1; SEQ. ID NO. 9279 represents the forward primer of NtGT2; SEQ. ID NO. 9280 represents the reverse primer of NtGT2; SEQ. ID NO. 9281 represents the forward primer of NtGT3; SEQ. ID NO. 9282 represents the reverse primer of NtGT3; SEQ. ID NO. 9283 represents the forward primer of NtGT4; SEQ. ID NO. 9284 represents the reverse primer of NtGT4; SEQ. ID NO. 9285repre5ent5 the forward primer of NtGT5; SEQ. ID NO. 9286 represents the reverse primer of NtGT5; SEQ. ID NO. 9287 represents the forward primer for Kat-E; SEQ. ID NO. 9288 represents the reverse primer for Kat-E; SEQ. ID NO. 9289 represents the forward primer of UGT76G1; SEQ. ID NO. 9290 represents the reverse primer of UGT76G1; SEQ. ID NO. 9291 represents the forward primer of UGT76G1 (for tobacco BY2 cells); SEQ. ID NO. 9292 represents the reverse primer of UGT76G1 (for tobacco BY2 cells); SEQ. ID NO. 9293 represents the forward primer of ABCG2 (for tobacco BY2 cells); and SEQ. ID NO. 9294 represents the reverse primer of ABCG2 (for tobacco BY2 cells).

TABLE 14
Day 0 time course incubation of unmodified, glycosylated,
and acetylated cannabinoid glycoside compounds in solution.

| Day 0 (ug/mL) | CBD | CBDA | 1X CBDA Gly | 1X CBD O-Acetyl Gly |
|---|---|---|---|---|
| Water | 399.81 ± 111.06 | 1689.45 ± 345.00 | 230.85 ± 36.38 | 137.46 ± 35.49 |
| pH = 3 | 568.71 ± 115.90 | 2278.25 ± 279.51 | 217.58 ± 45.40 | 126.49 ± 43.90 |
| pH = 4 | 505.97 ± 5.10 | 1941.33 ± 141.84 | 179.48 ± 20.25 | 101.60 ± 31.49 |
| pH = 7 | 528.04 ± 91.17 | 2098.05 ± 71.62 | 199.19 ± 24.03 | 107.55 ± 20.03 |
| pH = 8 | 513.35 ± 39.23 | 1907.82 ± 81.03 | 190.06 ± 16.22 | 108.41 ± 12.42 |
| Water + AA | 551.85 ± 86.83 | 1925.54 ± 266.50 | 198.81 ± 27.15 | 102.24 ± 12.18 |
| pH = 3 + AA | 565.75 ± 40.96 | 2099.04 ± 78.79 | 190.77 ± 3.98 | 110.44 ± 13.31 |
| pH = 4 + AA | 524.40 ± 34.95 | 1928.33 ± 22.80 | 190.28 ± 14.45 | 118.27 ± 1.16 |
| pH = 7 + AA | 500.03 ± 21.45 | 1956.80 ± 114.66 | 185.33 ± 28.89 | 108.19 ± 19.12 |
| pH = 8 + AA | 1136.36 ± 996.36 | 3072.96 ± 1630.46 | 315.93 ± 180.23 | 137.53 ± 6.71 |

TABLE 15
Day 1 time course incubation of unmodified, glycosylated,
and acetylated cannabinoid glycoside compounds in solution.

| Day 1 (ug/mL) | CBD | CBDA | 1X CBDA Gly | 1X CBD Gly | 1X CBD O-Acetyl Gly |
|---|---|---|---|---|---|
| Water | 629.00 ± 383.79 | 2132.80 ± 1412.98 | 205.52 ± 198.82 | 1.20 ± 21.68 | 136.86 ± 139.68 |
| pH = 3 | 713.93 ± 41.47 | 2550.09 ± 85.93 | 299.02 ± 9.63 | 8.83 ± 1.80 | 216.46 ± 9.61 |
| pH = 4 | 380.77 ± 233.10 | 1504.66 ± 600.27 | 177.59 ± 62.72 | below LOQ | 150.94 ± 27.25 |
| pH = 7 | 880.54 ± 5.87 | 2577.70 ± 0.44 | 345.49 ± 23.25 | 15.45 ± 0.07 | 250.75 ± 6.23 |
| pH = 8 | 747.61 ± 101.87 | 2572.31 ± 140.62 | 326.74 ± 21.82 | 12.86 ± 4.15 | 221.10 ± 16.30 |
| Water + AA | 428.63 ± 198.77 | 1765.03 ± 561.85 | 246.74 ± 47.28 | 7.99 ± 4.17 | 204.63 ± 24.09 |
| pH = 3 + AA | 650.49 ± 12.10 | 2330.65 ± 45.55 | 283.54 ± 46.51 | 9.78 ± 5.27 | 223.32 ± 48.67 |
| pH = 4 + AA | 406.17 ± 210.69 | 1614.31 ± 504.29 | 230.30 ± 51.72 | 5.82 ± 3.11 | 198.56 ± 24.37 |
| pH = 7 + AA | 505.88 ± 276.58 | 1944.55 ± 741.75 | 249.00 ± 83.03 | 5.73 ± 4.70 | 185.02 ± 35.46 |
| pH = 8 + AA | 291.15 ± 78.65 | 1331.89 ± 302.72 | 195.97 ± 48.06 | 1.04 ± 4.15 | 180.83 ± 33.60 |

TABLE 16
Day 4 time course incubation of unmodified, glycosylated,
and acetylated cannabinoid glycoside compounds in solution.

| Day 4 (ug/mL) | CBD | CBDA | 1X CBDA Gly | 1X CBD Gly | 1X CBD O-Acetyl Gly |
|---|---|---|---|---|---|
| Water | 432.54 ± 251.39 | 348.83 ± 126.90 | 50.55 ± 10.85 | 15.11 ± 10.77 | 160.23 ± 23.75 |
| pH = 3 | 191.94 ± 55.68 | 215.62 ± 28.65 | 35.62 ± 8.29 | 18.94 ± 4.88 | 174.88 ± 14.16 |
| pH = 4 | 278.33 ± 85.33 | 264.51 ± 58.26 | 65.29 ± 9.09 | 29.03 ± 8.17 | 225.84 ± 39.59 |
| pH = 7 | 539.55 ± 260.69 | 373.85 ± 102.13 | 51.73 ± 7.48 | 19.64 ± 3.44 | 190.05 ± 24.38 |
| pH = 8 | 560.90 ± 69.27 | 461.23 ± 80.64 | 61.23 ± 21.53 | 26.99 ± 15.29 | 174.09 ± 59.87 |
| Water + AA | 182.66 ± 25.03 | 197.39 ± 11.23 | 33.74 ± 8.21 | 17.55 ± 5.99 | 153.06 ± 28.19 |
| pH = 3 + AA | 232.39 ± 113.88 | 217.83 ± 61.23 | 31.98 ± 6.06 | 17.99 ± 4.60 | 157.19 ± 1.58 |
| pH = 4 + AA | 305.20 ± 97.35 | 267.13 ± 59.52 | 40.84 ± 3.72 | 17.02 ± 5.68 | 144.44 ± 18.85 |
| pH = 7 + AA | 398.16 ± 391.86 | 286.12 ± 150.45 | 41.31 ± 15.16 | 19.96 ± 9.83 | 176.48 ± 33.58 |
| pH = 8 + AA | 173.43 ± 17.53 | 182.43 ± 4.69 | 35.59 ± 2.84 | 15.86 ± 2.63 | 152.03 ± 5.79 |

TABLE 17
Day 5 time course incubation of unmodified, glycosylated,
and acetylated cannabinoid glycoside compounds in solution.

| Day 5 (ug/ml) | CBD | CBDA | 1X CBDA Gly | 1X CBD Gly | 1X CBD O-Acetyl Gly |
|---|---|---|---|---|---|
| Water | 466.09 ± 130.53 | 232.98 ± 82.28 | 27.85 ± 10.52 | 14.60 ± 1.31 | 131.77 ± 33.91 |
| pH = 3 | 330.79 ± 138.28 | 151.00 ± 27.30 | 14.46 ± 6.76 | 18.00 ± 0.59 | 83.72 ± 35.56 |
| pH = 4 | 510.50 ± 76.06 | 166.21 ± 10.23 | 33.83 ± 4.89 | 18.26 ± 0.52 | 164.84 ± 35.61 |
| pH = 7 | 593.92 ± 6.30 | 214.85 ± 24.56 | 36.02 ± 8.21 | 17.50 ± 1.63 | 186.93 ± 5.65 |
| pH = 8 | 498.21 ± 92.88 | 324.72 ± 32.71 | 37.06 ± 3.83 | 19.73 ± 0.55 | 162.75 ± 31.35 |
| Water + AA | 448.64 ± 33.51 | 134.25 ± 11.78 | 18.19 ± 2.31 | 19.70 ± 0.80 | 146.60 ± 10.68 |
| pH = 3 + AA | 320.48 ± 92.87 | 119.25 ± 35.92 | 13.83 ± 7.04 | 19.29 ± 3.26 | 97.81 ± 29.67 |
| pH = 4 + AA | 366.65 ± 92.35 | 141.46 ± 34.95 | 17.99 ± 5.54 | 19.34 ± 1.90 | 113.89 ± 31.15 |
| pH = 7 + AA | 353.25 ± 135.11 | 160.93 ± 99.51 | 18.25 ± 14.93 | 19.05 ± 3.91 | 110.66 ± 48.12 |
| pH = 8 + AA | 287.24 ± 39.56 | 110.83 ± 6.09 | 12.07 ± 2.03 | 20.14 ± 1.73 | 92.06 ± 15.47 |

TABLE 18
Day 6 time course incubation of unmodified, glycosylated,
and acetylated cannabinoid glycoside compounds in solution.

| Day 6 (ug/mL) | CBD | CBDA | 1X CBDA Gly | 1X CBD Gly | 1X CBD O-Acetyl Gly |
|---|---|---|---|---|---|
| Water | 179.13 ± 17.88 | 177.27 ± 31.31 | 24.40 ± 9.39 | 8.56 ± 7.04 | 148.36 ± 33.57 |
| pH = 3 | 607.98 ± 416.07 | 299.37 ± 129.48 | 29.72 ± 11.20 | 21.59 ± 7.97 | 175.06 ± 31.37 |
| pH = 4 | 897.52 ± 65.92 | 437.55 ± 32.34 | 47.69 ± 7.79 | 32.87 ± 8.08 | 231.03 ± 36.34 |
| pH = 7 | 1115.01 ± 169.64 | 516.99 ± 40.18 | 67.01 ± 7.94 | 46.80 ± 10.12 | 267.45 ± 30.83 |
| pH = 8 | 911.61 ± 84.17 | 492.64 ± 27.37 | 62.45 ± 1.31 | 44.10 ± 3.45 | 218.64 ± 22.05 |
| Water + AA | 957.17 ± 315.70 | 446.90 ± 93.03 | 46.98 ± 17.51 | 34.98 ± 9.28 | 200.20 ± 37.42 |
| pH = 3 + AA | 801.14 ± 230.88 | 407.88 ± 70.00 | 37.19 ± 11.66 | 27.67 ± 9.51 | 190.69 ± 36.71 |
| pH = 4 + AA | 777.26 ± 56.02 | 408.97 ± 19.32 | 41.59 ± 4.42 | 31.67 ± 4.29 | 215.72 ± 16.69 |
| pH = 7 + AA | 828.02 ± 269.38 | 448.43 ± 75.60 | 47.26 ± 13.89 | 30.43 ± 4.82 | 205.61 ± 26.64 |
| pH = 8 + AA | 847.26 ± 88.56 | 439.50 ± 16.67 | 46.68 ± 2.47 | 32.97 ± 1.31 | 217.66 ± 11.23 |

TABLE 19
Day 7 time course incubation of unmodified, glycosylated,
and acetylated cannabinoid glycoside compounds in solution.

| Day 7 (μg/mL) | CBD | CBDA | 1X CBDA Gly | 1X CBD Gly | 1X CBD O-Acetyl Gly |
|---|---|---|---|---|---|
| Water | 680.13 ± 229.24 | 373.94 ± 53.04 | 43.73 ± 8.52 | 23.89 ± 5.27 | 185.62 ± 22.87 |
| pH = 3 | 563.80 ± 65.50 | 320.95 ± 26.33 | 35.76 ± 6.26 | 27.06 ± 4.05 | 195.77 ± 15.07 |
| pH = 4 | 641.86 ± 33.49 | 335.80 ± 1.93 | 41.68 ± 3.18 | 26.96 ± 0.46 | 201.23 ± 6.99 |
| pH = 7 | 544.28 ± 57.97 | 312.75 ± 23.38 | 38.14 ± 5.56 | 22.14 ± 6.83 | 187.10 ± 28.07 |
| pH = 8 | 580.54 ± 94.41 | 341.39 ± 18.75 | 45.78 ± 9.19 | 32.42 ± 8.76 | 193.61 ± 21.84 |
| Water + AA | 592.44 ± 87.97 | 303.62 ± 20.47 | 36.23 ± 7.46 | 24.99 ± 7.29 | 167.42 ± 22.79 |
| pH = 3 + AA | 464.35 ± 105.43 | 291.96 ± 59.24 | 27.10 ± 1.76 | 19.38 ± 0.46 | 147.21 ± 8.07 |
| pH = 4 + AA | 557.34 ± 60.39 | 321.77 ± 18.46 | 33.65 ± 4.13 | 23.30 ± 3.95 | 166.23 ± 17.10 |
| pH = 7 + AA | 549.93 ± 39.69 | 342.03 ± 11.62 | 40.31 ± 2.01 | 39.57 ± 4.63 | 157.89 ± 17.21 |
| pH = 8 + AA | 630.99 ± 2.44 | 367.78 ± 11.21 | 45.19 ± 2.45 | 37.93 ± 2.89 | 181.76 ± 29.53 |

### REFERENCES

[0448] The following references are hereby incorporated in their entirety by reference:
[0449] [1] I von Ossowski, M R Mulvey, P A Leco, A Borys and P C Loewen, J. Bacteriol. 1991, 173(2):514.
[0450] [2] Behera, A., Behera, A., Mishra, S. C., Swain, S. K., & Author, C. (2003). Cannabinoid glycosides: In vitro production of a new class of cannabinoids with improved physicochemical properties. Proc. Intl. Soc. Mag. Reson. Med (Vol. 14).
[0451] [3] Holland, M. L., Lau, D. T. T., Allen, J. D., & Arnold, J. C. (2009). The multidrug transporter ABCG2 (BCRP) is inhibited by plant-derived cannabinoids. British Journal of Pharmacology, 152(5), 815-824. https://doi.org/10.1038/sj.bjp.0707467
[0452] [4] Ivanchenco. M., Vejlupkova. Z., Quatrano. R. S., Fowler. J. E. (2000) Maize ROP7 GTPase contains a unique, CaaX box-independent plasma membrane targeting signal. The Plant Journal, (24)1, 79-90.
[0453] [5] James M. Rini and Jeffrey D. Esko. Glycosyltransferases and Glycan-Processing Enzymes. In: Essentials of Glycobiology [Internet]. 3rd edition. https://www.ncbi.nlm.nih.gov/books/NBK310274/?report=reader
[0454] [6] Marks, M. D., Tian, L., Wenger, J. P., Omburo, S. N., Soto-Fuentes, W., He, J., . . . Dixon, R. A. (2009). Identification of candidate genes affecting Δ9-tetrahydrocannabinol biosynthesis in Cannabis sativa. Journal of Experimental Botany, 60(13), 3715-3726. https://doi.org/10.1093/jxb/erp210
[0455] [7] Nagaya, S., Kawamura, K., Shinmyo, A., & Kato, K. (2010). The HSP terminator of Arabidopsis thaliana increases gene expression in plant cells. Plant and Cell Physiology, 51(2), 328-332. https://doi.org/10.1093/pcp/pcp188
[0456] [8] Norambuena, L., Marchant, L., Berninsone, P., Hirschberg, C. B., Silva, H., & Orellana, A. (2002). Transport of UDP-galactose in plants. Identification and functional characterization of AtUTr1, an Arabidopsis thaliana UDP-galactose/UDP-glucose transporter. Journal of Biological Chemistry, 277(36), 32923-32929. https://doi.org/10.1074/jbc.M204081200
[0457] [9] Onofri, C., De Meijer, E. P. M., & Mandolino, G. (2015). Sequence heterogeneity of cannabidiolic- and tetrahydrocannabinolic acid-synthase in Cannabis sativa L. and its relationship with chemical phenotype. Phytochemistry, 116(1), 57-68. https://doi.org/10.1016/j.phytochem.2015.03.006
[0458] [9] Priest, D. M., Ambrose, S. J., Vaistij, F. E., Elias, L., Higgins, G. S., Ross, A. R. S., . . . Bowles, D. J. (2006). Use of the glucosyltransferase UGT71B6 to disturb abscisic acid homeostasis in Arabidopsis thaliana. Plant Journal, 46(3), 492-502. https://doi.org/10.1111/j 0.1365-313X.2006.02701.x
[0459] [10] Siritunga, D., and Sayre, R. T. (2003). Generation of cyanogen-free transgenic cassava. Planta 217, 367-373. doi: 10.1007/s00425-003-1005-8
[0460] [11] Sparkes, I. A., Runions, J., Kearns, A., & Hawes, C. (2006). Rapid, transient expression of fluorescent fusion proteins in tobacco plants and generation of stably transformed plants. Nature Protocols, 1(4), 2019-2025. https://doi.org/10.1038/nprot.2006.286
[0461] [13] Taura, F., Morimoto, S., & Shoyama, Y. (1996). Purification and characterization of cannabidiolic-acid synthase from Cannabis sativa L. Biochemical analysis of a novel enzyme that catalyzes the oxidocyclization of. Journal of Biological Chemistry, 27/(29), 17411-17416. https://doi.org/10.1074/JBC.271.29.17411
[0462] [14] Taura, F., Sirikantaramas, S., Shoyama Y, Yoshikai K, Shoyama Y, Morimoto S. (2007) Cannabidiolic-acid synthase, the chemotype-determining enzyme in the fiber-type Cannabis sativa. Febbs letters, 581(16), 2929-34. DOI:10.1016/j.febslet.2007.05.043
[0463] [15] Yoo, S. D., Cho, Y. H., & Sheen, J. (2007). Arabidopsis mesophyll protoplasts: A versatile cell system for transient gene expression analysis. Nature Protocols, 2(7), 1565-1572. https://doi.org/10.1038/nprot.2007.199
[0464] [16] Matsui, T., Matsuura, H., Sawada, K., Takita, E., Kinjo, S., Takenami, S., . . . Kato, K. (2012). High level expression of transgenes by use of 5′-untranslated region of the Arabidopsis thaliana arabinogalactan-protein 21 gene in dicotyledons. Plant Biotechnology, 29(3), 319-322. https://doi.org/10.5511/plantbiotechnology.12.0322a
[0465] [17] Murashige, T., and Skoog, F. (1962). A revised medium for rapid growth and bioassays with tobacco tissue culture. Physiol. Plant. 15, 473-497. doi: 10.1111/j.1399-3054.1962.tb08052.x
[0466] [18] Zipp, et al., Cannabinoid glycosides: In vitro production of a new class of cannabinoids with improved physicochemical properties. bioRxiv preprint doi: http://dx.doi.org/10.1101/104349
[0467] [19] Mohamed, E. A., T. Iwaki, I. Munir, M. Tamoi, S. Shigeoka, and A. Wadano. 2003. Overexpression of bacterial catalase in tomato leaf chloroplasts enhances photo-oxidative stress tolerance. Plant Cell Environ. 26:2037-2046.
[0468] [20] Akhtar, M. T., 2013, Doctoral Thesis, Leiden University. Cannabinoids and zebrafish. 2013-05-22. http://hdl.handle.net/1887/20899
[0469] [21] Sayed Farag. Cannabinoids production in Cannabis sativa L.: An in vitro approach. Thesis ⋅ January 2014. DOI: 10.17877/DE290R-16298
[0470] [21] K, Watanabe, et al., Cytochrome P450 enzymes involved in the metabolism of tetrahydrocannabinols and cannabinol by human hepatic microsomes. Life Sciences. Volume 80, Issue 15, 20 Mar. 2007, Pages 1415-1419
[0471] [22] Flores-Sanchez I J. et al., Elicitation studies in cell suspension cultures of Cannabis sativa L. J Biotechnol. 2009 Aug. 20; 143(2):157-68. doi: 10.1016/j.jbiotec.
[0472] [23] Stephen M. Stout & Nina M. Cimino (2013) Exogenous cannabinoids as substrates, inhibitors, and inducers of human drug metabolizing enzymes: a systematic review, Drug Metabolism Reviews, 46:1, 86-95, DOI: 10.3109/03602532.2013.849268
[0473] [24] Andre C M, Hausman J-F, Guerriero G. Cannabis sativa: The Plant of the Thousand and One Molecules. Frontiers in Plant Science. 2016; 7:19. doi:10.3389/fpls.2016.00019.
[0474] [25] Mahlberg Pl. et al., Accumulation of Cannabinoids in Glandular Trichomes of Cannabis (Cannabaceae). Journal of Industrial Hemp 9(1):15-36 ⋅ June 2004 with 273 Reads DOI: 10.1300/J237v09n01_04.
[0475] [25] Katalin S., et al., Mini Rev Med Chem. 2017; 17(13):1223-1291. doi: 10.2174/1389557516666161004162133.
[0476] [26] Sirikantaramas S., et al., Tetrahydrocannabinolic Acid Synthase, the Enzyme Controlling Marijuana Psychoactivity, is Secreted into the Storage Cavity of the Glandular Trichomes. Plant and Cell Physiology, Volume 46, Issue 9, 1 Sep. 2005, Pages 1578-1582, https://doi.org/10.1093/pcp/pci166.
[0477] [26] Schilmiller A L, Last R L, Pichersky E (2008) Harnessing plant trichome biochemistry for the production of useful compounds. Plant Journal 54: 702-711.
[0478] [27] Matias-Hernandez, L. et al. AaMYB1 and its orthologue AtMYB61 affect terpene metabolism and trichome development in Artemisia annua and Arabidopsis thaliana. Plant J.
[0479] [28] Ahmad, M., Hirz, M., Pichler, H., & Schwab, H. (2014). Protein expression in Pichia pastoris: Recent achievements and perspectives for heterologous protein production. Applied Microbiology and Biotechnology, 98(12), 5301-5317..
[0480] [29] Cregg, J. M., Cereghino, J. L., Shi, J., & Higgins, D. R. (2000). Recombinant Protein Expression in Pichia pastoris. Molecular Biotechnology, 16(1), 23-52..
[0481] [30] Ellis, S. B., Brust, P. F., Koutz, P. J., Waters, A. N. N. F., Harpold, M. M., Gingeras, T. R., & Al, E. E. T. (1985). Isolation of Alcohol Oxidase and Two Other Methanol Regulatable Genes from the Yeast Pichia pastoris, 5(5), 1111-1121.
[0482] [31] Santos, R. B., Abranches, R., Fischer, R., Sack, M., & Holland, T. (2016). Putting the Spotlight Back on Plant Suspension Cultures. Frontiers in Plant Science, 7 (March), 1-12.
[0483] [32] Nagata, T., Nemoto, Y., and Hasezawa, S. (1992). Tobacco BY-2 cell line as the “HeLa” cell in the cell biology of higher plants. Int. Rev. Cytol. 132, 1-30. doi: 10.1016/S0074-7696(08)62452-3

The application's sequence listing, which the Patent Office published only in electronic form, follows.

SEQUENCE LISTING (9294 sequences)

SEQ ID NO: 1 - protein, 256 aa, Unknown
  Description of Unknown: Fusobacterium necrophorum sequence
MSLSVAMITYNEEKILEKTLRSIADLANEIVIVDSGSTDGTREIAEKYGAKFVHQNWLGYGPQRNKAIQLCQSEWILNIDADEEISPKLYDKIQKILQEPVKYKVYKISFTSVCFGKKIYHGGWSGAKKVRLFYRGSGAFNHNTVHEEFETLEEIGSLQEEIFHHSYVNLEDYFTKFNRYTTEGAKDAFQKRKKVGALKIVLEPFYKFIRMYFFRLGFLDGLEGFVLANTSAMYSMVKYYKLHELYEREKESHGSS

SEQ ID NO: 2 - protein, 256 aa, Unknown
  Description of Unknown: Flavobacterium sp. 270 sequence
MNKEKQKLSVLIITLNEELHIQSLLEDLDFADEIIVVDSFSNDKTVSIIEGFQNVKLIQNKFVNYTSQRNFALDQAKYSWILFLDADERLTPDLKSEILSKINDSNPASAYLIYRIFMFKNVKLNFSGWQTDKIFRLFNKSKCRYAEERFVHEKLNVDGTIAVLKHKLIHYSYADYADYKLKMKNYGILKAQEKQKKGQKSSFLLMAFHPLYSFLYRFLIRLGFLDGIKGIIICYLNAYSIFIRYKELRRLTSSRI

SEQ ID NO: 3 - protein, 274 aa, Cystobacter fuscus
MIGPDNPRVLLSAAVMTKDSLRTLPECLDSLDFCDEIVVVDDHSTDGTWEYLQSRGAKVRAFQRKLDTFASHRRAMCAQARGEWVLIVDADEKALPGLGEEIRALLGRGSPRHDAYHVPQKNTLPDHWPRPVYFWTSQKRLLRLAKVRWEDSEWIHVPALHEGKAGRLEHGLSHRSYDSVSHLLRKQISYAQSGAKHFHARGRRASLASAVSHTVGAFFKFYLLKGLCRFGMGGLTVATALAFHVFAKYALLWEMNSGRASAGERARVPGDTHV

SEQ ID NO: 4 - protein, 251 aa, Unknown
  Description of Unknown: Sphingobacterium faecium sequence
MNQKLSALVITYNEEKNILDVIKCLDFANEIIIVDSFSDDQTVTLAKKNPKVRVYQHKFEDFTKQRNLAISYATNDWILFLDADERLTVPLQKEIQNIINDSTAHDAYYVYRTFFFCNKKIRFSGTQNDKNFRLFRKSKAKYRELKKVHETLDVNGTIGILKHKILHYSFSDYQSYKNKMIHYGILKGQELQLSHKKYNLVTHIAKTSFKFFKAYIIKLGILDGKEGWEISYLQSLSVHHTYLSLKRKKQI

SEQ ID NO: 5 - protein, 676 aa, Halovibrio sp.
MPTPAPARIGSFVFSALFLVTLTGGLIVDSLLSGGVYLLSLCGLVLIGYSRLRGRRPIATGDREVKLIGFALAFFAVVSLASWVINGFGYEGFKDLGKHGRLLLFWPLFIIFSWTRLKDTALFWGLALASMAAGLIAVEHTMWGVSGGRAEGATNPIPFGNLSLLLGTMLLAVLPVLRRERLWGGALAALAAIFFAFTAAYLSGTRNNLIAFPVLLLFLIIAGKPHQRWLSGALGGLTLALFVGLDSRMSSGFSGLLGGMVDNGIQFRFDIWQKALKLFLEAPILGVGSQGYADAIHQGVASGNLNEGLIGCCDNHAHNDLLQVLATRGLLGALSWSLLLLIPFVQFARLTRHENGRVSAMATAGCLIPLAYLLFGLTEATFMRGIYLSFYLLTVTTLTYVVWRTVAENLQGRREQYLSTIIITYNEADNIRDCLASVQPVSDEIIVVDSGSTDETVTIAKEFTDNITVTDWPGFGLQKQRALEQASGDWVLSIDADERLTSYLAREINHELSHQPRADAYKLPWAVTLYGKRLDFGRSGRAPLRLFRREGVRFSDAMVHEKILLPEGRRTVTLRGRLTHYTHRDFGHALEKSAKYAWLGAQERYRKGRRTKTLIYPTFRAIVTFVQVYILRLGFLDGPVGFLVAMTYTQGAFNKYAGLWTLTRAESTKPRGKTAK

SEQ ID NO: 6 - protein, 257 aa, Prevotella dentasini
MEKKDISVVINTYNAEKFLQRVLDSVRGFDEVVVCDMESTDHTVEIARRNGCKVVTFPNNHVCAEPARTFAIQSAQGKWVLVVDADELVTPELKDYLYGRINRPDCPEGLYIPRRNRFMNIMKKGLPKDYQLRFFIREGTVWPPYVHTFPQVKGRTEYIDNHLKNVVLVHLIENYIDDRLEKYNRYTTGEVEKKKGKRYGVGALLFRPFWRFFKSYFMDGEIRNGITGFIDSVMTGFYQFILVAKVIEHRLKEKDER

SEQ ID NO: 7 - protein, 422 aa, Cellulosilyticum ruminicola
MKLSLCIICKNEEKKIARCINSVKEKVDEIIVVDTGSTDETIQIVKKLGAKVFEIPWENDFSKARNYAIDKSKGNWIIFLDADEYLMDMDLKGLRNQILTAENMKGEAIFCNIINENSDSIQNIFKTIRIFKRDPKIRYTGKIHELLNKEDGQIQLVDLADYIRIRHDGYSQDTVVEKNKMDRNLEMLLKEYELNPTSSDLCYYLMETYHGTREFEKAWSFGQKVLEYNNDTLSGIRQNTYNRLLELAPRIKKTSEEIKNLYEEAIQYDNSYPDFDFRYACYLYEQEKYDQVIEYIQVCLEKMETYSGTAASKTMGNLVGVLKILVQSYIVKERFQEAVPLLVKILRIDLYDYTTLYAFIQILDKTESGAAIGEFLCKLYDYTNIKDQMVLLKVVHKIGNLELLEYLMKRANPTVLQKIGLK

SEQ ID NO: 8 - protein, 251 aa, Polaribacter sp.
MTKISAIIPTLNEEIHIANAIKSVSFADEIIVIDSYSTDKTLEIAEKLNVKIIKRKFDDFSSQKNFAIQQATYDWIYILDADERVTPEVEKEISEAVKKPGNFVGFYVRRSFYFANQKVNYSGWQRDKVVRLFLKDKCHYRGVVHETIVSKGELGFLKNKIDHFGYRNYNHFIAKINHYSILKAQELHKKGKKVNAFHLLIKPTARFFIHYVIRLGFLDGLTGLILSKILAYSVFTRYIKLWLLNKGIEEN

SEQ ID NO: 9 - protein, 271 aa, Gimesia maris
MFDSPVNRDSFLSSIKVSFMSLSIIVIVKNEESSIRECLASVAWADEIIVLDSGSSDQTVAICREYTDKVYETDWPGFGPQKNRALEYATKDWVLSIDADERISYDLQTEIKRVIQMPARFDAYTMPRRSNYCGRYMKHSGWWPDRVVRLFRRGKASFSDDLVHERIVVAGKTGKLREPIIHESLLTLEQILNTMNSYSTASAKMLAEEKQQAGLCKAVMHGMWTFIRTYFLRAGFLDGKEGFMLAISNAEGTYYRYLKLMVINKANQKEV

SEQ ID NO: 10 - protein, 270 aa, Unknown
  Description of Unknown: Calditrichaeota bacterium sequence
MIPVSVILITKNEEENIQRCLNSVSWADEIVVVDTGSSDRTVEIALRYTDKVYVTDWQGFVKTKEYAIAKARNQWIFWIDADEEVTVELRNSILNLTDDQLQANRAFAMNRRTYFMGRWIKHCGWSPEIVVRLFYKNWARFSRDSVHERLIVEGKIGHLSGDLLHYTDQNFKHYFKKFHHYTELAAQDLFVKGVTVRWWAVTLRALAAFFKIYFLKRGFLDGIQGFQIATLTSFYIFVKYFKLWELQRTHGSAHFRPGLRQSKTKECAGS

SEQ ID NO: 11 - protein, 1200 aa, Selenomonas ruminantium
MPYISACVIVRNEEKNLPRWLACMSELADEMVVVDTGSTDNTMEIAEQAGARLFSFPWINDFAAAKNYALEQAKGDWIIFLDADEYIKPQDHACVRELIRQNDQRKDILGFVNPLINVDQDKDNAYISTIYQIRVFRNLSDLRYVGAIHEILQYRGQAEKNMPLLEYYAIYHTGYSARLMPDKYQRNLQMLELSVKKYGWRLLDDFYFADCYYGLQQYERAIKHAKSYLTAKERVLGEESRPYGILLQSMIFLSYPLSEILAWGQKALEEFPYGAEFKILEGYAREATGDEQGALRCFDEADRLYSEAGKNGAGKMLSDEAGGVMSAMHARREALQKRMQQRKQERQTGGVKDMVYTSACVIVRNEEKNLPRWLACMSELADEMVVVDTGSTDNTVELAKQAGARLFSFPWINDFAAAKNYALEQARGQWIFFLDADEYWTEKDFAIIHKNLRQYDQQKNVIGFVCRLVNIDVDNDNRILNENMHIRIFRNLSQLRYTGAIHEQLVYSGTGQKEMKLLPKAVIYHTGYSASTDLYKAKRNLQILLELQENGKGQESDICYITDCYYSLKDYAKAAEAAQEAIRRQVVLPGRETRMYCTLIQSLHLLGHKWQEILPWVEQGERDFPHVPDFRALLGFAAWHDGAKTEARQFFQQSKALYQEFLAHRQDVTAAFADEMQGFLPKMEAYLAEDNNSSAIKISAAVIVKNEEENLPQWLSCMQALAGEIIVVDTGSTDNTVAIARQAGARVVHFEWVDDFAAAKNFAINQTNGDWVLLLDADEYIPKEDYGGLQAAIARVHADSNVIGLASEWINVDKTKNNAYINKGYQIRVFRKMPELRYVHMIHERLQYNGNEKKSMPVTNDFRIYHTGYSTGQMAAKYKRNLRLLQLSAEKYGKRPEDEAYMADCYFGMQEYEQAMAHAQAYLESTGRTDGAENRPYGVWIQSLIFLQRPLEEIAAVVNKALTEFPYSAEFKIMEGGTREDKGDFSGAEICYREAARLYAYAKQHDIWRQNLLSDEAGTVMPEVYARLCRLLMWQGNGEEAWEYLQKSLAMDKYIPLACRLLGRFLAERDDVDWIEVFNQLYDKQRDAAFILEHLPHTGRDKVRLYYQRQLGMSEQSAYIMAGRLEAAGAALAEDTAALLQLGIRGFAHDVGTMDKIGVLLSQNYRMVATGQAKTAAERSLARKTARIQGWLAKQDGLAE

SEQ ID NO: 12 - protein, 254 aa, Unknown
  Description of Unknown: Chryseobacterium taichungense sequence
MTEHGVMNVSGLIITYNEEKNIQEVLECFDFCDEIIVVDSFSTDKTVEIAQKFPKVRVIQNRFEDFTKQRNIALDAAKNDWVLFLDGDERITAPLKKEIIEELKKPVPKDAYYFYRKFYFAEKPIHYSGTQTDKNFRLFRKSKARYITGKKVHETLHVNGTTSEMKNKLLHFSVNDYESYKTKMIHYGVLKGQELAARGKKYNRITQYSKTAFKFFKAYILRLGILDGKEGYQLSYLQSLSVFETYESLKKEQN

SEQ ID NO: 13 - protein, 249 aa, Unknown
  Description of Unknown: Candidatus Amesbacteria bacterium GW2011_GWA1_47_20 sequence
MLTSIIIAKNEESMIGECLLSLAFSDEIVVVDSGSTDATVDIAESHRAKIVTCREDSYATRRNLGLKAARGSWILYVDADERVTPLLKKEIEQIMSSPDSVQVYQIPRKNIYLGREMHFGGWGGDRVIRLFKKSALQRYVGELHEQPVFSGELRTMNHELVHYSHRDLTSMLNKTLDFTTYEARLRLATGHPRMSWWRFVRVMFTEFWLRFVKLFAWRDGVEGVIDGVFQVFNSFVIYARLWEMQLVKK

SEQ ID NO: 14 - protein, 252 aa, Unknown
  Description of Unknown: Phascolarctobacterium succinatutens sequence
MNNNLTVVVLTKNEEKNIVAVVQNAKKVAAEVLIVDSGSTDKTVQLAEENGAKVVYRAWDNDFAAQRNFALQHVETEWVLYLDADERMNDELLASVKNAVGNDKTCQYSIKRKSVAFGQEFNYGVLKPDFVPRLFKTKNVHWVNKVHEKPMCKDELKVLGGYIEHYTYTGWQQYFNKFNQYTTIWAQNAYENGKKVGYFTAYGHAFFSFIQMLLLKKGILDGRLGITLSVYHFMYTLTKYIKLIDLQRGKEK

SEQ ID NO: 15 - protein, 313 aa, Prochlorothrix hollandica
MVNIPTKIPVSVLIPAKNEEKNLPACLNSVACADEIFMVDSHSDDRSVAIAQDYGAQVVQFAFNGHWPKKKNWALENLPFRNPWVLIVDCDERITPELWQDIDRAIQSPDYSGYYLNRRVFFLGRWIRHGGRYPDWNLRLFRHAQGRYENLDTSDTPNTGDNEVHEHVILDGKVGYLKHDMLHEDFRDIFQWLARHNRYSNWEARVYYNVLRGQGNRGTIGAKLLGDAVQRKRFLKRIWVRLPFKPLLRFVVIYILQLGFLDGRAGFIYACLMSQYEYNIGVKLYELRRFGGTLNTKATVAANLKQRDTQELF

SEQ ID NO: 16 - protein, 615 aa, Paenibacillus sp.
MKISACLITKNEEANIRRCIDSFKEIVNEIILVDTGSTDNTVEIAKELGAKVFFFEWNNSFADARNYALDQASSEWIVFLDADEFFYKDTAKTIPPVLQKINNNKNIDALLLKHLSIDGREEKVIQTNSLVRVFRGNTNIRYKGNIHESVFKEGDTVKLFNSTNLDLKIYHTGYSGEIISTKAERNLELLLIELANNSKNKLNYLYLSDCYITLGQYDDAIKYGQMFIESGASAVGLNSKPYHNIIRSMKQLGYSYEEKKRTIFKAIDRFPSHPDFYKYLAVEYFNNKEYIRALEAFNKVIELQSKYKDIELNTIPGLLTDIYYYMGILYEYKNDAGSAFDHYFNSLSENKYNENSFYSLINLIKKENPEDIILLLNRIYHKSVEEDVRFLVTKLSTVKLGKVLLFYWKIWNSQYRYEDSTLMFALLSNGNYEAAYSCFYKCYLEERTDWTALFTVVSSILSNSTIEVDQTEDFPISYKKIILLYTGQATDQILLKEELLVYMNLITEMILLDNRQVVNALLNLKSNFEIDISTAIGSTLMDYRIYDLAIEHFAEALDNTSEDMQKSKLYFNIGYCHFKLVNYSLAKESFMMAQRHGYNANNVYDYMTWVNNLIK

SEQ ID NO: 17 - protein, 638 aa, Sporomusa silvacetica
MTKISACIITKNEAMCISRCLQSVKDIVDEIIVVDTGSTDATVTIAEQFGTKVFHYSWGNDFAAVRNYALDQAKGDWIIFLDADEYIAAERIKNVRPIIEKVHGNRKIDAVRCQMKNLEGVNGSLRSSNPSMRIFRSSKAIRYIGKVHEYILKREKPVSAINVDSQMLVIYHTGYSKTTITEKIRRNTALLEEELKQGIVRRLTYYYLSDGYFQAGEYEKAIDFAQKAIKDMAQMNRDCDYKPYGILIESITHLKTFSEQEAIAICNEALGRFPHHPEIWLHQAYYYRSIGWYEKSLTSLLKAVETNACYNDFNRSNDFYQCSSMAYFDIAQIYEMKNQSAQALDYYVKALQQEKSNQAAFGGLISIIRNQEPAHVIYFLNTLYEIADERDIRFLVENLSRLKVKIVLDYYHKILRDKFDDKQLNGLMLLSNCKSDEVFPIFAELFRKHGNYGMELLAVIALLISEKPQWVDLLEANLQHSCRKVVAAYFQTEQDIQLSADEFPLFCDLLRELVYLGSSKQTETFLQIGKCFFSEKACTKIATILLEHGSFFCALDMYLHCINKTSSEAKQLSDLYCDAGYCCYRLKDFAGAASYFSQALKFGFNQNRIFDFLEWSYQQCPEEAIKEKFKMMKALHRN

SEQ ID NO: 18 - protein, 265 aa, Moraxella nonliquefaciens
MNQHSKQYPLSVVMIVKNEAKNLAISLPALDGLADEIIILDSGSTDNSRQIAEQYGAKWHVNTDWQGFGRQRQLAQSYATGEWILALDADEEISEELKNSILAVTKTKPNNTVYGLKRLDFILGHQIDNPYWGVKSYWRLYPKRFNFNNLLVHESLGTQNANTQSLSGFLNHHTAPNLEFLLNKRLEYAKIWAEDRHKKGKKSSLLKIISNPLWQFIRQYWIDGRFLQGRYGLIYSLIFTQYTFNKYLFLWQYNQRIKNNENIYY

SEQ ID NO: 19 - protein, 251 aa, Arcobacter sp.
MQKNITATIITLNEEKHIREVIENVQKVCDEVIVVDSCSTDKTIEIAESLGAKVIKQKYLGDGGQKAWCEQYAKNDWILSIDADERFEDEALEMIESIDLEKTQYEGFSFRRKSFIGKKYIRQWYPDRVVRLYDKSKCGYNTEGEHGAVQTKNFQELDVDMLHYSFTDFGMLVRKADRFAVNLAHVRYKEGKRASWYDPFLHGMGAFFKGMIIKGGILGGLHEWHVGFASAYNAYMKYVIMLELQENENNE

SEQ ID NO: 20 - protein, 252 aa, Arcobacter thereius
MSIKNISVAVLTKNNENTIINTLNSLTEFEDVVVYDNGSKDKTMEIAKSFPNVNLVQGEFKGFGWTKNQAASFTKNDWVIIIDSDEVVNKDLIDELKIKNLEDNTVYRLNSNGYYKDIQVKYCGWTLTVKRLYNKRITSFNSKDEVHEHVLSNDLKEEVLKGSINHYSYHSISEFIIKADRYSTLFARNNAGKKVSSPTKAFFNGVYSFFRTYILKQGFKDGYVGLIIAFSHMVTNFYKYIKLYEANKELKK

SEQ ID NO: 21 - protein, 1319 aa, Mitsuokella sp.
MKLTACYMVKNEARNLPRSLASIRGAWDELIVVDTGSTDATKEIAASFGAHVLDVPWCDDFSAPRNAALEQARGDWILFLDADESFEKSKDLRAQLDGLMQESVDAWLLPLKNVEEGSAGAAAGNVQYLLRLFRNRADLRYRGRIHENIVRRDAELVWKYAPQKLLLLHTGYASHISREKAERNIRILLQEAKREGDAVTYSAYLADAYHGLGEYERAKYYAMLAIDNGVVTIGNRTGLYHLVQECMRHLGYPLEEQLAWAQKTKKQFQNHPDSLAECGIVLSSMGRLAEAKKNLSAALQHYEAKDYDKGYGSFFYDGIAEQIADRLKTIAVIEKDEAEAAHWEAQAMRYKKRQRGECESVRISACYIVRDEAEELRRSLESVAGEVDDIVLVLTGKDSAAAEVGQSFGARCQTFDWCDDFSAARNAAIEAARGDWIVFLDADEYLSEKTRGNLRSMIEREAEKGTQQLLFPIRNIEAGTGETLLVSCATRAFARKEGRAYVGRIHEEIRDDAKGTPRLVEPMRRIAETELMLIHTGYSAARSKEKAERNLRILLKELVTAAYPESLYMYLAEAYDGIGDAEHAIYYAKRDLATGGHKGVAYASRSHRILLRLYAESRQYEARMKVAEQAVHDFPDLPDFHAEYAECLADALDYETALTESERAAKLAAAYHGIEPSMLDPAALSVMERRRAVWQAICVRAAEMKLFACLIVRDAGKDFAIWAENAKAYADALIVVDTGSKDGTRERAVEAGARVITLAWQDDFAAARNTALAAAKEAGADWVTVLDADETFFDPSKVRLFAARTDLSMETIDAVQLPILHVDEDDGGREIKRQPYIRLLRMGRGLFYEGRVHEQLRKAGGEPAIWTEGRHLSIRHTGYSMGRIREKVRRNLALLLQEIAEGGKKPYHDRYLADCYYGLGDYEKALAHARAARRSPVHSIGAESDLFRLMLDAMRELSAPRTEQAALAREAVAAFPLLPDFYGRLGILLAPSAPTEALPLLQKAIALAETGTDGKEASQFADEAAETHAALAACHFACGAREAAEREALMAISLDGHEAQALDVLCALHADGGEGELAALLVSILGEGDAVRPYLLRFAESYGHIALYRQLSKDWQTECEIGAFYDKAKEEEAASLLAKLAPEAAQHIREAPAVLLMLERQETPEAAHLALRLAALMPPAMQALWQAYRGADLPHGAWADGWNLFALAFVRWGSDAQVVRVLPLVSALGDAEKAAFFHQLVMGRRFAAAVSSAGLVPADSPAANGKFWYDLGRAFFAMDERKTARECWERAISLDPAHGGACAYLVWTAQDDGEKEGRA

SEQ ID NO: 22 - protein, 251 aa, Nitrospira sp.
MSKLSVYVIAYNDEPNMRACLESVAGWGDELIVVDSHSTDQTAAISCEFTNKVYQVDFKGFGDLRNQAVALTTHEWVFSLDSDERMTPELREEIRQLLDRGPEADAYFVPRKNYFLGRWIEHCGWYPDYRQPQLFRKGRFRYREELVHESFDCDGPVGFLKSPALQYPFRDIDHYVAKQDRYSDLMARRMTEQGRRFSSHQLITHPLGAFLKMYVQRAGFLDGMPGLILSGLYAYYTFIKYAKFWELTKKG

SEQ ID NO: 23 - protein, 254 aa, Parachlamydia sp.
MISVTILTKNSEKYLNQVLSALSLFDEVLIFDNGSTDGTLAIAAQFANVVIHQGIFQGFGPTHNLASSLAKYDWILSIDSDEIVTPELAAEIKQTVLSTACAYSFPRHNYFNGKFIKWCGWYPDRQVRLYNRTTTAFSEAQVHEAVETAHLTKKQLNFPLKHYSYESITDFLTKMQSYSELFALQNQGKKSSSISKAILHGFFAFFKSYLLKRGFMGGYEGFIISTYNANTAFYKYLKLREVNKEMCNNNLHTS

SEQ ID NO: 24 - protein, 248 aa, Unknown
  Description of Unknown: candidate division KSB3 bacterium sequence
MQTRQKLSVAIITFNEENRIRDALESVTWADEIVVVDSMSTDRTVDICCKYTEHVYQIPWHGHVKQKQIATDKTSHDWVLSIDADERVSPELAKEIQQALIGTPRYAGYYMPRKTYYLGDWIRHCGWYPDYKLRVFQKQKGGWAGKDPHDKVEVQGLTTHFRGNLYHYTYRDISHHVQTLNSYSSISAGLKTGSVSGAGIFFHTVFTFFKKYILKQGFRDGTRGLIVCLLASFTVMLKYAKLWERRNT

SEQ ID NO: 25 - protein, 274 aa, Unknown
  Description of Unknown: Candidatus Omnitrophica bacterium CG11_big_fil_rev_8_21_14_0_20 _43_6 sequence
MPETISIITNTKNESQALPKFFERHTWVDEILVMDSFSTDATIEICKKYGHNFHQAELAGNSNIRNNLALTLFKSDWVFFIDPDEFVSDELKQQIQSFLLAADNKYAAYEFPRINFFMDRPLRHGGWSGNTVRIFRKNRVEFKGDAYHDHPIVKGQIGRLSGVIYHYPNPNIYWIIQKFNYISEFDAKEYYNKFGVLSKRKYKWLLLTKPLKNFWKGYIKKKGYLDGWHGFIYAALIWAFDVIRICKYAEKYITKNPNILTPDKLADPWESRKA

SEQ ID NO: 26 - protein, 270 aa, Unknown
  Description of Unknown: Candidatus Woesebacteria bacterium GW2011_GWF2_46_8 sequence
MTKISAIILTKNSEKLIPDCLTSVSWTDEIVVIDENSSDKTREIAGKAGGKVFTFSGNFSEKRNFGAKKASGDWLLYVDVDERVTPLLRKEIRSRLAKREAPSSAYHQSPYVAYAIPRRNFVFGKELKYCGFWPDYVKRLFKKDKFRGWTGELHEEPNFEVDSEVVTGGKGKIGHLERPLTHLKHNNLSEMVAKTNEWSEIEARLMYEAKHPPMNLFRFSTAMFREFWLRMIKQKAFLDGTVGIIYAVYQVYSRFISYAKLWEMQIKTKK

SEQ ID NO: 27 - protein, 301 aa, Unknown
  Description of Unknown: Candidatus Pacebacteria bacterium CG_4_9_14_3_um_filter_40_12 sequence
MQNTPSLSVVVNTMNSEKFLELALASAAFADEIIIVDMHSTDATQKIAKKFTNKIFMFEDIGYVEPARNFAIEKATSDWILILDADEEIPNGLQLKIKDILTEPTFDAYYIPRSNEVFGYEMRKTGWWPDHQLRLFKKGVVTWSDKIHSVPTVAGTSEYLQAMPEIAIKHHNYQSVSQFVDRMNRYTDIEANNDSDVPMTTAMVITSFRDELLRRLFSHDGIQEGMHGVGLSFLQSFYQVLVILKKWEQRGFKQHSATEKETLTALKEFQRSLVYWTYAYEIEHGSPIQKVIARIKRKIGI

SEQ ID NO: 28 - protein, 290 aa, Acuticoccus yangtzensis
MRDLPVSVVVPVRNEEANLAACLARLNRFAEVLVVDSASTDRTLGIAREAGARIVQFEWNGRYPKKRNHVLMNERLAAPWVLFLDADEHVPNAFCDALAGVLPDTSHAGFWLNYTNYFQGVELKHGVPQRKLALMKVGAGLYERIEEDGWSSLDMEIHEHPVLAGSLGEIPVRIDHRDFRGLEKYIARHVDYAKWEARRYAVLHEAGLDKAGHLTGRQRFKYRNLSRWWYPWFYFAVTYGAKRGFLDGAAGFSHAFYKAWYFHTIRGLIAEARRVGAAAPSASSREDMAA

SEQ ID NO: 29 - protein, 241 aa, Chlorobium phaeobacteroides
MAENITVTILTKNSEKHLKECLEALELFDEIVVLDNGSTDDTIRIAGSFPNVRIFKHEFIGFGPLKVLAARNASHDWVLSIDSDEIVTRELVEEIRALRLEKKTVYAIRRDNYYNRSKIIGCGWENDWVNRLFNRQEAGFNTKLVHESLELKNEICVKRLHNPIKHYTFDNASHLIKKMEHYSTLWAEDHKGKKTSSPLKAVSRGMFTFFKSYILQRGLLSGYSGMVISVSNANGAFYNLN

SEQ ID NO: 30 - protein, 243 aa, Unknown
  Description of Unknown: Chlamydiae bacterium SM23_39 sequence
MITPVILTKNSEKTIKNTLNSIKSFEEIIILDTGSSDKTLQIAINFKNTKIFKSEFKGFGLLRNEAANKTKNDWILALDSDEIITENLLKELQNIELNENIVYSIPFFNFYNKKLIKCCGWHNKRHIRLYNKKTTKFDNSLVHEGVIYKNLQIKKLKNPIHHFPFNSISDFIKKIEKYSSLFAEENIYKKSSINKAIIHSLFSFFKSYFIKRGIFSGKEGLIISIYNSNTAFYKYLKIAERWF

SEQ ID NO: 31 - protein, 271 aa, Unknown
  Description of Unknown: Patescibacteria group bacterium sequence
MNNNSVPCTVAILTKNSGHTIARALESVKNFSDIVICDGGSTDDTLNIAEQYGARVIHQNPLLLDTEGRIADFGAVRNQTLDASREPWFFFLDSDEYISKELENEIRRVTTTQAEGVYALYRRYVVGGEEVMCATTYPNLSMRLFAKASVKRFIKKVHERIELKPGVVTEKVVGTLYVPVDGTQGPSPSKMDYYIQLQVNQEVLGASFWRQFFHTIWWHARVSLFYLLQLVKVRLFCRGKKMPLKIELSRHVYHVRLIRALWRRRKEFRKI

SEQ ID NO: 32 - protein, 233 aa, Sulfurovum sp.
MHKLSAVLISYNEEKHIAKALASLSFADEIVVVDNGSTDGTVEIAQSMGAKVIHHEWMGYGKQRQIAVSHASYDWIVTIDCDEQISPQLATSMQKELENPRYFVYRIANLNKFFGKYIRRAGMYPDYHMRFFHKGHATYNDKAVHEALVTQEVVGTLEGDILHDAYESIEQFIAKQNRYSTLNKRHNMVKAILNPYWTFFKIYFLRLGFLEGWRGFVIAKIYAQYTFWKYIKR

SEQ ID NO: 33 - protein, 260 aa, Unknown
  Description of Unknown: Candidatus Omnitrophica bacterium 4484_70.1 sequence
MEKVKLSVVILTKNEEDQIADCIKSVVDWVDEVVVVDDESSDKTVEIAKSLSARVLVKKMDIEGKHRNWAYQQAKNEWILSLDADERVTEELKEEIVTVLSKNIFDALAIPRKNFIGNYWIKGGGFFPSPQLKLFRKDKFRWEEVEVHPRAFLEGKCGCLRNALLHYTYKDWEGYLRKLNRQTTLEAWKWYKLSQVNPKKAGYKMNLLHTLWRVVDRFIRTFIIKKGYKDGFIGFMIAYFSSFYQLVSYAKYREFSKKQK

SEQ ID NO: 34 - protein, 278 aa, Unknown
  Description of Unknown: Candidatus Microgenomates bacterium sequence
MAEKGNFGLLQRKFRKRILEMKKELKLSVIILTKNEEDIIGDCLESVKWAPEVVVVDHYSTDQTLKIVKEHGINKIYVADEKSSFSERRDLGAQKAQGEWLLYVDADERVTPVLRKEVEEVIKDSNFSAYAIPRRNVRLTKELHFGGWWPDYVLRLMRKDKLKTWKGDLHEQPEIEGETGYLKEALVHFSHRGSLEHKFKNTINWSKIEAQKMFDAGHPPMNVKRFVSAMFREFYKRAVKLQAFRDGTEGIIEAFYQVFSVFISYARLWEMQIESKKK

SEQ ID NO: 35 - protein, 249 aa, Unknown
  Description of Unknown: Candidatus Aerophobetes bacterium sequence
  MOD_RES (117)..(117): Any amino acid
  MOD_RES (157)..(157): Any amino acid
MISAIVLTKNSSKTLGETLRSLRNFDDVVVLDTGSSDSTIEIAKSFPNVTLHHHSFSGFGHLRNLASNYTKNEWVLSLDSDEVLTDEAFEEIKSKKLEDTKVYSFPFDNYFNNKHIXWCGWYPDRHVRLFNKTSTSFSPDFVHERVLDEDMQEESLXFSIKHYSYGCVSDFLEKMQRYSTLFAQQNKYKKRSSIGKALLHSHFAFFKSYFLKRGFLGGKEGFIISMYNAQTAYYKYLKLWEANQEATCS

SEQ ID NO: 36 - protein, 356 aa, Bacillus sp.
MKISLAMIVKNEQRYIERCILSVNGYVDEIVVVDTGSTDNTLQILEKYKHVKVYQFQWTDDFSKARNYSIEKASGDYILILDADEYIIEGTRAELESVVQDNLIGRIKINSRFRKDNEIQIASAYISRFFPKNTRYEGEIHEQIISNLNRKKLKIKVGHDGYMDMNKGDRNIPLLIKALKKRPNDAYYLFQIGKELRIKKQYNEAYKFLIKSYHFSDKQSLFYEELVIEIINSGKECGDLKVLQVIDDNEYLLQNVSDYHFAKGLFYLDFCLSNIGETGRYLHKIESCFLACINLNEREHSEYLNGTSSFLAAYNLAVFYEVIGDFNNAIQYYNFSAKLGYNLARERLALLNKNDK

SEQ ID NO: 37 - protein, 260 aa, Thiohalomonas denitrificans
MSSVRPHTLSVCIITLNEADRIERCLRSVREIADEIIVLDSGSTDGTIDIVKRYTDKVWVTDWPGYGPQKQRALDKATQEWVLSIDADEALDETAQQALKTLLEQPIIEEVAFKLQWAVIRHGARLRFGRSARAPLRLFLRENASFTMDQVHEAIQHKHGKVGKLQGYLLHYTARDYGHALEKNAKYAWLGSQKYYDRGKRNRSLSLVFMRAIWTFFWIYVIRGGFLDGRIGFIVAMNYAQGNFNKHVGLWLLTRENKSD

SEQ ID NO: 38 - protein, 276 aa, Unknown
  Description of Unknown: Candidatus Nealsonbacteria bacterium CG_4_10_14_3_um_filter_36_ 16 sequence
MKLPISVIILTYNEEINIENCLRSVADWANEVIIVDSFSTDKTLEIARKYTNKIAQRTFVNQAQQFNWALENLDIKSDWILRLDADEYLTQELKNEIRVNPLLNNQDPRQSASIVNGFYIKRRVYFMGRWIRHGGYYPTWILRLFRKGKARSELRAMDEHIVLSEGKAEKLKNDFIDDNRKGLEDWINKHNNYSSREAADVLSGNYGRGKKKFYYWLPLFCRAFLYFIYRYFFRLGFLDGKEGLIFHFLQGFWYRFLVDAKLFEIKRVGIEKSIKV

SEQ ID NO: 39 - protein, 344 aa, Oscillatoria sp.
MTSTSSKIPVSVLIPAKDEEVNLPACLDSLTRAVEVFVVDSQSTDRTVEIATSYGVEVVQFYFNNCWPKKKNWSLENLPFRNEWVLIVDCDERIPPELWEEIAEVIQDPNFDGYYLNRKVLFLDTWIRHGGKYPDWNLRLFKHKKGRYENLGTEAVPNTGDNEVHEHVILAGQVGYLKNDMLHEDFRNLFHWIERHNRYSNWEARVYYNILAGQGDSGTIGANLFGDAVQRKRFLKKLWVWLPFKPMLRFLMFYIFQLGFLDGKAGYIYARLLSQYEYQISAKLYELRYCNGQLNKAEKTKGGDSAKGNLKPNSSFEFDLEKAEADISQSPLPNSPSQINSPNS

SEQ ID NO: 40 - protein, 264 aa, Unknown
  Description of Unknown: Nitrospirae bacterium sequence
MDKTTPKVSAVVIAYNDEPNMRGCLESLTWADELIVVDSFSTDGTAQISQEYTNKVFQHEFHGFGRLRNEAVAHATYDWIFSLDTDERATPEVRDEIRQKLREGPDADAYFIPRYNYFLGRRIMHCGWYPDYRQPQFFHRHRMRYKEDLVHEGFSVNGRVGYFRAHVEQKPFRDIDQYLQKMDRYSTLRAQAMYQRGARFHLHQLVTHPLFTFLKMYILRLGILDGMPGLILSGLYTYYTFVKYAKLWELEKNPCLTEKPLRGF

SEQ ID NO: 41 - protein, 260 aa, Cupriavidus sp.
MKISVVLITKNEAHNIRECLESVSWCDRAIIVDSGSTDGTVETARAMGAEVYETATWPGFGPQKNLALSKVQSEWVLSIDADERVTPELRDEILAAIASGQADAYDMPRLSRFCGRFIRHSGWYPDRLIRLFRAGKARFTDDLVHENVVTDGPVAHLQNPLLHYTYDNFSQVLRKVDQYSTLGAQQAFQRGKTASPASAWLHGSWAFLRTYVLRRGFLDGPQGVAIALMNGQASYYKYIKLWLLQQQARQPVASGDPQAH

SEQ ID NO: 42 - protein, 258 aa, Taibaiella soli
MIQISAVIITFNEERNIARAIESVRKVADEVIVVDSFSKDGTVAIAEKMGARVIQHPFNGYGEQKGFAETQATYDWVLNMDADEALSPELEKSIREMRNNPQFDAYEFNILTNYCGKWIRYCGWYPNPKLRLWNKTKGRMTTDKVHEGWHLHDKNGKIGFLKGDALHYSYYTISDHLKKIEQYSEIGAQFDVARGKHCSFLKLWLWPKWEFIKLYIMRQGIRDGYYGYLLCKNSAYAAFVKYQKIRQYTELKKQGISF

SEQ ID NO: 43 - protein, 252 aa, Veillonella parvula
MATVSVIILARNEEHNIHDCIESVQFADEVLVIDDFSTDDTIKIAEEMGARVVQHAMNGDWGAQQTFGIEQATSDWILFLDADERISEPLAKEIQAIVVNEPNKAYWIQRRNKFHHNHATHGVLRPDYVLRLMPKEGSYVEGYVHPAIITPYPTEKLQHPMYHYTYDNWHQYFNKFNNYTTLSAEKYRDNGKSCSFIKDIILRPTWAFIKVYFLQGGILDGKMGFILSVNHYFYTMTKYVKFYYLLKSKGKL

SEQ ID NO: 44 - protein, 309 aa, Unknown
  Description of Unknown: Cyanobacteria bacterium J069 sequence
MFSIYILTHNEELDIAACLESALLSDDVVVVDSISDDRTLAIAAGYAEKHPIRIVQHAFESHGKQRTWMLESIPPKHPWIYILEADERMTPALFQECCRVIQSDERVGYYVAERVMFMNRWIRRSTQYPRYQLRLLRHGQVWFDDYGHAEREVCDGATGFLQETYPHFTCSKGFSRWIEKHNRYSTDEAVETVRQLQQGTVNWRSLFWGASEIDRRRALKDLSHRLPGRPLLRFLYMYFGLGGWRDGGPGFTWCVLQAFYEYLILLKVWELRQEPSAQGFEVQSVERRVVEIAAEPVESLETGDRSAPL

SEQ ID NO: 45 - protein, 259 aa, Hymenobacter sp.
MPILLSVVIITYNEERNIGRCLLALQDIADEVVVVDSFSSDRTVEICREHNAKVVQHAFAGYVEQKNFATAQARFDHVLQLDADEVLTDTLREHIRQVKTNWRAAGYTLTRLTNYCGTWVKHGGWYPDRKLRLYDRRCGQWQGLLLHERYELRPEHQVAALTGDLLHYSYDSVEQHVAQLNRFTSIAADELALRGKYRITVFHLLLKPWWKFVHGYFFRLGFLDGFAGLCIAAISAWGVFLKFAKLRTKNHRLNLTSGS

SEQ ID NO: 46 - protein, 268 aa, Unknown
  Description of Unknown: Microgenomates group bacterium GW2011_GWC1_44_23 sequence
MKLSVIILVRNVAHEIIPAIKSSQFADEIIVVNTGSTDSTLDICRKFGTKIVHTTGDSFAKWRNDGAKTAKGEWLLYLDSDERVPVKLAKEIIDTINKPEHSAYTISRYEIFLGKHLDHWPDPRVLRLMKRVALKRWEGRLHEQPKLTGTTGKLKQQMVHLSHKNIDEKLSNTLEWSKTEANLLLDAHHPPMAGWRFIRIILTEFWSRAVKQRLWRDGTEGWVEIIYQMFSKFITYERLWEMQRKPTLKETYDNIDKQILAEWEEKKS

SEQ ID NO: 47 - protein, 252 aa, Kaistia granuli
MPVNSNRPRLSAIIITKNEVKDLPACLASLAFCDEIVVVDSGSTDGTLEIAERVASRVIVRADWAGFGRQKQRALDAATGDWVLSIDADEVIPPELALEIRTAIESETHVGYRLNRLNAFLGKFMHSGGWTPDRPLRVVRRDAARFSEDVVHEILIVDGTIGDLPTPMPHLSYRDFDEVLDKLRRYALAGAEQRRNSGRGGSVGKAIIRSITTFLKLYIGKRGFLDGQHGFVAAVASSQEIFWRYLAAGWNR

SEQ ID NO: 48 - protein, 258 aa, Unknown
  Description of Unknown: Chloroflexi bacterium sequence
MAYPKISILLPTFNCADILRPTLESIKWADEILVVDSYSTDATLDLCREYGARILQHEYVQSAKQKNWAIPQCAHEWVLQIDSDEVLEVGLSAEIRASLESASAEIDGFRIPFKHHILGEWVRVCNLYPEYHLRLFRRDKGRFEDKEVHSHVKVPGRVETLQHHILHHGMKSLSNQLRNLDRYSRYQADELRKRGKKFHWHQLLIRPFGIFVYFYVVKKGFTAGYRGVWIAAINTTFDFWSYAKLWELETLGLTASPK

SEQ ID NO: 49 - protein, 533 aa, Unknown
  Description of Unknown: Thiotrichales bacterium 16- 46-22 sequence
MTLLPAAYSHPKSRPWVFALVLLLTLSLLAVPIVETTPNALAFETFYNAGMHCLQGLNPYAAYEGFDYYKLSPTFLLPLIAFAQLPFVVSGVIWQLISTVLFFAAMLWLLRELPLARPLGLGLSLFLPFLLLTDFQLNGTYLQSNTLVVALMTLSLLFYIRGQWLVSALLLAWIANTKLYPLVLTLLLFVDMRWRFIVATLLAHVFLFALPYVVWGQAQANAFYSDWMNLLAMDKTLTYGEPWGHFFLGLKAFLEVNFGWVLQQGYVWVLLVSAALVGLPACWLRWKAGVFQHETLMLLLVTALAWILLFSTRTEGPTLVLIAPIYGYALWWIMKIDAVQFRRIALSALVLVFILTSLSTSDLFRGTIVHELLATQPAHCGSDDYLYLYHYSIVACSFGYTSIFVERILMSHKITAFVLTYNGEKYIEDCLKSLMWADEVMIVDSGSKDRTVEIAQALGVRVETNSWAGYGNQLNYALSVASHDWVFFTDQDEVVLPELAQNIRRELNGEMNYLAYKTGGQNSLFGHYGPHHD

SEQ ID NO: 50 - protein, 254 aa, Unknown
  Description of Unknown: Chryseobacterium shandongense sequence
MAEELMKNVSGLIITYNEEKNIQEVLKCFDFCDEIIIVDSFSTDKTIEIAKQFSKVKVIQNAFEDFTKQRNIALDAAKNDWVLFLDGDERITASLKNEILEELEKPVQKDAYYFYRKFYFAHKPIHYSGTQTDKNFRLFRKSKARYTGDKKVHETLHVNGTIGVLKNKLLHFSVSDYESYKSKMIHYGVLKGQELAAKGKKYSLAAQYSKTAFKFFKAYILRLGILDGKEGYQLSYLQSVSVFETYESLKKEQN

SEQ ID NO: 51 - protein, 251 aa, Unknown
  Description of Unknown: Gammaproteobacteria bacterium sequence
MLQPLSAVLITRNSAAVLPACLKSLRFADEIVIVDSGSTDTTLDIARHFNAKIVHQEWLGYGKQKQFAVAQAAHDWVLCVDTDERVSEPLRESILRELQAPRFHAYQMPRRNRFLGRWLKHGEGYPDLSLRLFDRRHANWSDDPIHEKVVTAGPVGRLAGDLLHESEQGLADYLAKQDRYTTLQAEALHARGKRASIARQLLSPPLRFIKFYFFRLGFLDGIPGLMHILVGCRNSFTKYAKLRALRRRDRH

SEQ ID NO: 52 - protein, 949 aa, Selenomonas sp.
MEGSSLKISACYIVKNEEVNLEKSLNSIKNKVDELIVVDTGSTDNTVGIAKKFNAKIFCIPWKNDFSEARNVAIAQATGEWILFLDADEYFSDNPSVDLHEVILSLQPADVMLVSMDNIDADSRENLLTFYAPRIFRNVEGLCYEGRIHEELRYRGKQVEKIVYVPEEQLKIVHTGYSVSISHEKAERNLQLLLYELENTEKPDVLYPYLAEVYAALDNAEKAKYYAEQDIKNGRRRITFASKSWRILLDYAVKENDKRKRREIAASAVFNFPEIPEFHAELAESLAADYIYTDAIREAEKAEKLFHNYDDIEPMQFTTDMLIMLKKRLNDWKVLQKNSEKLYITACVIVRNEEKNIAAWLANTQQYADQQVVVDTGSKDKTVEIVKKSKAYIYDFNWQNDFSQAKNYALSKAKGNWVFFLDADETFANPQQLRGYLAGIEKYKKNIDAIMVPIINIDTDMNNQEISRFLNVRIFRNLPGIHYEGYVHERLVMAEGKPLQLYKEEHDLQIIHTGYSSHIIAGKVERNWKILQDDIEKNGEQPVHYRYLADCYYARGNMEQALKYAILALGSTVQAVDSASDMFDIALTCVEKMDCKVAECLALAKKAQALFPKKAAYFIKAGHYLFSVGKTDDAAKEFGKALVCLRENNNNTGDTYTSIAEQSLLYQDMALIYHQKREWEKAALCLQKAKQFSSLDDGIIRMILNSNKEKNIAEQVKALQSYMGNETINQHYIAQWLEEKGFLKHWQIFTGENKQEYVLAQNEDLIVLYKKIEQDMANNIVGLCRILIKLHQERDSLIKGVQIANLSQALPEAMYAVWECWQKYEPVNDFHWDGYKVWLRQMIVWGSAEQLQDFVELAAGLSDSCLWEMAEELFQGEKWLIAWNVYSRIPAASKYVKGKFWCHAGICQFSLGNNEIAGECFANATAYDDTDEECRSYITWNERRLKNDA

SEQ ID NO: 53 - protein, 282 aa, Lucifera butyrica
MRKPISVIIHTFNEEKNIRNCLECVKWADEIIVVDMYSDDKTIEIAQGYTDKIFMYERSGYADPARKFALEQASSEWILVVDADELVPMKLQRVLIDIAESDKYDAVLIPHLNYFFGYPMKGTGWGPLQDMHIRFFKKQYMYYSDKVHDFAHLSKDARLFRLLDKDCAFVHFNFLTVEHYIEKFNRYTTIEAQGKYKHDIPFDLKKIVISSAKEFIRRFLFCKGYSDGFRGLSLSLLMVTYQLVINLKLKIMYECSNLNYDEVIRLKYNKIAEQIRAEYSEE

SEQ ID NO: 54 - protein, 254 aa, Nonlabens agnitus
MQKYKISAIVPCYNESHNIVEVLKSVEFCDEVILVDSNSTDNTVALAQPYIDKLLVREYEHSASQKNWAIPQARNEWILLVDADERVTPALKEEILNLFEKIDEQPHVGYWIGRLNFFMGKQVRYSGWKNDKVIRFFRKSKCRYADKHVHSEIIANGSVGYLKNKLTHYKYIGIDAHMRKLQRYASHQALDYDQKTGKITFFHIIVKPIWSFTKHYFIQRGFLDGFVGLTIAYLRGYMVFMRYVKLWLLRRGID

SEQ ID NO: 55 - protein, 251 aa, Polaribacter sp.
MTKISAIIPTLNEEIHIADAIKSVSFADEVIVIDSFSTDKTVEIAEKMNVKIIKRKFDDFSSQKNFAISQAKHPWIYILDADERVTKPVKAEILESVKNPNGFVGFYVRRTFYFAGKKINYCGWQRDKVVRLFLKEQCKYVGVVHETITTNGQLGFLKNKIDHFGYRNYNHFISKINYYSSLKAKELHAKGKKVNAFHLLVKPAARFFIHYIIRLGFLDGLAGLILAKILAYSVFTRYIKLWLLNKGIKEH

SEQ ID NO: 56 - protein, 484 aa, Sporomusa malonica
MAKGWSLTVCLIVKNEEHCLGDCLDSIRAWADQIVVVDTGSTDNTVQVARQYDAQIEYFQWENDFAKARNYCLQFAVSDWILVLDADERLAGNSETLPDLVAKDYEGYYLTIVSPLGAGKIEAEDHVVRLFRNGRGYKFSGAIHEQIAGSIKELEGQDAIGFSGIIVRHRGYEPEEILCKQKIVRNSQIIKSQLAERQDDTFMLYSLGTELIQQEQYGEACNVLMKALKHMTGGEGYFREVILLALMASLKNSAYVEDEGLFVKALATMPADSDILFLAGLRQAALGNFSLAGEMLAQGGINTVLVPPQLINAIVGELFYRQKSWQAALQKFKLSLEAGPSLYSAVRMIEVLRKGEAGAVKALAYAVGEDAVKLAHEAVLIGDYYAAAVICLAAAERDVGESFNQWKDLYQSIIKQAGSMPAIIKDYLGILCQQMEICKVALATDKECLVVQSYLEKAVNRSLGVWLTLWPEHVVPINIWECCL

SEQ ID NO: 57 - protein, 492 aa, Selenomonas infelix
MKISACVIAKNEAENLPRWLASMRVFADEMIVVDTGSTDATVEIARAGGARVCHFDWINDFAAAKNFALDQAQGDWVVFTDADEYFTEESAPRVRPLIEEYDGRRKFDGFIVHLVNIDMDTGELLGTSAEVQRIFRRAPHIRFVGSIHEHVENLSGDTGREMALAPGLTLYHTGYSPRIIKGKSRRDLELLLARRARGEHKKLDDYHLMDCYYSLEDYPQAAHYARLARDSTDRPVGSENRPHAVLLQSLILMGAADNEIRAAYETARAALPEKADFPLIYGTYAWDHGFLATACAAYRDGIRLHEEYYRAGDFSGILAPTAYARLGEAARLRGDAEEALRLHEHALRLSPHSAPVLIRFIRMLHAVGADDAAVIETLNAFYREAADPAFLAAVLAGSPFRLAALYYDRKSALQFSQRRQFLLAGDVSSAAASLIEEVERTAAVAAACGAEFAPEQQGALALLLPRSCRERSAAPEDARMLRRIGRLAEGHR

SEQ ID NO: 58 - protein, 293 aa, Spirobacillus cienkowskii
MDDNKRNIIQETYELYQKVRSYDISKFVPEIEKLTAVIITKNEEKNIARCLDSLKFVDEIIVVDSGSTDKTKEIVYSYKDVILIETEWYGFVQNKRIGIEKSSNNWILWVDADEVVPEELANEWKTRIHQGTFHETGAIDCPRKTFFLGHWVKHSGWYPNRVIRFFARHRSDLSDNILHESVIPRKGYVVEHFKTDLLHYSYNSLYQYFDKMNKYGYAGAKELIRKKKFILFPHLFFEPIWTFFKFYILKRGFLDGRIGIIICMGAAFSNFIKYANYFFLKKYKYVDIEEKKD

SEQ ID NO: 59 - protein, 260 aa, Unknown
  Description of Unknown: Vibrionales bacterium C3R12 sequence
MITGVVITLNESKNIVECIQSLQQVCSEVVVVDSNSTDNTCELAEQAGAKVVIQSYLGDGFQKNVGLDYTDNHWILSIDADERLTKEIVSEIKQLNLNTTEHDAFAFRRRNYIGSRWIKQCGWYPDFCLRLYDKTKTRFAEVKQHAAVQARNPKRINADLIHYSFENLGQLFAKPGRDFSGRAAKIMYQKGKRVNAMSPFLHGLNAFIKSYLIKKGFLGGSDGLTVSISAAMSSYLKYARLLEFQRDPTVLEKEDFNKVW

SEQ ID NO: 60 - protein, 249 aa, Unknown
  Description of Unknown: Candidatus Roizmanbacteria bacterium CG22_combo_CG10-13_8_21_14_ all_38_20 sequence
MKITAVILTKNEEKNIQKCIESLAWIDEVVIIDDYSYDNTVKIAKKNGAKIYKRELSGNFADSRNFGLESASNEWVLFIDTDEIVSQELALEIMKLETTDMFGYAIKRIDHLWGRELKHGDVGNVWLTRLVKKNTGKWERKVHEVWKSNDSSKTSKLRGVINHYPHQTISEFVERIRSYALLHAKVLEDQGIRVSIWQVVLYPVGKFLYIYIIKLGLLDGTAGFVHAMMMSFHSFIARSELLVQQNEAS

SEQ ID NO: 61 - protein, 259 aa, Dyella sp.
MAREPLSVVVITYNNGGTLDACLRGVTWAEEIVVLDSGSTDDTVAIAERYGARVSVHPFDEFGPQKQRAYDLATHDWILNLDADETLSAGTREVIEQALVAPRYAGFRLPRRELLFWKVQHRWGRRNGLLRLFDRRRGRMNHVEVHSAVEVDGPVKTLWRADFINHGDVDIATRMNKINSYTTRMVAHKLRKGQRFTGLRMVFYPPWFFLRQYLGKRYFLDGWAGFVASMTGAFYVFLKYAKLHEAQRKVGPDKGMRSR

SEQ ID NO: 62 - protein, 586 aa, Carboxydocella thermautotrophica
MADISLCLIVRNEAESLATCLSSAQPWVAEIIVVDTGSTDDTRAIAARFTDKIYTFPWQDDFAAARNFALDQARGEWILVLDADEYLEPESAAFLPQLVTNASGVDAYLLPVKNLLVPDGSDWHLSWVLRLFRQDPWMRFQGQIHEQIMVPSGYRTEIASKGPLIIHSGYLPERRQNKHQRNLDLLQRALAAQPDNPYYHYYLGVEYLYIRNYQAAWEEFSLALAQIPPAVILFRTATVMNAFQCLSALERWQEALNMLEAEIKVYPDFPDYHYALGLCYRALDDHRQAASAFQTALARTGPAFGGTSRAGVTGFRSLYYLGLSYRALRQHWQAVIAWTKALLDNPTFAPALKELVTCWLELADGLTVLRWLYYHFNLNNPAATLLVCRIFLEHFQTAALNLLLENTSCVALADKFLLMGEAAMLEGEFSKALAYFQQIPAKNHRRPAALIWSCLAAYLSRQELTPILTELNSIPDGQANASLLNWLLEQQSVSPSGEGIARDLAVQVYQTLCRLGCSEPALRLANWLNEQQNFPVRELAWQAALTRMIEISNRLLAASPPLEVARFYQELSQYWLNRLPLIAGGD

SEQ ID NO: 63 - protein, 651 aa, Brevibacillus nitrificans
MRISACVITKNEEKNLPTCLNSMRSIVSEMIVVDTGSTDQTVAVAESLGAKVFHFTWINDFSQAKNYAISKATGDWIIFLDADEYFTDESVPLIPLVIKEANENDCDIIVSLLCNIDISTKQTINTVHHSRIFRNHSEIRYEGAIHERLMKSGKAPRGLMASEGLAIIHTGYSSDIEISKRKSERNIKLLAAEFEKSPQSGELCFYLAESHMAAREFEQALEYAYRSADLDNCTLLGVKQKNYLNIITCMIHLNKEKNEIKQWINKGIEGFPDYPDFYLLLADLLTQECRYQDALEAFSVGIKFIDNALKSQSAAPHQAPKILTLMGELQHKIGQNHDAVKHFVSALNIDKFHYAALIQLLKLLTRFESINDTKKFLNKMYDISNKKDLLYLTRACLEVKNHLLGGYYLSLFSEQDFLLMAEENAEYRLLAGDFKHASTLFDKIYEEKQSTEAMIKALCALFLSGDSATLLEHLQKYKSVESKEIEEGLTSLTDAECLLFISCLIKLQKVDKAMELKHLYEGKNIILDVANLLYDNEKFKEAEVLYAELIAKKNFEEKSRAILLSKQGECLWRIGKYEVAKKLGYEARNLNSQEYQSHSLLMSVTSETGEINELTEIVREAIGQFPDSAFLQSVQAVINNQIENNHQTISY

SEQ ID NO: 64 - protein, 250 aa, Nitrospira sp.
MSKLSVYVIAYNDEPNMRACLESVAGWGDELIVVDSHSTDRTAAISREFTDKVYQLDFHGFGRLRNEAVALTTHDWVFSLDSDERMTPELGKEIQLLLDREPDVDAYFVPRKNYFLGRWIEHCGWYPDYRQPQLFRKGRFRYRQELVHEGFDCDGPVGHLKSPALQYPFRDIDHYITKQDRYSDLMAKRMVEQGRQFSSHQLITHPLGAFLKMYVQRAGFLDGMPGLILSGLYGYYTFMKYAKFWELTKR

SEQ ID NO: 65 - protein, 274 aa, Leptospira sp.
MEQANSTKLSVSIITFNEEKNIQDCIESVSEIADEILILDSFSKDRTKEIAIQNPKVRFLEHPFYGHVQQKNKAMEYCANEWVLSLDADERVDMILREAILDWKKQKSSDIVGFKISRLTWHMGRFIHHSGWYPLYRYRLFQKSKATWVGENPHDYIEIIGKGSKIAGNIIHFSFKDLSDQIETINKFSSIVAHTRFEKGNKFSLLSTILKPIGKFWEIYIFKRGFLDGFPGFAIAASSAFSTFLKYAKIYELHHKIIQRPSNLRESYGEKETK

SEQ ID NO: 66 - protein, 259 aa, Paenibacillus tyrfis
MDHSEVKRISVTIIAQNEEQRIAKAVVSCQDFADEIVVIDGGSKDATVEIAESLGCKVFFNPWPGFAKQRNFAAEKATHDWIFFIDTDEFANEELKNSIKQWKAGKTADADIYNIYRIGNFMGKWLDKGEHLPRMYNRKVTSIKETEVHEGPEPEGRKIGFMPGILWHDGYRSIDDHVIRFNKYTALEAQKALSSNQSFSLMRLLFRPVLRFGQKYFVHGLFKKGLAGLTVATLWAYYEYLTQIKLYELKRVQNSGVAE

SEQ ID NO: 67 - protein, 300 aa, Unknown
  Description of Unknown: Candidatus Pacebacteria bacterium CG_4_10_14_0_8_um_filter_42_14 sequence
MKANMRLSVVVQTKNAAKTLEKALQSVAFADELIVVDMESSDATREIALKFTDNVVSTKDVGYVEPARNKAIEKASGEWILLLDADEEISVSLGEKIETLVATESDVSCYFLPRKNIIFGNWVKDTGWWPDFQPRLFRAGTVTWKDEIHSRPLINGKTDKLPSDESLAIIHHNYSTVSEYIDRLNRYTSITAKFDSKEKSVTTAGLISSYRSELLRRLFLQGGIDGGYRSVLLSFLQANYELVVSAKKWEIAGRPEDDSTSITEMEKFNSELAYWIADWHTKKDGLFRKLFWKIRRKLRV

SEQ ID NO: 68 - protein, 252 aa, Lebetimonas sp.
MKSEFYSSGCLKNGHDEKLSVVILTKNSQKYLEKVLKSVEFADEVIIYDSGSDDNTLKIAKKFKNTKIFIDNKWEGFGVQKQKAVNKAKNRWVFVLDSDEVFTENLKNEVLEVIKNPKYNAYKVARLNNFFGKWIRHCGLFPDYSIRLFNKEKCKFNERKVHESVECERVGELKNYFLHYAYESVEEFIEKQNRYSSLGAKPNKLKAIFSPYWTFFKIYFLKLGFIDGWSGFVIAKLYSEYTFWKYVKKMDN

SEQ ID NO: 69 - protein, 301 aa, Unknown
  Description of Unknown: Candidatus Roizmanbacteria bacterium CG22_combo_CG10-13_8_21_14_ all_38_20 sequence
MNKISVVISAYNEEKLLEDCLKSVTWADQVIVVDNNSTDDTAKIAKKYADEVYSRPNNLMLNVNKNYGFSKATGDWILSLDADERATDELKKEILKELQVTSYELRGDVSGYWIPRKNIIFGKWIQHTGWYPDYQLRLFRRDRGKFAQKHVHEMVEVKGKTEQLKGHIQHYNYETVDQFFQKLLVVYSHSEADNLLKDGYVFNWKDAIIMPLREFFNRYFAHKGYRDGLHGLILSLLMSVYHLVVFLRLWERKKYVEQDVNLGEVASEVGVYRQTWKYWVKHAKVDLANNGVAKLVAKYFG

SEQ ID NO: 70 - protein, 259 aa, Unknown
  Description of Unknown: Deltaproteobacteria bacterium sequence
MVDISACMITFNNDRTVERALKSIAPWVQEIIVVDSFSTDATPDIVKRYTDKFEQRKWPGFRDQYNYCISKASNDWVIFVDADEEISKELGQEIQDRLMQEGDVYDAYIAHRRTFYLGRWIMHGGWVPDYEIRVFKKSRGRFEGDLHAKVRVEGRVGELRNFYYHYNYRDIADQIDTINTYSEQAAIDMRKKGKRFSWLDLMFRPGLRFIKEYVLKRGFMDGMAGLVIAVSTMYYVFVKYAKLWELEKGLKEGNGSGLR

SEQ ID NO: 71 - protein, 259 aa, Unknown
  Description of Unknown: Chryseobacterium sp. NBC122 sequence
MGVSVAVITYNEEENIKRFLDSVNDIADEIIVVDSYSKDKTKERCSEYSQVKFYEKKFNGYGEQKNYALDLCTNEWVLFLDADEIPDEELKKSIRKIVDSGNSKFEVYDIKFNNYLGTHLIEHGGWGRVFRERFFKRNAAKYSPDRIHEYLMTDNDKGSIKGSINHYTYRNIHHYLSKMNNYSDMMAEKMFESGRKVNQLKIIVNPPFQFFKTYFLKLGFLDGFAGFYIARTMAFYNFMKYIKLYSIIKRSKLEKKSAR

SEQ ID NO: 72 - protein, 257 aa, Unknown
  Description of Unknown: Candidatus Thermofonsia Clade 1 bacterium sequence
MLPEKVSVLIPTFNNEALLPDLLDDVKWADEIVVVDSFSTDQTVAICQARGARILQRRYTVSAEQKNWAIPQCTYEWIFAVDSDERVPLALQAEIQALLANGIPNDVDAFRVARRNFFLGHWMRTMSLYPDYQVRLFRKSVCRFEEKAVHAHMQVPGKVLTLQTPLDHYATPMLSKQINVLDRYSTYKAGELYAQGKRFRWHNVLIRPLAVLLYMFLWQGGFREGFRGFFVAFHTAAYVFFTHAKLWELEWRDGKRR

SEQ ID NO: 73 - protein, 243 aa, Hippea alviniae
MSLGCAIITLNEEKKLERTLKSLSFCDEIVVVDSGSSDKTVEIAKRFTDKVFFQKWLGYGKQKNFAISKLSTDWVLSVDADEVVSDELKDEILKELKNPSADAYAVNIQLVFLGRPLRFGGTFPDYHVRLFKKGKYWFEETDIHEGVRAEAKRLKGVMLHYSYDSLSEYFEKFNRYTSLLAEKNYEKGRRITKFSPYLRFGFELFKRFVLKGAFLDGYEGSLYAFVSSFYAFVKYAKLLELQK

SEQ ID NO: 74 - protein, 262 aa, Unknown
  Description of Unknown: Candidatus Roizmanbacteria bacterium CG_4_10_14_0_8_um_filter_36 _36 sequence
MKISAVILTKNEETNIERCLKTVDFCDEIVIVDDFSEDKTVEIAHKVLNAQKVYKVLQRRLNGNFSSQRNFGMEKTNGDWILFVDADETIPDELKKEIKQLLSSDPETKDYTAYYIKRRDFFWGRELKFGEIRKARARGVIRLVKRNSGYWVGNVHEEFKTIGFVTKLTNFINHYPHPTLKEFIEDINFYSSLRAEELYQSGKKFCLGEAILLPFSKFILTYFIYGGFLDEVPGFTYAFLMSLHSFLVRAKLFQLYENKKNR

SEQ ID NO: 75 - protein, 249 aa, Gallaecimonas xiamenensis
MRLSAVIITKNVAQDLPQCLASLDFVDEIVVLDSGSSDQTLALAEAAGAKVFQSQGWPGFGPQRQLAQQHAQGEWLFWIDADEVVTPELKAAILAAIEDSTPGVVYRANRLSDFFGRFIKTSGWYPDRIVRLYRRSEYRYDDALVHEKVACQGAKVKDLPGHLLHYTTGDFTSYLQKSVRYANDWAEGKAKRGKKAGLLSACLHGLAAFLRKFVLQRGFLDGKHGFLLAMFTAHYAFNKYAALWIKSRR

SEQ ID NO: 76 - protein, 261 aa, Marinomonas sp.
MKISGNIITLNEEANIADCIKSIKKVCDEVIVVDSGSTDRTIEIAESLEARVIHQAYLGDGFQKNVALKEVKNEWVLSLDADERLTDEMVRDIQSIDFKNSKFDAFAFRRKNMIGSRWIKQCGWYPDYCTRLYNHNKTKFKEVKQHSSVPASSLKKFNSDIIHFSFKNIGELFAKPGRNFSGRAAKIMYAKGKKANAFSPFLHGLNAFIRKYIFQKGFLGGVDGMTVALSSAVNSYLKYAKLLEYQRDKSVTEQNDFKNIW

SEQ ID NO: 77 - protein, 294 aa, Unknown
  Description of Unknown: Myxococcales bacterium sequence
MPHARAKSKIVTDIAVIILTYNEESNIAQALESVQGWSRQVFLLDSYSTDRTLEIAGRYPCTIVQNRFENYSKQRNFALEHLPIVSEWVFFLDADEWIPPELREEISTLIASNPPENGFFVKWRLFWMGRWIRRGYYPTWILRLFRFGKARCEDRSINEHLVVEGGTGYLKNDFIHEDHKGVTDWVAKHNGYATREASELLIRSSSDLQIDVRLWGTQAERKRWLRYRLWNNLPPLVRPFLYFVYRYVFRGGFLDGKAAFVYHFLQGLWFPMLIDIKYLEMKYGRENQAEVINV

SEQ ID NO: 78 - protein, 249 aa, Polaribacter butkevichii
MTKITAIIPTLNEEIHIEEAIQSVKFADEIIVIDSFSTDKTLEIAEQYNVKIIKRKFDDFSSQKNFAIQQAKNPWIYILDADERVTPEVEKEVLDAVKKPNGVVGFYVRRSFYFCERKVNYSGFQSDKVIRLFLKENCKYTGLVHEKITANGEIGFLKNKIDHFSYRSYDHYISKLNHYAAIQAKELHQKGKRVNIYHVIVKPTARFFIHYFIRLGFLDGFTGFLVAKIQAYGVLTRYIKLWLYNRKIK

SEQ ID NO: 79 - protein, 269 aa, Unknown
  Description of Unknown: Candidatus Omnitrophica bacterium 4484_70.2 sequence
MEKLKLSVVILTKNEEVRIVDCIKSVIDWVDEVIVVDDESSDKTVEIAKSLGAKVLIKKMEVEGKHRNWAYNQARNEWILSLDADERVTEELKGEINAVLSKDTVYDAFTIPRKNFIGNYWIKGGGLYPSPQLKLFRKDKFRWEEVEVHPRAFLKGKCGHLKSPLLHYTYRNWEDYLRKLNRQTTLEALKWYKLSLKNPKKARYKMNLIHALWRAVDRFIRVFIVKKGYKDGFIGFMIAYFSSLYQIVSYAKYREYTKRKIDICSDMKC

SEQ ID NO: 80 - protein, 253 aa, Unknown
  Description of Unknown: Candidatus Levybacteria bacterium GW2011_GWA2_37_36 sequence
MKICISAIVLAKNEEKNIADCLKNLKWCDESIVIDDNSTDETVKIAEKNNAKVYSRSLDNFSNQRNFGITKASGEWMLFVDADERVSGALAFEISNVLSSWTNEIDNEYKGFYIPRFDVIWGKELRYGDSGVKLLRLAKKNAGKWEGLVHEKWKINGKIGSLKNRIIHYPHQTISEFLSEINFYTALRAKELYSRKIKVNILSIILYPSCKFVLNYFLKKGLLDGIPGLMQALLMSFHSFLVRGKLRLMWNSK

SEQ ID NO: 81 - protein, 359 aa, Legionella beliardensis
MLSVIIISKNEEANIKRCLESVSFADEIVVLDSGSTDKTIEIAQKYTENVYTSEDWYGYGVQKQRALNLATGDWVLNLDADESVSEHLRTAIEEAMESDEADAYRIPICMNFYGKPLRYSSSPTRHIRLFKREGARYSDDIVHEKIILPAEARISKLTLPIMHHSFRDVSHALYKINRYTSYSAKIRSQKGDPPGIVKILFSTGWMFFRCFYLQRGFMDGVAGFLLAVFNAQGTFYRGIKQLYPDVRHTISMSPDRKDIQAVPSLPDKSADEVEDKPLPQEQLTTESESIIEVTEPNQEATDNDEKLPVEEVIEHDAFLQREQDEPLEEDVIEPEDIFEEEEAIEQDKLLVNKQSSEEK

SEQ ID NO: 82 - protein, 248 aa, Nitrospina sp.
MISVTLMVKNGEKNLADCLESLRPFDEVLLVDTGSTDRTLEIARTFENVKIVEHDFIGFGPTKNLAAGLARNDWILNIDSDEVLTAELARALLALEPSPNAVGRFPRQSYYNGKWIRGCGWYPDKIIRLYNKTHTAFNDNLVHESIRVKPGMAVTDLEWPVKHYPYDSAASLVDKFQFYSTLYADQNKGKIRSSPLKAVTRGGAAFFKGYFLRRGFAEGYEGFLIALCQGLSTYFKYIKLHEANKNAH

SEQ ID NO: 83 - protein, 335 aa, Cohnella phaseoli
MARCLCSAAAMVDEIIVVDTGSTDQTREIALEYGAKLFHFEWCDDFSAARNYALKQASGDWLLVLDADEYFVEESADAIRAFTRSTSRRIGLIEIVSKFVEDGHTFEGIHSNPRLFPRGVTYEGRIHEQPTPILPMVETGLRLLHDGYYMTDKSDRNIPLLLKALKDKPGSAYLNFQLGRQYQGMKQHELAVQYLEKAYALLRQTDPIAIENITELLQAYTKCKRYDKAMELVGDEVAWLERSPDFCFAVGQFLLDYAIDSQDYSVIENIENSYLKCLELGRRGVSETVVGSSTFLAAYNLAVFYESVGNKTEAQQYYGLAASYRYGPAVARVKG

SEQ ID NO: 84 - protein, 252 aa, Pseudodesulfovibrio indicus
MRETVTGLVLTYNGERWLEQCLKSLDFCDELLVVDSESTDRTREIAERCGARVLVRAWPGPVDQFKFALKEVSTTWVVSLDQDEILTDELRESIRTALGRKEHLAGYYVPRSSFYFNRFMKHSGWYPDHLLRVFRCGQMEVSASGAHYHFKPRGETKKLAGDILHYPYESFRQHMDKINYYAEEGATALRAKGVSSGPGKALLHAVMRFIKLYLLKLGFLDGTAGLCNALAGFYYTFQKYIRVNEKGKWGDA

SEQ ID NO: 85 - protein, 278 aa, Pontibacter korlensis
MPLLDLTIAIPVRNEEKNLPGCLRSIGKDLAQKVVVIDSGSTDKTKEIAKHFGAEVLEFCWNGKFPKKRNWFLRNHRPKTKWVLFLDADEYLTQKFKEELRQALARDDKVGYWLSYTVYFLGKQLKGGYPLFKLALFRVGAGEYEQVDEEQWSQLDMEVHEHPILQGEIGTIRSKIDHQDFRGVSHYMLKHIDYAGWEAARFLRSSGKASLAANVNLTWRQRLKYRLMRSVFIGPAYFCGSFFLLGGFKDGARGFAFAVLKMSYFVQVYCKIRESKNV

SEQ ID NO: 86 - protein, 253 aa, Unknown
  Description of Unknown: Fusobacterium perfoetens sequence
MKLSVAMITLNEEKILEKTLKSLENIADEIVIVDNGSTDNTKNIAEKYGVKFFQEEWKGYGPQRNSSIDKCSHEWILNIDADEEISPKLAEKIKEIKENETEKKVFEINFSSVCFNKKLKYGGWSNQYHIRLFRKEAGRFNYNEVHEGFETKEKIYRLKEEIYHHSYVSLEDYFNKFNKYTTLGALEYYQRGKKPSNFQIIFNPIFKFLRMYIIRLGFLDGIEGLMIATASAMYSMVKYFKLREIYRNGSYKK

SEQ ID NO: 87 - protein, 250 aa, Unknown
  Description of Unknown: delta proteobacterium MLS_D sequence
MSLSVVIITKNEETAIEACLDSVAWADEIIVFDSGSTDRTVEICHRYTERVYETDWPGFGPQKNRAMAQATGDWILSLDADERIPRELQEEIQQAVADPDAPEAFEMPRLSSFCGRPIRHAGWWPDYITRLARNGSARFSDDLVHERLIIEGTTGRLTNPILHEAFESLEDAIETMNRYTTAGALMMRRRGGSSSLWKAVSHGLWSFVYSYIGRGGFLDGREGFLVALYVAEHTFYRYAKRLYLKDDQTQ

SEQ ID NO: 88 - protein, 260 aa, Unknown
  Description of Unknown: Chryseobacterium viscerum sequence
MTLSLAIITYNEEENIVRLLDSLVDIADEMIIVDSFSTDRTKEIATQKYPQVQFFEKKFNGYGEQKNHALSLCSHEWILFLDADEIPDETLKRSIQKIVSSANPEFNVYKAKFNNHLGSHLIKYGGWGNVYRERLFRKKYAMYSDDKVHEFLITDEKTGVLEGRLDHYTYKSIHHHVSKINKYSDMMAEKMFERGKKINRFKIIVSPIFEFIKVLIFKRAFLDGFPGFYIAKTMSYYTFLKYIKLREKIRLMELEKKRLK

SEQ ID NO: 89 - protein, 257 aa, Unknown
  Description of Unknown: Candidatus Thermofonsia Clade 2 bacterium sequence
MHKLSVLIPAFNNISLMPDLLDDVAWADEIVVVDSFSTDGTVEYARERGAKVIQHEYINSASQKNWAIPQCAHEWVLIVDTDERLPPELQDEIRALLKNGIPDDVDAYRVARKTIFIGEWLRVMRLYPDYQTRLFRRDKARYEDKEVHADIRVPGRVETLNVPLIHNSTPTLSKQINLLDRYSRYQADELAKRGVRFRWYNVTLRPLAVFAYLYLFQGGWSAGMRGLFIAFHTMAYVFFTHAKLWEKEWQAKQTSAR

SEQ ID NO: 90 - protein, 265 aa, Kosakonia oryzendophytica
MFKVSVCLLTYNSARLLREVLPPLIIVADDFVVVDSGSTDATLDICRDYGVNVHQRPYDMHGQQMNYAIQLAAHDWVLCMDSDEILDDRVVDFILKLKAGHEPLRDHAWRLPRYWYVLGQEVRTLYPISSPDFPVRLFNRQCARFNDRPVDDQVVGALTCAKMPGRVRHDTFYTLHEMFNKLNGYTTRLVKYNPVRPSITRGIISAIGAFFKWYVFSGAWREGKVGAATGLYATLYSFMKYFKAWYAHAEEKSSARTKEHNKRVV

SEQ ID NO: 91 - protein, 245 aa, Unknown
  Description of Unknown: Methylococcales bacterium sequence
MLSVIIITKNEAVHIGRCLESIAWADEIIVLDSGSDDDTVSICRRYTDKVYETDWPGFGLQKQRALDKATGDWVLSIDADEMVTAELRAEIERVMQENKLQAYEIPRLSSYCGRQMRHGGWWPDYVLRLFRRDVGRFSEAAVHEKVLVEGKVGQLVSPFHHETAVNLEEILDKVNSYSSLGAQMLHEKGVRSSVSKAVLKALWMFNRTYWLKAAFLDGRQGLMLAVSNAEVTYYKYLKLLELQDK

SEQ ID NO: 92 - protein, 265 aa, Maribacter sp.
MPQGKEKLSALIITYNEMGYIEKCIESVSFADEIIVVDSYSTDGTYEYLLNHPKVRVIQNPFKNFTAQKSFTLKQANNDWVLFLDADEIVPANLQNEISNTIKSSPKHVAYWFYRKFMFQNERLRFSGWQTDKNYRLFRKSKVNFSDKRIVHETLDIDGTTGKFKNKLTHFCYKNYETYKNKMLMYGRLKAKEAHNKDNRFSYALLLIKPMWKFFNGYVIRLGFLDGIKGITICHLDALCDLERYRELQRLEREEQWSTVFKTMP

SEQ ID NO: 93 - protein, 970 aa, Selenomonas ruminantium
MFALTNKYICIYFLTDICMEKSAMKISACYITKNEEKNLSRSIDTIAAAVDELIVVDTGSTDKTRNVAKSYGAKVYDYVWQNDFSGPRNFAIEQATGDYILFIDADEYFSAETCGNLRKVLEDNKAYDALLIKRYDIDHNEDDIMGEIFVLRAFKHKSNLCYQGRIHEELRDDGRIINNIAMLGPDLLKLYHTGYETAVNQAKAERNLHILQEEIKVADNPGQYYMYMAEACRGVGDYVAMEHYARLDIAQGRRQVAFASRSYRMLLAYLAEQGRNTERYKMAAEAVKEFPELPEFWAELAACQAEIYEYEAAIKSMTEALERDKIFPTLSLEPKEFSTDMSVVAAEKIYEWQELVKATGKLKITTCLIAKNEAQEIGAWLANAAVFSDEIIVVDTGSEDRTVEIAQKAGAKVFSFVWQDDFAAARNYALTQVRAEADWVVFLDADETFYEPQRLRGALAYVAQFGSDSEGIQVPIVNVDVDAWGREIQRFRALRIWRNNSAFRYQGAIHEALYNKCGEIKQLYMAELAVCHTGYSSGRIQQKLNRNLQLIMKEMQEKGEQPLHYRYLADCLYGLHEYELASAYAQRALAAEVPTIAGDGELYRLWLHCARKLKQPAETQLHIIATAHSRGLDDMELIGWQGIICTEMGAYQQAKPLLEQFLQRATSQNLTAGSNAVQGMLAEAYAAKASCHAYLGEKKAADVAWQQAVRENPYNEEILHAFYEWLHLSPQAFLKQVLPYFSDREQGKKYIAEWAVKFGYGKVMQVLAVYLPQNQQKLLKQWLDGDKGTVGKQAWLEATVCVQELLAALVAMPAEKRKTQSVDCHEWAAMLPPGWQRIIGRLYGWQEQLSAGDWPDYLAGLTAIQGFVGDDSYQEYARLALDFSWEKVCEIADKLTEQQYWQAAYSLLAEIPNASIPDDAAFWYQTGRCLYHLQEMTAAGECFARAAEAGSRQPDLSAYQDWVARRERRQ

SEQ ID NO: 94 - protein, 260 aa, Unknown
  Description of Unknown: SAR86 cluster bacterium sequence
MTEHKPIPVSVYVITKNEEENIVGLLDKLQNFAEVIVVDSGSTDRTVELAEAYSNTKVSFNQWPGFGEQKSHALSLCTFPWVLNLDADESLSDSFVEELEEFITQDKLVALRSTRILLRWGSQPRSFGKAEKLIRLFKKEHGYYESRQVHESISINGGIKESEVAILHHENLSYSQRIEKTVFYAKLKAQDKFNKGDEISILVVLLIFPLTFIRTYLFKGHFLDGFGGILTSVNVALYNYMKYANLWDMNKKSSENSTKE

SEQ ID NO: 95 - protein, 258 aa, Unknown
  Description of Unknown: Candidatus Roizmanbacteria bacterium CG07_land_8_20_14_0_80_34_ 15 sequence
MRISAVILTKNEENNINRCLKSLDFCDEIIVIDDYSTDKTIDIINNVGNKNICSLHKRKLNNDFASQRNFGLKKASNEWVLFIDADEEVTNELAKEVRSYVLDGDWKESEAFYIKRRDFFWEKELKYGEIKKVREQGIIRLVKKNSGHWMGEVHEVFYPANKKVGQLNGFLNHYPHQASTEFINDVNRYSSIRAEELFNRGTRTNVFQIIFFPLGKFLYNYFFNLGFLDGPAGFTYSFMMSFHSFLVRAKLYQMTNKK

SEQ ID NO: 96 - protein, 264 aa, Arenibacter algicola
MLDQKEKISALIITYNEMGYIEKCIDSIEFADEIIVVDSYSTDGTYQFLQKHPKVKVIQNPFVNYTVQKTFALKQATHDWILFLDADEVVPDNLKKEIKTKAVPHSEHSAYWFYRKFMFQNNRLHYSGWQTDKNYRLFRKSKACFCDKKIVHETLIVNGTSGVLREKLVHFCYKNYSDYKLKMLKYGRLKAKEAFYREKKFYYAPLILKPIWKFFHNYFLRLGFLDGKKGITICYLNALGDYERYRELKILWKKNEIARYLAMP

SEQ ID NO: 97 - protein, 252 aa, Unknown
  Description of Unknown: Chryseobacterium sequence
MKNPKISALLIVFNEEKNIEEALNSVEFADEIIVLDSFSTDKTVDIIKNQFPKVKLYQNKFEDFTKQRNLCISYAKNDWILFLDADERITPELKNEILKEIKKPITQKAYFFKRKFFFMGEKVNYSGTQNDKNIRLFKKEVAHYDENKRVHEGLSNVDNPGTLQNYLLHFSFDSYEAYYKKVIHYAKLKAKDLHEKGVHYQIIKQLSKSAFNFFKMYFLKLGILDGKKGLILSYLSALSSFKTYEFLKKEYS

SEQ ID NO: 98 - protein, 338 aa, Desulfamplus magnetovallimortis
MRGFSTLPIHSRSPVATDYGNKISIPTVNQNEKKAPMVKISVYIIAYNQETKIRPALESVTWADEIIVADSFSSDRTAEIAEEYGAKVIQIPFKGFGDLRNKAIFACSHEWIFSLDSDERCTPEARDEILSIIQRFSLHNSDYSNSLSEEEEKKRRSEEDRGKEKDRGNRKSVGEKLHDLYYVPRKNFFMGKWIRHSGYYPDYRQPQLFRKGTLVFKSDPVHERYDIISENRAGRIRSPIHQIPYLTIEEMLAKKNRYSTLGAIKLEKEGKSCGMFTALMHGIWSFIRTYFLKAGFMDGWPGFVIAFGNFEETFYKYVKLYEKNMKLGHLDSNSHGQG

SEQ ID NO: 99 - protein, 295 aa, Pedobacter miscanthi
MNPNFSFIILTFNEEIHLTRLLDSIKQLSAPTFILDSGSTDKTLVIAAAYNAQVQHHPFENHPKQWDFALKNFKINTPWIIGLDADQMVTPELFAKLSDFKNEEYSDVNGIYFNRKNIFQGKWIRYGGYYPMYQLKMFRKGIGFSDLNENMDHRFIVSGNTQIWKDGHIIEENLKENDLSFWYAKHQKYSELVAKEEFERLMGLRTSALHPTLLGNPDERKAWLKKLWWQLPLYIRPYLYFTYRMLFQLGIFEGKNGIKFHYMQGLWFRLQVDKKLNILKKRNKVPYERNQSKRS

SEQ ID NO: 100 - protein, 264 aa, Unknown
  Description of Unknown: Candidatus Roizmanbacteria bacterium CG_4_10_14_0_8_um_filter_39 _9 sequence
MQKITSIILTKNEETNIERAIKSLAFCDEIIVVDDGSTDMTVEKCQMTNHQSQINSKIQIIKHESNGDFATQRNWAMKQASYEWILFLDADEEVSDELQKEIISSIGAPENDTSSYFLKRRDYFWSQELKYGEILKLRNRGLIRLIKKGSGKWGGKVHEEFIPDRPLVHRVGGPLAYINHYPHPTLKEFISDINVYSGIRAQELHEAHVQAGAFEMVIYPVFKFILNYFVYLGFFDGPQGFVYSFLMSFHSFLVRAKLYQLNTD

SEQ ID NO: 101 - protein, 251 aa, Unknown
  Description of Unknown: Candidatus Rokubacteria bacterium sequence
MTRLGVSAVVITFNEEERLRDCLESLAWADELIVVDAESSDKTVQIAREFTDRVWVRPWPGFASQKNFALEQATRDWVLSVDADEEVSPELRAEIGRVLEGRGEAADGYRIPRRNIFWGHWVRHGGLYPDWQLRLFQRGRGQFVDHAVHESVKVTGTVGRLGAPLVHRSYRGVTDFLARADRYSTLAAEAWVRSGRPVRLSDLVLRPAGRFLGMYVARAGFLDGWRGFLLAALYAYYVFVRSAKVWERARG

SEQ ID NO: 102 - protein, 330 aa, Unknown
  Description of Unknown: Candidatus Shapirobacteria bacterium CG10_big_fil_rev_8_21_14_0_ 10_48_15 sequence
MAKLSVILATYNEEANIGACLKTVQGLADEIIVVDGFSRDQTVALAKKAGAKVFVKPNLLMFHQNKQLAIEKATGEWILYLDADERVSPELKKEILAVIGSCSTLEEASSATSQEELGLNNSSAGGRRPPPRSCAGYWLPRKNIIFGKWLKHTGWWPDRQLRLFKNGSAKLPCQSVHEQPELKGEAGELKNPLIHQNYQTVTQFINRLNHYTDNDKNVFLKTGREIHWIEAVIWPAQEFLRRFFQQKGYQDGLHGLVLSLLQAFSSLVTFAKIWEAKKFPEAALDLDKLAKTKNNLAGEWRYWFLTSKIDQTDNYLKKIIHQFERRLIGV

SEQ ID NO: 103 - protein, 292 aa, Unknown
  Description of Unknown: Candidatus Woesebacteria bacterium GW2011_GWA1_37_7 sequence
MTKTEKHINIKTKKPKISAIIIAKNEEEKIAECLNSLQWCDEIIVVDTGSTDRTKEIALKHKTLVREYNGGSYDDWRNTGLKFAKGEWVLYIDADEGVSPELREEILNIINYPKGKYNAFAIPRKNIVLGKELRHGGFGKFDYVKRLFIRKKLVKWTGELHEEPNFYYNGRLTIGRSNELGYLSNKLIHLKASTISEMVEKTNKWSDVEAKLMYTADHPPMNILRFLSAMAREFWFRFIKEKAFMDGGVGIIHGIYQIYSRFISYAKLWEMQMYNTNNSNSTNLRTISKTKL

SEQ ID NO: 104 - protein, 259 aa, Unknown
  Description of Unknown: Candidatus Kentron sp. FM sequence
MGAIADVAIVDSFSSDETLPLAETVRPDVRVFSHAFKDFGDQRNWALEHCAPRHPWVLFVDADEYCTPAFLEELAAFVAAPGNYAGAFIAGKSHFLGRWVKYSSLYPSYQLRLLRLGQVRYRKEGHGQKEVTDGALCYFTEGWRHEGFRKGVYQWIERHNRYGTEEVGSILELRKEPIGWRELFSHEPIKRRRCLKRIGAKLPLRPLVRFCYVYVLKRGFLDGMPGLLYCLLYLCNDIHLIVKIREQRYRGNGELGIRN

SEQ ID NO: 105 - protein, 255 aa, Legionella sp.
MLSVIVIAKNEEANIENCLQSVQFADEIIVLDSGSSDKTVSIAKQYTDKVFETDWQGYGIQKQRALDKATGDWVLNLDADETVSIELQQEIKKVTARDEADAYRLPIQMVFYNQPLKYSYSPKRHARLFRRQGAAFSSDIVHEKVILPSHARIKKIKIPLLHHSFQDVSHVLYKLNKYSSYSAKIRIANKKTPGLIKILLATSWMFIRCFILQRGFLDGRLGFLFAVFSAQGTFYRGIKQIYQDANLHHLPELNT

SEQ ID NO: 106 - protein, 288 aa, Unknown
  Description of Unknown: Candidatus Cloacimonetes bacterium HGW-Cloacimonetes-2 sequence
MARLWVVVATKNLWAVANGISICTGCSSNHRGSVKHSVSAFVLTQNNEATIRACLDSVTWCDEIVIIDSFSTDRTLEIAREYPRLKIYQNEYTTAAEQRIWGNPHVTSEWVFIIDSDEECPPDLRDKFISILEQDKIENDGFVIRIRTRFMGRLLEHHDYISAKGKRLVLKEVATRYKKTASVHATIKLDHIAFIEPKYYLIHNPIRSLDLHYQKMIRYARWQAQDMHVSGRKAHWWHILLRPIGKFMQFYLVYGGFRDGLQGLLICLLAAYSIFLKFSLLYDLQRQD

SEQ ID NO: 107 - protein, 255 aa, Unknown
  Description of Unknown: Candidatus Hydrogenedentes bacterium sequence
MRKKLTILIPTYNEERNIRGAIECSRWADEILVVDSFSTDATPQIAAEMGARVLQHEYVNSAAQKNWAIPQASCEWVMVLDADERIPPALRDEILAFLENPGDVAGLRIYRDNHFMGRRIRYCGWQDDSVLRVFPRDRGRYLEREVHADVVVDGPVKVLRNKLYHNTFESFDQYMRKFDRYTTWAAGDRAKTTRKVTAVHLFLRPAWRFFRQYFLRFGFLDGRAGLIICMLAAFSVFLKYAKLWERQEREQRERK

SEQ ID NO: 108 - protein, 253 aa, Campylobacter hominis
MIKASVYAIVMNEEKHIERMLKSVADFDEIIIVDSGSTDKTLEIAKKYTDKIYFHKWQGEGFQKNYAFNLCKNEWVLNLDADEEIEPALKIEIGNFINQSEFNGLDIKFQEYNMGFIVSPFVKKNTHIRFFKKSSGKYENMGVHAQISINGKVKKSKYSIHHFSDKFIYELVVKNNNYSTLRAKSDFEKGKKPNFLKLIFIFPFMFFKSYFLRRSVFNGKRGFITSVINAFYAFLKEAKLYEISYLKEKNEKK

SEQ ID NO: 109 - protein, 457 aa, Clostridium celerecrescens
MFFGGIFYKSGGTYMKSSIRLSQCMIVKDEEQNIQRALSWGKGIVCEQIVVDTGSTDRTVEIAEALGAKVFHFSWNNDFSAAKNFAIEQAGGNWIAFLDADEYYSDEDAKKILPLLRQIEKDFPIALRPHTIRSLLVNLDDAGRSMTTGVQDRIFRNIPKLRYRNKIHEHLDLPGTQQFRHYDATEILAIFHTGYATKIFKEKDKEERNISMIKKELEENPENYVMWSYLGDSLLCANRLEEAEEAFLHMAENPDVTMTVDRKSLNFTNLLKTKYHRYIDSDEGFMAIYQKAKDCGCVTPDIDYWAGEWFCRRGDEEKARLYFEQALRMLEKYEGNDPLNISSRLFNIYQWLFLSYSKLKNPSEMIRYGILALRVEPYQVSILKEILLLLKGEPGEEETAVNTFGFLSKLYDLTSFKNKVFLVKVSEQVSFSALEKQVYSLLSDREREYLSKAGDIF

SEQ ID NO: 110 - protein, 275 aa, Unknown
  Description of Unknown: Candidatus Beckwithbacteria bacterium CG23_combo_of_CG06-09_8_20 _14_all_34_8 sequence
MNHIKLSVVLATYNEESNIKDCLSSVKDIADEIIVVDGKSVDKTAQIAQQLGAKVISVANNPQFHKNKQMAINSATGEWILQLDGDERVSPELAKEIRKVINDKQNKLDAYYLPRKNWFLGRFLTKGGAYPDPVLRLFRRGKGNFTHTKIINNGITTSNVHAQIEVGGQTGRLNYNLIHYGDISFSKYLMRLNRYTQLEAENLVLLKFKPNFLHLINYMICKPIYWFTKRYIRHRGYVDGYQGLLFALLSAMHYPVIYLKLLEHQHQEKYVTKTK

SEQ ID NO: 111 - protein, 268 aa, Unknown
  Description of Unknown: Microgenomates group bacterium GW2011_GWC1_44_37 sequence
MKLSVIILTYNVEDEIIPAIKSSQFADEIIAVDTGSTDGTLDICRKNGVKIVHTTTDSFSKWRNDGAKVAKGEWLLYLDSDERIPVKLAKEILATIQSPQHSAYTISRYEVFLGKHLNHWGDPRVLRFMKRSALKRWEGKLHEQPKIDGTIGDLRQQMVHLSHKNIDEKLPNTLLWSKTEAKMLYDAGHPPMVGWRFIRIMFTEFWNRAVRQRLWRDGTEGWIEIIYQMFSKFVTYERLWEMQRKPSLKETYDNIDKQILNEWSDKKL

SEQ ID NO: 112 - protein, 302 aa, Phycisphaera sp.
MSSPDTSRSNIEFLILTKDEEINLPHTLEALLPWADRVHVVDSQSTDLTREIAEEYNQKHPGKVNTVIQPWLGYAKQKNWALDNLPFESDWIFIVDADEIVLPELRDELLDIAAKNPDVVKESGFYINRYFIFLGKRIRHCGYYPSWNLRFFKRGKARYEEREVHEHMIVEGEEGYLKGHMEHNDRRGLEVYMAKHNHYSTLEAREIHSVITGASEQSEHLDAKLFGNNLQRRRWIKHHFYPKLPCKWIFRFLWMYFLKLGILDGVTGFRFCLFISAYEMLIGLKIMELQIEERERRAGSAK

SEQ ID NO: 113 - protein, 254 aa, Unknown
  Description of Unknown: Muribaculaceae bacterium sequence
MAHISVTIITYNEEHRIEACLKSLQDIADEIIVVDSFSTDRTVEICNAYGCKVTQRRFPGYGAQRQYATSLTSYSYVLSIDADEVLSPALRSSLIKLKEEGFAHRVYEMSRLNFYCGQPVKHCGWYPDIQIRLFDKRYANWNLRDLSERVIFPDSLKPVLLDGDILHYRCSTPDEYRKVQNRHAALSSGIIKARRSAVPFFTPYIKGVKAFLECYISKGAILDGPEGRAISRESYRTAYMAYDLARRSLRKKQQ

SEQ ID NO: 114 - protein, 261 aa, Unknown
  Description of Unknown: Verrucomicrobia bacterium sequence
MREKISACVIAFNEERKIRRCLQSLTWCDEIVVVDSFSTDRTVEVCREFTDRVYQHEWLGYVGQRNTVREMARFPWILFLDSDEEVSPGLREEILGHFARGPGETVGYEFPRQVYYLGRWIRHGEWYPDLKLRLFRKDCGRTEGQEPHDKVVVNGPVKRLRNAIWHYTYDDLRDHFETLNRFSSITAQQKFVQGGRFRWRDLLLRPPLRFLRGYFLRAGFLDGTHGFIIALASAYGAYMKYAKLWELTLREQKPFKDLPED

SEQ ID NO: 115 - protein, 351 aa, Unknown
  Description of Unknown: Clostridiales bacterium Marseille-P2846 sequence
MIVRNEHRHLMRCLKSAEEAVDEIVVVDTGSEDDTREIARGFTPWVYDFEWQDDFSKARNFSFSKASQDFILWLDADDMIEPEDAQKLIELKKTIGKTADVVMLPYRIGFDDRGIPTMTYYRERLLRRSMNFRWEGAVHEAITPAGRILYADAAVSHRKEGTGDSDRNLRIYEKLLAQGKQLGPREQFYYARELSDHGRFAEALAAFEAFLEQPDGWIENRIDACRGAARCLSALDRKEEAQAMRFRSFAMDVPRAETCCEIGAAFLEAQNYRAAAYWYERALTCQADTRSGAFVQPECYDYVPLLQLCVCYDRMGERMLARQINERVGERWPDDPSYLYNKAYFERAGRA

SEQ ID NO: 116 - protein, 284 aa, Methylacidiphilum kamchatkense
MYISVVILTYNSEKTISSTLQSALAVSDDIHIVDSYSTDNTLKILNAYPVHIIQHPFENYAKQRNYAIENLPIKNNWELHLDADEKLTPGLIQELKDPTLFNQEQIDGYYLPRIVRFLGKIIKHGGISPTWHLRLFRRGKGHCEDRLYDQHFYVRGQTAKLSGTMIDDIQMDLTEWIQRHNRWASLEAQEIYYNLNNGKNIKAKWQGNPVEQKKALKQLYYKLPLFIRPFLLFGYRYFIKLGFLDGFEGLIFYVLQTFWFRFLIDAKLWEYSKKEKFPNHLVKQ

SEQ ID NO: 117 - protein, 260 aa, Legionella pneumophila
MLSVIIITKNEEANIRRCLESVHFADEIIVLDSGSTDNTLAIAREYTDKVFSTDWQGYGIQKDRALRKAKGDWVLNLDADESVSPELRQEILQAISSDTADAFRIPIQMIFYNQVLKYSGSPKRHIRLFKRENASYSKDIVHEKVLIPANARVGKLKKPIWHHSFQDVHHVLYKLNKYSSYSAKIRIESNENAGLVKTFFSALWMFVRCLFLQKGFLDGKAGFLFAVFGAQGAFYRGVKQIYKDKDINKLPGVNLIEEEK

SEQ ID NO: 118 - protein, 305 aa, Helicobacter fennelliae
MIDVKINNAKKISICILVKNAQGTIKECLKALKDFDEIILLDNESTDSTLEIARGVSEEWTRDSRIVGNLEHEDSKDSKNSAKPAKPATIRIFSSPFLGFGALKNLAISHARNEWVFVVDSDEVIEQGIYAELETLDLSCVRAIYALPRKNLYAGEWIKACGWSPDFVLRIFNKSYTHFNENLVHESVILPSDSKKHYLKTALKHYAYDDVAHLIDKMQHYSNLYAKQNLGKPSSPTKAFVRGTWSFVRNYFFKKGILYGYKGFIISVCNALGTFFKYIKLYELNTHTHTQFVRSSLRHIIKKRD

SEQ ID NO: 119 - protein, 245 aa, Lacinutrix mariniflava
MIKLSVIIPTYNEEMYLEKALRSVRFADEIIVVDSMSTDKTVAMAEKYNCKVLHRKFDNFSNQKNHALQYATGEWVLFIDADERIPNPLQQEILAAMASGKHAGYKLNFPHFYMNRFLYHHSDSVTRLVIREKCHFEGSVHEKLIVDGTISKLENPVLHFTYKGLQHYISKKDSYAWFQAEQMLKKGKKATYFHLAFKPFYRFFSSYVLRGGFRDGVPGLTVATINAYGVFSRYVKLMLLERGIR

SEQ ID NO: 120 - protein, 603 aa, Massilibacillus massiliensis
MKISACIIAKNEEYNIGKCLKSMKPIVDELIVVDTGSTDQTLEVARSYGAKVYAYTWKNDFAKAKNYAIEQAKGDWIIFLDADEYFSEDTVKNVRSYIEKLHLNKKCHAICVRIINIDVDQDNRELSSFVNLRIFRNAPHFRYRYELHEELYNTKGRLEIFILSDVIEVYHTGYSSHIVEKKLERNLAIIQEEVKKHGESPRYYRYLCDCYHGLQKYDEAVKYGRLHIQSNISSIANESTVYTKVIDSLIRSNAEPSEIKNEIEQTIQIFPSIPDFYALYGRYLCEQKEYEASIQYFLKALEINKKKDIYEADSFHGKLTNLYCALGELFFLKNQYDKAVQYYCESLIAYKYNASALQRLYFLICRYESIEIISILNRVYARTKRDIKFIVDNLQHYRMNKVFVYYSNILNQEFSVASEYMWQNQMIGLKNYAKLYEKSADGLSERMLLLAVTLIVSDDESKVNQYKMILPNRYESIIIRFYDETVQLDENNFEGYKEILQELCTLDTERLDHYISCGEDFGKEKKVEIAQILTDHSFYKQALRLYQSLFDNDKTKYDIAKKIGYCYYKQFMYKEAMVYFEQAIENGCKDQEIVQLYKWSREK

SEQ ID NO: 121 - protein, 256 aa, Unknown
  Description of Unknown: Chitinophagaceae bacterium sequence
MRISVVIITYNEEKHIERCLRSVGKVADEIVVLDSISADRTVEIARRYGAVVYSQPFAGYVAQKNRALELATNDYVLCLDADEALSEELAESILRMKEQDKAGTWKMNRRAFYCGAYITHGAWYPEPKLRLFDRRRMKWGGYDPHDRVIPPAGVNVGKMKGDLLHYICETVEEHERRSRNFSTIASRSLYKAGIKTNWLKMIGSPAWFFISDYVFRGGFLGGWRGWKIATIQTKYHFEKYRKLYRLHKQQDLNKPV

SEQ ID NO: 122 - protein, 249 aa, Arcobacter trophiarum
MNISTVVLAKNSEKTIEKTLKSLVDFDDVIVYDNGSTDETINIAKKFSNVNLIQGEFKGFGWTKNCASSFALNDWVLIIDSDEVVDRELLNELKTKKLDKNIVYRLNFKAFYKDIQVKHCGWNNQKIKRLYNKTITKYNSNDVHEDIITDGLNIEEIKGNVEHYSYHTISEFIIKADRYSTLFATNNTGKKASSPTKAFLNSIYSFFRTYIIKQGFRDGYVGLVIAYSHAVTNFYKYIKLYELNKELKK

SEQ ID NO: 123 - protein, 347 aa, Unknown
  Description of Unknown: Eubacterium plexicaudatum ASF492 sequence
MLSVCIITKNEKENLERCLKQLSGYGFEIVVADTGSDDGTVQMAQQYTNAVYEFEWCGDFAKAKNYAVSMAKNNTVLVIDSDEYMRTPDLDKLKQQIAEHPTAVGRIEIINQIRQDHEIRESREYVNRLFDRRYYHYEGRIHEQLVANDGSEYPVYYTVIIIDHSGYLLSEQERSAKAQRNIRLLENVLEEDGPDPYILYQLGKSYYMIHAYEDACDFFARALSYDLDPELEYVIDMVECYGYALLNSGKADQALALEGIYEQFGRSADFQFLMGFIYMNNERFDRAIEEFLKASEHKESRMKGVNGYLAFYNAGVIYECTGNKEKARELYRKCGDYEPAKKRMREI

SEQ ID NO: 124 - protein, 259 aa, Unknown
  Description of Unknown: Candidatus Omnitrophica bacterium 4484_70.2 sequence
MKVPLSVIIITKNEESRIKDCINSVKDWADEVIVVDDYSQDKTRDIACSLGAKVFLRRMDIEGRHRNWANSQARNEWILSLDADERVTPQLKEEISQVLKNPQFDAYTIPRKNFFHNYWIRYSGQYPSSQLKLFKKDKLKWEEAEVHPRAFMDSNPGRLKNPLLHFTYKDFSDMLYKLNKQTTLEAIKWAKISEHNPQKASYKMNLIHALWRTLDRFIRVFIVKKGYKDGFIGFIIALNSSLYQIISYIKYWEIKKFRK

SEQ ID NO: 125 - protein, 317 aa, Calothrix sp.
MSNKVPVSVIIPAKNEEANLPACLASLQRASEIFVVDSQSTDKSAEIAQSYGASVVQFHFNGRWPKKKNWSLDNLPFRNEWILIVDCDERITPELWDEIALSIQNNQPNQPQFDGYYLNRRVFFMGKWIRHGGKYPDWNLRLFKHKLGRYENLNTEEIRNTGDNEVHEHVILKGEVGYLKNDMLHEDFRDLFHWLERHNRYSNWEARVYYNILTGQDDDGTIGASLFGDAVQRKRFLKKIWVRLPFKPLLRFILFYIIQRGFKDGKAGYIYGRLLSQYEYQIGVKLYELRNCNGQLNTAKKQAKSSAPKLQQKQEAI

SEQ ID NO: 126 - protein, 293 aa, Unknown
  Description of Unknown: Candidatus Shapirobacteria bacterium CG03_land_8_20_14_0_80_39 _12 sequence
MKISTVINTYNEEKNIGRCLESIKNFSEEIIVVDMHSTDKTVEIAKKFKAKIFFHEYTRYVEPARNFALSKATGDWILLLDADEELSQSLFKELIKIAKENTVDFVEIPRKNIIFNKWILHSRWWPDYLVRFFKRGKVKFSEEIHVPPVTSGKGQKLLATEENTIVHYNFQTISQFIERFNRYSDIESEQLISKGYDLDWKDIIFRPANEFFSRFFAGDGYKDGLHGLVLSLLQAFSEFVVYLKIWEKDGFKENSIPEIENVFKKVAHDFYFWQGKSTSGLFMRIRLKIKSKI

SEQ ID NO: 127 - protein, 319 aa, Aphanocapsa montana
MTSKLPVSVLIPAKNEEENLPACLTSVARADEVFVVDSQSEDRSIEICEEYGAQVVQFHFNGRWPKKKNWSLDNLPFKHDWVLIVDCDERITDELWDEIAEAIQKPGYSGYYLNRRVFFLGKWIRFGGKYPDWNLRLFRHAHGRYENLHTEEIRNTGDNEVHEHVVVESGEVGYLKNDMLHIDFRDLFHWLQRHNRYSNWEARVYYNILNGMGEDGTIGANLFGDSVQRKRFLKKIWVRLPFKPTLRFILFYFLRLGFLDGRAGYIYGRLLSQYEYQIGVKLFELQEFGGQLNVQKSDAAEPTAEAEQSPAIASAKAQS

SEQ ID NO: 128 - protein, 259 aa, Unknown
  Description of Unknown: Deltaproteobacteria bacterium sequence
MGMGIGISGVVVCFNEEENIERCLKSLTWTDEIVVVDSYSTDNTVSICKKYTDRVYQREWPGINKQKEYAVSLAKNEWVFILDADEVVSEELKEEIIKRLSSDKGKYDGYMVKRHTYYLGRWINHGGWYPDYKLRLFKKQKGYFVGKDPHDKIAVSGDVAKLNGEIYHFTYKDIAHHIRTINSFSDVVANNEKEKERFIIPKMLFKPAIKFLETYVYKLGFLDGIPGFIISVLSSYYVFIKYAKLWEKRFVWHKGLSHS

SEQ ID NO: 129 - protein, 263 aa, Unknown
  Description of Unknown: Flavobacterium degerlachei sequence
MEKVKSTESVPTDIHLSALIITYNEEHNIKQLLQDLDFADEILVIDSFSTDKTVEIAQSFSNVKVSQHVFENYALQRNYALSLAKGTWILFLDADERLTPALKDEIIQTIQNKAEFNSYYFKRTFMFANEKLHFSGWQTDKIIRLFRKENTTYSLQKTVHEKLNTVGDIGKLNNRLIHYSYTDYFSYKEKMTRYGKLKASEEFIKGTKPHFFHFYLRPSFQFINQYLLRLGILDGKKGIIICYLNAFSVYIRFQELKRMKLKN

SEQ ID NO: 130 - protein, 278 aa, Hormoscilla sp.
MFSIYILTYNEEIDIAACIESALLSDDVVVVDSLSSDRTIKIAERYPVKIVQHAFESHGRQRTWMLKEVPAKHEWVYILEADERMTPELFAECVEATKTSEFVGYYVAERVMFMNRWIRHSTQYPRYQLRLLRVGKVWYSDYGHTEREECDGPTGFIKETYPHYTCSKGLSRWVEKHNRYSTDEAAETLRQISAGQINWRDLFCGKSEVERRHALKDLSLRLPFRPIVRFVYMYFLLGGWLDGSPGLAWCTLQTFYEYLIVLKVWEMNHMPPPKLDID

SEQ ID NO: 131 - protein, 259 aa, Frateuria terrea
MRESLSVVVTTYNSEDTLGACLASAAWADEIVVLDSGSSDATIDIAQRHGASLHTQPFAGYSAQKQAAIDLARHRWVLLLDSDEALPADAAAAVQRVLESPCCAGYQLWRREWVFWRWQSPRARLNHYVRLFDRERARMSGHSVHETVQVDGPVGRLDVVLDHYGEPDIAGRVDKANRYSSLQGAEDARRQRAWLGWRLVAYPTIAFLRYYLLRGHWRAGWAGFIAARVHAFYAFLKYAKLHEARVRAAQGTPRHPRQR

SEQ ID NO: 132 - protein, 256 aa, Unknown
  Description of Unknown: Candidatus Omnitrophica bacterium sequence
MKENLSVVILVKNEEQRIAKCLDSVRWADEIIVVDDESTDRTVEIARQYTSKVFTDKKKDIEGRHRNWSYSLARNTWVLSLDADEIVTPELKEEIIQAIRSNPVENGFTIPRRNYIGNYWVRHGGWYPSPQLKLFKRDKFKHEEVEIHGRAFMDGPCGHLKYDIIHYSYRDIEDLIRKLNNQTTWEAQKWHRLHKPMRFGRFFYRSIDRFIRTYIAKKGYKDGFMGFVVAFNGALYQIVSYLKYREIILNEKEKNK

SEQ ID NO: 133 - protein, 258 aa, Unknown
  Description of Unknown: Paraphotobacterium marinum sequence
MNEISLYILTYNSEQYLSKILDKLKNVVDEILIVDSGSSDSTQQIVERYKNTRFIFNKFENFKQQRMFAEKNCKFDMILFLDSDELPCDQLVESIRNIKKSGFEHHAYRIARYWNVLQKDVRAIYPICSPDHPIKLYNRKFCSFKNSALNHASPSGYLSQSIVKGKLSHFTFETKKILKNKVEHYSDMDAKELIRKGKKSNNLKIIFNPVGAFVKWYLIKGGYKDGITGIHLGKYAYDYTKKKYLKAKNYRKNFHTHK

SEQ ID NO: 134 - protein, 267 aa, Unknown
  Description of Unknown: bacterium F16 sequence
MPKLSATMLTCNSERTVEAALKSLAFADEIVVIDSGSTDSTLDIVRNYTDKVFSRDWTGMEDQYNYAQDKCSFDWVFGLDSDEDVPEGLALEIKQTIERQDEASADRKCWGFEMQRRTFFLNRWIRHGSWVPDRITRLYHKDHGRWEGNPHCGVKVHGKIGVLTSYVYHYSYTGISDQLKRLDRYSSDIQDSYARNHKSFSVVNLLLNPMACFIKEYFLKRGFMDGIPGLVIAFNDSCYVFNKYAKLWERKHCNPEKVADSKQRNRP

SEQ ID NO: 135 - protein, 626 aa, Phycisphaera sp.
MSGGRDVRIQTVQVLRGALEHRGETSLDSLAVSIRLLRYGDVPELPRPGDRLIDVLIITKNEEANIGFCLAALHGWTRKIFVVDSGSTDRTREIVESTEAQFVHHDWAGYAAQKNWALNNLPFEADWTLIIDADEVVTPALRAEIEAVLAKGVDEVPESAFYLNRLFYFLNRPIRNCGYFPSWNLRLFKRGTAQYEDRAVHEHMVVDGEVAYLEEPMIHDDRRGMEHSIAKHNSYSSLEAQEILRGREAAGPPASGLESSFFGNALQRRRWFKQKIYHLLPAPWLFRFLYMYVWRRGFLDGSTGLRFSLFISAYEFLISLKIRELRLNRAPRLPKPMDPALPSKDLPVTVVVPVLNEEKNLPACLSRLGRFAKVVVVDSGSTDRTCEIAAEHGAEVVDFRWNGQFPKKRNWVLRNHEFDTPWILFLDADEYVTEDFCDELAARLPETPHDGMWLSYHNYFMGRYLRHGTAFTKLALIRTGSGEYERIDEERWSHLDMEVHEHPVLQGSTGKIAASIDHDDYKGLESYISKHNEYSSWEAKRYSKLVEDGGAGQSYFTRRQRWKYGAIRRWWLAPGYFLVSYFLRFGLLDGFPGFGFALLKWIYFFQIRLKIIELENARDEPPPSVG

SEQ ID NO: 136 - protein, 256 aa, Unknown
  Description of Unknown: Flavobacterium sp. 83 sequence
MKYNHNTKISVLIITLNEENQMKALLADLDFADEIIVVDSFSTDNTEVICKSFENIKFIQNKFDNYSSQRNFAISQAKNDWILFLDADERLTPELKNEILVTVKNNETSAAFLFRRTFMFENKILHFSGNQSDKIFRLFHKNHAEYTSEKLIHEKLKVNGKIGILKNKLIHYSYANYDSYKLKIIRYGKFKAQEKFIKKQKKSNLLHLLHPTYNFLYNYFVRLGFLDGKKGVIICYLNAYCIHIRYTELNKLWKKK

SEQ ID NO: 137 - protein, 255 aa, Seonamhaeicola sp.
MVKLSGVIITYNEERNIEKCLQSLIPVVDEIVVVDSFSTDRTKAICQKHNVTFIEQAFLGYTEQKNFAINQAKYDYIVSLDGDEALSEQLQKSILELKINWVFDGYYANRFNNFCGQWIKHSDWYPNKKLRIFNRQKAKWVGNKVHEVVALTNKNSPVGHLKGDILHYTYQSYSEFNLKTEQFSSLSAQAYFKLGKKAPIWKIILNPTWAFFKSYILRLGFLDGLNGFIICVQTANITFLKYTKLRELYSKTPNN

SEQ ID NO: 138 - protein, 299 aa, Unknown
  Description of Unknown: Candidatus Curtissbacteria bacterium GW2011_GWA1_41_11 sequence
MKISVVISAYNEEKQINDCLISAKKIADEIIFIDNQSTDATEELAKKYTNKIFKKVNDPIMIDKNKNYGFSKASGDWIFSLDADERVSDALASEIKRAVQNTKISGFEIPRKNIIFGKWIRNSIWWPDYNLRLFKNRSGRFPLNKVHEKIIIHGEVSRLKNPIIHYNYQTISQFLIKLDNYTESEAMDFIRLNKEIKWYEILRWPVADFLKTFFSQRGYRDGMHGLALSMLQAFYQLVVFLKVWEKKENYKDLSPKAFLKEAVSELSKISKDTRYWVYEALSKERPKMKIIYKIKKKLS

SEQ ID NO: 139 - protein, 261 aa, Unknown
  Description of Unknown: Candidatus Aminicenantes bacterium sequence
MNVKISAVVVTYNNEKKIEGCLESLEGIADEIVVVDSLSTDGTRKIATQFTDKIIKHSSTDYAFLKNLGQKASANEWILSLEPYERLSTRLRLELLKLRSQSVEVDGFYIPRRSFYIYRWIRHSGWYPDYRVRLYQKEKGSWKKEKNRIFLDFSGRAKKLKSPVEHLGFSSISEQVIHINRIAERRAQELYARKKKTRLDHLFFWPAAKFLYVYLLKLGFLDGFAGLVISTLSAYSVFLKFAKLKEIWKKGEKIEFMPGCR

SEQ ID NO: 140 - protein, 297 aa, Unknown
  Description of Unknown: Candidatus Pacebacteria bacterium CG10_big_fil_rev_8_21_14_0_10 _45_6 sequence
MKLSVVITTKNAATTLERTLESVKFADEIVVVDMMSTDETVRIARKFTDNIFTTPDVGYVEPARNFSLSKARGEWILVVDADEVISETLRDYLLELLATDSDIASYSLARKNLIFGDWVQTAGWWPDYQPRLFRRGKVIWSDLLHSKPAIDGKSEKLPDKAELAIEHHNYESLTQFVQRMDRYTSIAARMGAQKTESLEHPVIVFRREFLQRLFSLRGIDGGYRGILLAFLQGLSEVVQTAKFWESKHTELYGSKIETLNELSELRAQLAYWIADEELLTARGLQTLVWRVRRKIRI

SEQ ID NO: 141 - protein, 313 aa, Cylindrospermum stagnale
MSSKIPVTVIIPGKNEEANLPACLTSLQNADEIFLVDSQSSDKSVEIAESYGANVVQFDFNGQWPKKKNWSLDNLPFRNEWVLIVDCDERIPPELWEEIDQVIRNDEYAGYYLNRRVFFLGKWIRHGGKYPDWNLRLFKHQKGRYENLNTEDIPNTGDNEVHEHVILQGKVGYLKNDMLHEDFRNLYHWLERHNRYSNWEARVYLNLLTGKDGSGTIGANLFGDAVQRKRFLKKIWVRLPFKPLLRFILFYIIQRGFLDGKAGYVYGRLLSQYEYQIGVKLYELRNCGGQLNTAITPKSATPSLTQEIEQTAT

SEQ ID NO: 142 - protein, 248 aa, Unknown
  Description of Unknown: Proteobacteria bacterium ST_bin11 sequence
MLSVVVITKNESRHIARCLASVAWADEIIVFDSGSDDDTVAICQQYTDQVFVTDWPGFGLQKQRALAKAQHDWVLSIDADEEISAALKIEIQQALQNSEAQGFEIPRLSSYCGREIKHGGWWPDYVLRLFRREAGHFSEVVVHERVVVHGKIDRLRNPILHESYIDLEEVLNKTNSYSSLGASKLFAQGESASLGLAIAKGFWTFFRTYFIKLAILDGPQGLMLAISNAEVSYYKYLKLWDMHRLSKQ

SEQ ID NO: 143 - protein, 274 aa, Paludibacter jiangxiensis
MTSKIAVTVIVPVKNEEVNLPGCLDKLDGFEQLIVIDSGSTDRTPEIAKEYGAEYVNFQWNGQFPKKRNWALRNLKIRNEWVLFVDADEYLTPEFIEELKVKIQDPTKNGYWVVFKNYFMGKQLNHGYEFKKLPLIRKGKGEYEKIDEDSWSHLDMEVHEHPIVEGETGQFQEAILHNDYKGLEHYIARHNAYSTWEARRFLHLEKEGFSKMTFHQKIKYNLMKTPFLPVIYFFGAYILMRGFMDGRAGFYIALYKAHYFFQIKTKIEEFRKTK

SEQ ID NO: 144 - protein, 260 aa, Unknown
  Description of Unknown: Geobacter sequence
MAKVSVYIIAYNEEQKIEPALQSVTWADEIVVVDSFSTDRTAEIARKYTDKVVQVPFEGFGKLRNSAIAATSHEWIFSLDTDERCTEEAKNEILAIIDSPDALDAYYVPRRNIFMGRWVRYSGWYPDYRQPQLFRRGAQVFTDEVVHESFTTIGRVGHMKNAIWQIPFRNFEQMISKIDRYSTLGAAKMAAKGVRPGMGKALFHALFAFFRMYILRRGILDGWAGFVIALYTFEGTFYRYAKQVEAARGWVMTRPEELER

SEQ ID NO: 145 - protein, 267 aa, Unknown
  Description of Unknown: Rhodanobacteraceae bacterium sequence
MAREKFSLVIITYNNADTLERCLAAANFADELVVLDSGSTDATVAIAERYGARVAVHPFDDYGPQKQRAIDMARYDWVLNLDADEILAPGTCAVIERALEHPRVAGYRLPRRERMFWSVQHPWSHRNGHLRLFDRRRGHMNDVPIHAAVEVDGPVQTLVRADFVNMGDDDIAARVAKINRYSSGMVADKLARKQRFAGSMLLLYPPIFFVRQYVFKRYFLSGWAGFVASALGAVYVFLKYAKLLEARQHRPARPSAPPAQPPSHRGQ

SEQ ID NO: 146 - protein, 260 aa, Cupriavidus sp.
MKISVVLITKNEAHNIRECLESVSWCDRAIIVDSGSTDGTVEAARAMGAEVWETTTWPGFGPQKNLALSKAQSEWVLSIDADERVTPELRDEILAAIDAGQADAYDMPRLSRFCGRFIRHGGWYPDRITRLFRRGKARFTDDLVHENVVTDSTVGHLRTPLLHYTYDDFSQVLRKIDQYSTLGAHQAFQRGKTASPAGAMLHGSWAFLRTYLFRRGFLDGPQGLGVALMNGQASYYKYVKLWLLQQQARQQPQSGDPQPR

SEQ ID NO: 147 - protein, 316 aa, Microcystis aeruginosa
MFSQSEKIPVSVLIPAKNEESNLPACLESVARADEVFVVDSQSSDRSIEISTNYGANVVQFHFNGRWPKKKNWSLDNLPFRNEWVLIVDCDERITPELWDEIATVIQDPNYNGYYLNRRVFFLGQWIRYGGKYPDWNLRLFKHKSGRYENLNTEDIPNTGDNEVHEHVILDGKVGYLKNDMLHIDFRDIYHWLERHNRYSNWEARVYYNILTGNDESGTIGAHLFGDAVQRKRFLKKIWVKLPFKPLLRFILFYFIRLGFLDGKAGYIYGRLLSQYEYQIGVKLYELRRFGGKLNVNTHTNPPIKPSEPQPAEMIK

SEQ ID NO: 148 - protein, 252 aa, Unknown
  Description of Unknown: bacterium sequence
MINLSVVILTKNEERNIQECLKSVSGWADEIIVVDDESTDKTREICAKFAHKILVRRMDVEGRHRNFAYAQAKNLWVLSLDADERATEELKKEIEEALEAEVKYNGFTIPRRNFIGDYWVRHGGWYPSPQLKLFRKDKFSYEEAGVHPRAFMDDPCGHLKSDIIHYSYKNIEDFLSKMNNQTTREAQKWFNQNKPMRLGRFIWRAYDRFFRSYFGKKGYKDGFIGFTIAYFAGLYQFLSYLKYREIIRSKAQ

SEQ ID NO: 149 - protein, 273 aa, Larkinella rosea
MKIPVKAPLSVVIITLNAERTLKLALESVVEWVDEVIVVDSGSTDATLTIASDFNCRVTYRKFNGFGPQKQYAIDQAKNDWVLVLDADEIVTEQLANEIAALFVGEPIHAGYTLPRNLIFLGRILRHSGQNRQPVLRLFNRHHGRMTPVPVHESVQVEGSIGQLSGILIHYSYGSLHDYVLKMNHYTTLSAEEMALRHKKANIPLQGLRFLFTFLKIYFFKGGLLDGYPGFVWALLSAIYPVIKYSKLQELHDNDEKPKTKPVLAFGQTPGFR

SEQ ID NO: 150 - protein, 250 aa, Halanaerobium sp.
MNELSALVLTYNEESNIAECLKSISWIEQIVVVDSFSEDQTEEICRQYDNVDFYENKFKDFASQRNFGLDKIESEWVFVIDADERVTEELRDEIIETLNQPEAEGYEIARKNYFLGKWIKYCGWYPDYTLRLFKSKYKYSGLVHESPQINGKIKKLENDFIHYTYKDLASYAAKMNQYTTLDAEKKYRAGKTVSISYILLRPFLEFIKKYLLKKGFLLGSQGLILSALSAYYQFLKAIKLWELNNFGDEN

SEQ ID NO: 151 - protein, 291 aa, Unknown
  Description of Unknown: Verrucomicrobia bacterium sequence
MEGINRVGLTAIILTQNEEKNIAACLESLSWVSQVIVVDSGSRDATLEVARGTRPDVEIHTHPFADFGQQRNWALENTPVRNEWVLFVDADERIPAACAREIGDRIADPQGCVGFYLCNRYWFMGRWIRHCTLFPSWQLRLLRKGRVRFVREGHGQREVADGPLGYIREPYDHFGFSKGISEWVSRHNRYSSMEVELILRLRREPVVVGDLLRRDPVRRRRAVKRLAARVPCRPLIRFAYTYFFRRGFLDGRPGLVFCLLRLAHEIHVWAKLQEAEWTHRTTGTYSGDRRG

SEQ ID NO: 152 - protein, 255 aa, Shewanella putrefaciens
MKKHSLSVMLITKNEADRVERCLASIADIADEIIVLDSGSTDNTLAICQKYTDKITVTDWPGFGKQKQRALDQTSCDWVLSIDADEALDDTMRNALVALLSQEQIKESAFCLPWGVTLYGKTLKYGRSARAVLRLFKREGARYTLDEVHETVIPADGNIGKLKGLLLHYTHRDYGHGLNKAAQYAWLGSQKYHRKGKKSHGLMLALLRGLWTFLHIYFLRRGFLDGRVGFIVAMTYAQVNFNKYVGLWLLENKRC

SEQ ID NO: 153 - protein, 261 aa, Mariprofundus sp.
MRTDSKLSVYIIAYNEEEKIADAVNSVLWADEVIVADSHSKDRTAEIASALGARVEQLDFEGFGKLRNDAIAACTHDWVFSLDSDERCTPEAAEEIRDIINRPDAAGAWYTPRRNWFMGRWINHCGWHPDYRQPQLFKKGALVFNNHDEVHEGFEIHGSIDHMQQAIWQFPFKDLSQIQDKGMRYSTLGALKLERNSVSAGMGKALARGLWAFFRIYILKLGMLDGWAGFVIAFANLEGTFYRYAKLTERQKGWSNPPKSP

SEQ ID NO: 154 - protein, 250 aa, Unknown
  Description of Unknown: Chryseobacterium sp. VAUSW3 sequence
MSFTEHISGLIITFNEEKNIQEVLECFDFCEEIIVVDSFSSDNTVEIASRNPKVKIIQHRFEDFTKQRNIALDAAKNDWVLFLDADERITPELEKEIRETISRPDAKDAYYIYRIFFVGKKKINFSGTQNDKNFRLFKKSKASYVKHKKVHETLGVKGTTGVLKNKLLHYSFENYTSFKSKMLYYGRLKGEELAETGKKYLIAVHYIKVIFKFVKTYFLKLGILDGVDGLRISYLQSLYVNETYRTLRDL

SEQ ID NO: 155 - protein, 254 aa, Unknown
  Description of Unknown: Gammaproteobacteria bacterium sequence
MLNQISIVIICKNSDSTLQKTLESTLGFDEVVVYDNGSDDETLAIASKFENVSLHQGSFVGFGPTKNLAVSLARHDWIVSLDSDETISPELTAYLRQWKPESNLVVGFVRRKNFFMGQYVKHGSWGNDWLLRVFNRTTHQFNDAPVHEKVDLSKQSIKQRLPYPIEHNAIQEISQLLIKLDRYSEIRRTQGGKTFHPWFIVLRSLFAFFRSYIIRAGIVDGWRGLVIAWNEADHVFYKYMKRYVDKVTHTQKNQ

SEQ ID NO: 156 - protein, 263 aa, Unknown
  Description of Unknown: Acidobacteria bacterium sequence
MKISACIITFNEEKNIERAINSVKWADEIIVVDSESTDRTREIAESLGAKVFVQKWLGFGKQKQFAVDKAQHDWILSLDADEEVSESLRDEILSLKNSDQLIADGYKIKRLSIYMNRPIRHGDWYPDWQLRLFNRKKGKWKDVPIHESFEMNPNTKIEKLKNQIFHYSVENFTHHNRMITERYAPLAALMMFQNGKRTSIPKIILSPLLAFCRSYFLKLGFLDGFAGFCIAYFTAHHNIMKNLLLWEMQQNNKEKSQDYQKSS

SEQ ID NO: 157 - protein, 252 aa, Selenihalanaerobacter shriftii
MGLLGALVLTYNEEENIIDCLESINWIDELVVVDSYSEDETVELAKQHTEKVYQREFDDFSSQRNFGLDQIESEWVLVVDADERVTFELKEEVLERLNNPQAEGYRIPRKNYFLGKWIKYCGWYPDYTLRLFKVADNRYSGLVHEGIKIDGRVDKLDNAFIHYTYRNLKHYLDKINQYTTLDAEDKYQAGKKKGLAYILLRPVVEFIKKYFLKKGFLLGFQGLILSILSSYYQFLKYIKLWEKHEVDSRGDE

SEQ ID NO: 158 - protein, 258 aa, Selenomonas bovis
MATLSALILAKNEEKNIADCIKSVAFADEVVVVDDFSTDETAAIAARLGARVVRHALAGNWGAQQTFAIEQAHGDWIFFIDADERATRKLAAKAREIVDADDRRYAYLNARLNYFWEQPLRHGGWFPDYVIRLLPKKGTYVTGFVHPAFHHGYEEVRLPEDACMIHYPYRDWNHYFSKLNFYTMLAAEKMQQQGKSACLADFLLHPAWASFRMYILRGGWRDGRIGFVLAAFHYFYTMAKYVKLYYLDKTNRHVGDEA

SEQ ID NO: 159 - protein, 308 aa, Aphanothece hegewaldii
MFSIYILTYNEETDIADCIKSALRSDDVIVVDSYSTDQTLEIASLYPVRMIQHRFESHGKQRTWMLETIPTKYEWVYLLEADERMTDELFAECVKATQQEQIIGYYVAERVMFMGKWIRYSTQYPRYQMRLFKKGKVWFTDYGHTEREVYDGKTSFLKETYPHYTCGKGLSRWIDKHNRYSSDEAQETLKQLTNGQVEWTKLVLGNSEVERRRALKDLSLRLPFRPLLRWLYMYFLLGGILDGRAGFAWCTLQAFYEYLILLKVEEIQKKLLPESPFIETKELQNGHRNHHANAISAIPISSSTECEK

SEQ ID NO: 160 - protein, 258 aa, Selenomonas sp.
MKLAVIILTHNEERHIEACIRSASFADEILVIDDDSTDRTAEMARAAGARVISHPLAGDFAGQRNFALTQTDADWVLYVDADERVNEGAEAELRRVMAENARAAYEIKRINVAFGQEMHYGAHRPDYPRRFLPRDAVRWEGLVHERTVSNLPVRRLKGSLLHYTYTDWDQYFQKMNQYATLMAKRRLAEGERPSFLKILFDPPFAFFRSYVIQRGFLDGRLGFILGIFHGFYTMMKYVKLYYLEEGNRAESPQVPDHT

SEQ ID NO: 161 - protein, 258 aa, Nostoc sp.
MLEEITPLILTYNEAPNIGRTLQHLTWAKTIIVIDSYSTDETLEILSSYPQVKVFQRKFDTHAQQWNFGLAQVASQWVLSLDADYIITDELTAEIATLQVDEQINGYFARFKYCIVGKPLRGTILPPRQVLFRKDKAIYIDDGHTQLLQLTGKSAMLSNYIHHDDRKPLSRWLWAQDRYMVIEGKKLLETPVSELSFGDRIRKQKVLAPLIILLYCLILKGGIWDGWPGWYYAFQRMLAEILLSIRLIELEKLPNQQQ

SEQ ID NO: 162 - protein, 315 aa, Calothrix sp.
MSSKVPVSVLIPAKNEQANLPACLASVERADEIFVVDSQSSDRSEEIAQSYGAKVVQFNFNGRWPKKKNWSLENLPFRNEWVLIVDCDERITPELWEEIDQAIANPEFNGYYLNRRVFFLGQWIRHGGKYPDWNLRLFRHEKGRYENLSTEDIPNTGDNEVHEHVVLDGKVGYLNNDMLHEDFRDLFHWLERHNRYSNWEARVYLNLLTGKDDNGTIGASLFGDAVQRKRFLKKIWVRLPFKPFLRFILFYIIQRGFLDGKAGYIYGRLLSQYEYQIGVKLYELRNCGGQLNTKKSQPQTDEIKIKPSLPQEMSC

SEQ ID NO: 163 - protein, 317 aa, Moorea producens
MKSPNTKLPVSVLIPAKNEEANLPACLESVNRADEVFVVDSQSSDRSIEIVEEYGANLVQFYFDGFWPKKKNWSLDNLEFRNQWVLIVDCDERITPELWDEIAVAIDNADYNGYYINRRVFFLGKWIRFGGKYPDWNLRLFKHEKGRYENLKTEGIPNTGDNEVHEHVVLQGKAGYLQNDMLHIDFKDIYHWLERHNRYSNWEARVYLNLLTGKDDSGTIGGNLFGSAVQRKRFLKKIWVRLPFKPILRFILFYFIQLGFLDGKAGYIYGRLLSQYEYQIGVKLYELQKFSGKLNVEKTEPAQTPVTPKPSVVSPNP

SEQ ID NO: 164 - protein, 266 aa, Unknown
  Description of Unknown: Chitinophagaceae bacterium sequence
MNNNFSIVIICKNEKGNIERVLQSLAGVSSDVVVYDSGSTDGTLESLQTFPVRVVQGPWHGFGKTKRHAVSLAQNDWVLCLDADEAIDTELQQTLKTLQLANNQVAYRIVFKNLLGEKHLRWGEWGGDQHVRLFNRTVVNWDEAIIHERLIIPSSVTIQQLKGHVLHRTMKDTVEYSQKMVQYALLNAEKYFRQGKRSTWVKRWLSPPFAFAKHYVFGLGFLDGWEGLLSARMTAFYTFLKYARLRELEKRETSNGRRETEETLPL

SEQ ID NO: 165 - protein, 244 aa, Xanthomarina gelatinilytica
MKLSVIIPTFNEEAYLKNALRSVSFADEIIVIDSLSTDKTVEIAETFGCKVLHRKFDNFSNQKNHALQYATGNWVLFIDGDERITYKLKQEILQAMETGKHAGYKLNFPHFYMNRFLYHHSDNVTRLVLREKCRFEGSVHEKLIVDGSIGKLKNPVLHFTYKGLMHYISKKDSYAWFQAKQLLNKGKKATYFHLAFKPFYRFFSSYILRGGFRDGIPGLAVASINAYGVFSRYVKLILLQKGMK

SEQ ID NO: 166 - protein, 257 aa, Prevotella fusca
MNGTQHISVVINTYNAEEHLKAVLEAVKDFDEIVICDMESTDQTLDIARSYNCKIVTFPKGNLRIVEPARQFAIDKASSPWVLVVDADEVVTPELRKYLYDAIQKDDCPDAIAIPRKNYFMGRMMHSSYPDYILRFLRRSKCSWPPVIHAAPKVDGNILKIPASRMELAFEHLANDSVADIIRKNNTYSDYEVPRRRKKNYGCMALIYRPAFRFFKSYFLKRGCRDGIPGLIHAVLDAGYQFAIVAKLLEEKQAKQG

SEQ ID NO: 167 - protein, 291 aa, Niastella sp.
MISVVILTKNEEHDLQACLLALAWCNDIYVLDSGSTDKTCDIARQFGAKVFVNAFESFGKQRNVALDQFSFLYEWVLFIDADEIVTPRFREVIQDTVKKAGNDVAGFYCCWKMMLEKKWLKHCDNFPKWQFRLLKRGMARFTDFGHGQKENLLCGHIEYIKEPYLHYGFSKGWSHWVDRHNKYSGQEATARLANRPPLRNVFSAHGSTRNPALKSWLSTIPGWPLLRFCYAYFINLGFTEGMPGFIYCANIAWYEFLIQVKMREIKKGNCPPQPANVNEPQLDPGQVKYAS

SEQ ID NO: 168 - protein, 263 aa, Prevotella sp.
MNEQNKISVVINTRNAEEHLAQVLEAVKDFDEVVVCDMESTDRTLDIARQYGCKIVTFPKADHKSAEPARTFAIQSADYSWVLVVDADEIVTPELRDYLYRRIAEPDCPAGLYIPRLNRFMGRYTKSLSYDHQLRFFRREGTVWPPYVHTFPKVEGRTEKIPASLRHVRFIHLADETIGDLVRKTNAYTDGEQQKRGEKNYGLGALIGRPVWRFFRNYILKMGFRDGLPGLVHAGMDAFYQFVLVAKIIEKRTRNDKSSRKNG

SEQ ID NO: 169 - protein, 260 aa, Unknown
  Description of Unknown: Candidatus Eisenbacteria bacterium sequence
MSGGGGGAREPLSVLVTTRNEERAIRACLESVRWAEEVVVVDSGSTDGTLPIAHSIADRVLDHAYESPAAQKNWALPQLTHRWTLILDADERVPPPLRREIESVLADAARKEGYWIYRENYFYRRPIRSAGWQRDKVLRLFDRTKGAYRPVPVHEEIQLRGREGVLHERLLHEPYRDLDHYFEKWDRYSRWSAEDLRRRGIPASGGRLLLRPWLRFLRMYALEGGFREGRRGVVLCWLAAFSVFAKYARRWEHEIRDEGR

SEQ ID NO: 170 - protein, 254 aa, Owenweeksia hongkongensis
MAKLTAIIPTGNEEHNIEAVLQSVSFADEVMVVDSFSTDKTVELARKHTDFIIQREYGNSASQKNWAIPQANNEWILLVDADERISDALRDEIQGILKNGTDKDAFWIKRQNYFMDQKVNYSGWQGDKVIRLFKKSKCRYEDKQVHAEVLVDGKTGVLKNKLDHFTYKNLEHFLAKSYRYSTWSAYDRLPKTKPVGLWHLVVKPAFGFFKNYILRLGILDGKAGLIVSLENANYLFIRALKILSLQRNEKVKKE

SEQ ID NO: 171 - protein, 300 aa, Unknown
  Description of Unknown: Acidobacteria bacterium sequence
MKISAVVHTCNSEETLEKALQSIAWADETIVVDMQSVDRTLEIARNFTDRIFTAPKRPRVDGIRNEYNAKATNEWILVLDSDESLPADAKEEIEALIDKHGKRYDAFAIPRLNYIAGQIMKGTGWYPDHQIRLFRKETVQWQDAIHVPPEISTGKHKLYELVPPHCLHIHHFNYRDLRHFIQKQMEYALNQCYPPDFDFARYIAEAHEQLAREDRNLDGDLSHALSLLMACDSVVRGLIHWDSLQPRPPLGSGAELFSNNRDTRVSIKKRTWLAEHASFHYFVRRFREKFRSLFMKRKIS

SEQ ID NO: 172 - protein, 262 aa, Unknown
  Description of Unknown: Candidatus Roizmanbacteria bacterium CG_4_10_14_0_8_um_filter_ 35_28 sequence
NTLSALILTQNSEETIRATLESVKSLANEVVIVDGYSKDKTIEIVYKVYKVNKVCKVYKKKFTEIGEQRQFGLKHVTGDWVLILDSDEIISSQLREEIRLKIKSEKLKIEENAFWVPFQSYYLGKLLEHGGERYHQLRLFRREALKILPSLIHNKFEIVNNKIGYLRKRIIHHSYRSLKQIFNKFTDYGIRMAKEKYYAKEKSSLKKIIFYPLHMFWARFIKDKGYKDGMFRIPLDIGFMYMEWLIYISLFIFNRKKLKIKN

SEQ ID NO: 173 - protein, 238 aa, Campylobacter sputorum
MSKISIVILTFNSEKYLKEVLQSAKFADEILVIDSGSTDKTEEICSKFQAKFIYEPWRGFGKQKRFGVNLAQNEWVFILDSDEIIINELKDEISQILINPKFMAYKVARLNFFFGKAVKKMGLYPDYSVRLFNKNFANFNQRDVHESVEMFDKTLNFGTLKNHFIHKAYENIDEFISKQNRYSSLGAKKNRLKALFSPFWTFFKLYFIKGGFMEGWYGFVIAKLYSQYTFWKYIKGEK

SEQ ID NO: 174 - protein, 258 aa, Thiomonas intermedia
MNDSVKFSVIVITKNEANNITDCLQSVKMLADEIIVFDSGSTDGTQEICVSLGATVYETDWPGFGSQKNRALGQATGEWVLSIDADERLTPELAAEIKTVIRQHSSLHVYTLPRISSYCGQFMRYGGWYPDRVARLFRRGSAQFSNDIVHESLITDASLGALHNPLLHISYRSLDEVLEKINFYSSAGAEKLAKSGRKTSLTAAIARGFWAFIRTYFLKLGFLDGKLGLLLAISNAEGTYYKYIKLWLISQQEIRDGQ

SEQ ID NO: 175 - protein, 594 aa, Unknown
  Description of Unknown: Hydrogenoanaerobacterium saccharovorans sequence
MQTLSLCMIVKDEEKYIEKCLNSVADAVDEIIIVDTGSTDHTLDIAKRFNPKIFSYKWDDNFSNARNEALKKATGDWILVLDADEVVYKDDLKILTEKIQTTKANGLTLVFHNLTNENSEEFYNMHTGLRLFKNKTFHYEGAIHEQLVPIRKSIDFQIELTDIRVLHYGYLLSNLIHKNKHERNIPIIQKLLDYNPNDAFQLFNMGNEYISQHDHNKALEYYEKAYANKDITLAYCPHLLFRRAVCLNCLQRNEESLLALSEALKIYPACTDYEYYKGIIYKMLKRYTLAIESFKKCIEMGAAPQNLTFLNDIHNFKPLIDLGQIYYLLDDWANCLDCYIRALQINSKRYDIIYKIGQILNKMLPNKQDVGKNLENLFSDSYYITNVLVIVDVLIHEGLYDEAERYFKRIENQSDYQNDKNFLQGKLLFYKKDYKSAYTEFLKIIEASSHQGILPNRTEKLLEYLTLCCFAGKLNTKKCNGIIQSLTNETEKQVLLYFLNKKSCSFDKTASQKIFNILSELLKVKELDIFETSLPILNLIDSNRVLLDLANVYYANGYKDMAVKNILESIKKFGAIDGEALYILNKEILQFTSS

SEQ ID NO: 176 - protein, 313 aa, Unknown
  Description of Unknown: Armatimonadetes bacterium CG_4_9_14_3_um_filter_58_7 sequence
MKEFIPAVFTKCSQSNCATTQQRIVNSRAREQMSDAFHRPDAPTRPTTLSVVITTYNEAEHIGPCLDSVAWADEKIVVDGESTDHTREIAEGRGARVFVQPNYPMLNHNKNYGMEQAKGDWVMSLDSDERVSPGLRDEICAALSCSPVDGYRIPLRNFFWGKQLRRAGGYPGVVTRICRRGNGRFGTEYVHQGLEIEGAVESLASPLHHYPARNLYELIAKLNFNTTMTANHFGRKGTRGSIPRACLHAFGDFIYRYFCRGAFIDGAAGFVLCAVRAMYVFTWQMKLWERKKVDNRGSPALPASLPQLPLGRY

SEQ ID NO: 177 - protein, 250 aa, Psychroflexus tropicus
MPKISALIITLNEANNIGFLIENLSFADEIIVVDSYSEDKTVSIAESYPNVKVFLKQFTDFTTQRNFALEKANHEWILFMDADERLTDPLIAEIQATVNQNSTADAYYFYRKFMFKGKPLHFSGWQTDKNIRLFKRNKATYTSQRLVHEVLKVEGEVSYLKHKLIHYSYSSYASYKSKMINYAQLKAKELHQKGVKPNAFHYFIKPTYKFLYDFIIRGGFLDGKKGIIICYLNALSVYKRYPYLKQLSKQ

SEQ ID NO: 178 - protein, 357 aa, Paenibacillus senegalimassiliensis
MIVKNEEARLPVCLQSVSDLVDEIVIVDTGSSDGTKKIAQAYTEQIYDYVWRDDFSSARNFAFSLASQEFILWLDADDVITESNRQQLKDLKQNLEPDVDSVIMNYVLQTDETSGEPLAMTRRNRLVRRSRNYRWIGIIHEYLDVAEGRRMLSDIAITHRGTSGPGHSSRNLHIIERWLAAGHELTGRLRFHLACELADANRHEEAAVHLKDFLADQEATRDDLVMACSRLADCSRKLGRGEEELQALLQSLYYDVPRPEICCSLGKWFEERQQWRQAIYWYSQALQTSELSAWNAIVQTAARTWLPHSRLCLCYAQMGQLRQAYDHNKEALRYLPQDPGLKANDQKLEEALKALPD

SEQ ID NO: 179 - protein, 360 aa, Unknown
  Description of Unknown: Criibacterium bergeronii sequence
MEFSICMIVKNEEKHIENCLRPLSKLGYEIIVVDTGSTDKTVELSKKYTDKVYFFEWVNNFAKAKNYAISMATNDYIFVIDADEYIIEFDKKSIEDFFAKNPDKVGRLKRIEHIIMDNGDINTSTSYTNRFFNKNLYEYAGAIHEQLVKKANSRFKYETKVMNAVADHVGYNTTEEDKLLKAKRNIKILESELKKYMTKEQEKEYAPYILYHLGKSYYYIKDYEKAVDYFNKAMYYDVDTKLEYVNDMVISFGYCLLNLQRHEDALLLEKVYDAFSNSADFVYLMGHVYMNNAMFVQAVEEFKKATTFKTSNVRGVNSYLSYYNMGVIYEVAGDLDSAIKFYKKASNYIPAMKRLQNIKN

SEQ ID NO: 180 - protein, 274 aa, Robiginitalea myxolifaciens
MPVSVIIPAKNEEKNIKSCLEALQDFSQIIVVDSNSTDGTKTIVESLGAAYVNFEWNGKFPKKRNWILQNFDFKHDWVLFLDADEIITPKFQDELSRAINNSHFDGYWLKYTNHFMGKRLRFGDSMRKLALFKRQVGAYERIDEEHWSNLDMEIHEHPIIEGKVGKINSPIIHNDYRGLAHYISKHNSYSSWEARRYLQLKRDSQNSLNFRQKVKYRLLSLGLLPIVYFISSYVIKGGFLDGKEGLAFAKLKANYFYQIQLKIAEFSYNNLNIK

SEQ ID NO: 181 - protein, 301 aa, Chroococcidiopsis sp.
MKKQIVLNNIVQAKHEYSKLVIIILTFNSENSIGEVVNSCYEIASKILVVDSYSSDNTVEIAKDLGCEVVQHEFENYSKQRNWAQSYASLSPEEWVLHIDSDEVVSPELASSIRTVMSSPDKEYDGYLVRRLSYFLGHPIRFGHINPSWHLRLYKAGKGICEDRLYDQHFIVPGKTGKLQGMLLDLQLTTIEKWTASHNKWSSAEALEFIYSRNVDKTQTLPASLQGDLRMQKRWLKNNLYYRSPVLLRAFAFFIYSYFLRLGFLDGKVGLIYHVLQAFWFRFLTDAKIVERQMSISKKDN

SEQ ID NO: 182 - protein, 257 aa, Unknown
  Description of Unknown: Candidatus Omnitrophica bacterium CG11_big_fil_rev_8_21_14_0_20_ 43_6 sequence
MAKLSVMILTKNEESCIADCLESVKWADEIIVVDDESTDKTVEIVKRYNAKLFFRKMDIEGKHRNWGYAQASNRWVLSLDADEVVTPELRVEIERAIVAEEFAAYDIPLRNFISNYWVKYGGWYPAAKVRLFQKDKFKYEEAQVHPRVFIDGACGHLKSDIIHRGYPDLEHFLNSVNRQSTLEAQKWLETGRKMTLFWATWRVVDRFFRRYFRKKGYKDGMYGFVIAFFDTLYQILSYLKFREMQNSLKVKVEDNIK

SEQ ID NO: 183 - protein, 272 aa, Unknown
  Description of Unknown: Candidatus Peregrinibacteria bacterium CG10_big_fil_rev_8_21_14 _0_10_49_10 sequence
MSETKKLPISVHVLTLNSAKTLERTLRSVQICEEILVVDGGSTDATLDIAKKYGARIVLQHPDNAGGKPIDDFSAVRNLALREATQPWIFSLDSDEYASEELCAELQDASHDRAAAYYVPRKYILADGRIVDFATTYPNERLYFFHRDTVEQWVKPVHERPQLRTGTGTKHFRGASLAPIGVLQEYKEKNLRYLRIEAKKSAGKGWGHWFAHRVLHTVRSRCIAFVKLLLIWLLPHRGTRLPLRHELVRFWYGWKLIVETCPLHSRRVLTNR

SEQ ID NO: 184 - protein, 302 aa, Beggiatoa leptomitoformis
MAESNLIPLSVLIPTKNEERNIVACINSVAWADEIVVFDSYSDDQTIPLAESLDAKIVQRRFDNFSTHKNWAMENINFKHKWLLIVDADERITEELRIEIQTLFEQQPECDGYYIARKNYFWNTWVKRGGRFPDWQLRLLKVGYGHYEQRIVHEHMLLQGKAGFLKHALINYDYKGIDRYFDRQNTYSSMEAVEVFNMLYGTVNAQQIKPSLFAKGPERNRFLKNIAYRYLPFRPLIKFIWMYFIKLGFLDGKIGFRYSVLQMFYEYQVSLKLEELQDPDSPIAKKYQAYLQPTTQQPTKKG

SEQ ID NO: 185 - protein, 237 aa, Neisseria sp.
MNPKIPATAAMLVKNSERYLHEVLTALQDFDEVLLLDNGSTDRTFEIAERFTNVSYYKYDFIGFGPMKNLAARLAQNNWIFSIDSDEVADSELIAAIRKAVAENKEQNIFSLSRLNHYNGRLIKACGWYPDIIPRLYHRRFTRFSDRQVHESLILPPDANVRPLEGRLKHYSFENAEGLIQKMQQYSSLYAEENRYKKDSSPFKALLHGSVSFVKNYLLKRGFAYGADGLTISIANA

SEQ ID NO: 186 - protein, 262 aa, Unknown
  Description of Unknown: uncultured bacterium sequence
MKISAIVLSKKPEVNHFLLESLSFADEILIIVDSSSRHRERSVAIQKGDGLLQLEYETRNDIKKKNKIFFHPLINDFSSQRNFGLQNAKGDWVLFVDDDEYVGTELRKEITEAINLDQYSGFLLKRQDVVHHQPLRHGETGNIKILRLGRRHSGRFNRQVHENWDIEGRVGELQSPLYHIKDHFVSEFIPRLDQYGQIDSKILVSEGKPFSWFRLLVYPMAKFKLNYIFKAGFLDGTTGLFLAYLMAVQSLSIRVFQWENKN

SEQ ID NO: 187 - protein, 256 aa, Unknown
  Description of Unknown: Flavobacterium araucananum sequence
MTLAKKQALTALVITYNEEQNIKTVLDHLAFADEIIVVDSFSSDKTFEIASSFKNVKVVQRAFDNFASQRNYALSLATNLWILFIDADEILTPELEQEISFTINQQNSAAAYFMYRTFMFENKKLHFSGWQTDKIIRLFKKENAIYNHEKIVHEKLIVKGEIKKLKNKLIHYSYSNYANYKQKMVLYGQLKAQEELQKRTNPNFFHFYIRPVYQFLYQYIVRLGILDGKKGIIICYLNALSVAVRFQELKKIKQKI

SEQ ID NO: 188 - protein, 251 aa, Unknown
  Description of Unknown: Chryseobacterium sp. OV259 sequence
MKLSVAIITFNEERIIEKNLNTLQDLADEIIIVDSFSKDRTEEICRKFPKVKFIQQKFQGFGKQKNFALEQCQGEWILFLDSDEIPDEEAKNSIRKIISENHSEFNVYEIAFNNIFLGETLKYGGWGNIKRERLFKKGFGKYSEDIVHEEFVTQESKGKIKGKINHYTYKDIYHHIEKSNKYTSMMAEKMYKNGKKSNIFKIIFKPLYQFIKSYFLRLGFLDGLVGYYAAATAAFYTFLKYKKLHEIHKFK

SEQ ID NO: 189 - protein, 369 aa, Clostridium sp.
MITISLCMIVKDEENVLDRCLSSVADLVDEIIIVDTGSTDKTKQIAEKFTHKIFNFQWIDDFSAARNFAFEKAEMDYILWLDADDIIIREDQEKFMALKKELTLETDVVMMHYNVGFDENGKVTFSYFRERLVKRSNKFKWVEPVHECLQFWGNIVHADVGITHAKLEESRSDRNLKIYEKLLKDGKELSARGTYYYARELKDHKRYEDAILMFTKFLDSGLGWMEDNIVACSELAKCYQITENPQKVLQSMFRGFWYDSPRGEMCCQIGMYFKEAGKYRQAAFWFELVFSLEKPEDSWGFHQEDYWGYIPALECCICYDKLGEYEKAEAFNNLAENLKPGSAAVLYNKQYFENKRRDVTTFKKSSQYQ

SEQ ID NO: 190 - protein, 251 aa, Unknown
  Description of Unknown: uncultured bacterium sequence
MPTISAIIITKNEEKNIAACIDSVLWVDEIIVLDCGSTDQTQEICRKYAPKVKLRETDWPGFGEQKNRALALATSDWILSVDADERVTPQLKQEILQKLDNPNYVAYKTPRLNYFLGKPIRYCYGDKSDAPIRLAKKNACKFSDDIIHEKIIVNGTIGKLQNKLDHFSFNNIEDLINKINSYSTLGATKLYKNNKKTSHTKAFAHALWAFIRIYFLKRGFLDGWPGFIIAFSNFEGTFYRYVKLIEKNRSN

SEQ ID NO: 191 - protein, 251 aa, Unknown
  Description of Unknown: Candidatus Microgenomates bacterium sequence
MKISVVIIAKNAQDQIKECLSSVSFANEVLVVDSGSTDNTIEIAKGMGAKILGCKTADFSEMRNIGLEKAAGEWVLYIDTDEVISPELEADIKLKISSNEPNIAAYKVKRKNFYLGKHEWPKIEKLERLFKRNFLKGWYGSLHESPIIKGEIGELEGFLLHYTHRNLTLMLAKTIEWSKVEAQLRFKANHPKMSWWRFPRVMFTAFFDSYVKQGGWKVGTAGLVESIYQSFSMFVTYARLWEMQAKKDKKL

SEQ ID NO: 192 - protein, 252 aa, Veillonella montpellierensis
MAKISALILAKNEEENIKDCITSVSFVDEVLVIDDFSTDRTKEIAEQLGARVIQHSMNGDWGAQQTFAIKEATYEWVLFIDADERISTPLAEEILSVVDKGEEKAYWIRRENKFHNNHAVHGVLRPDYVNRLFPAKGSYVTGFVHPQIVTPYTNSKLKHVMYHYTYDNWNQYFNKFNNYTTLAAAKYKENHKPCHFVRDIILRPLWAFFKVYILNGGFKDGKMGWVLSVNHYFYTMTKYVKLYHLYKDNGKL

SEQ ID NO: 193 - protein, 261 aa, Geobacter uraniireducens
MVTSNKPKITVTVRTFNEENNIRDCLESVAWADEIIVVDAQSTDDTVAIAREYTDKVIVRPWAGHIATSQFVTDQAANLWVFSIDADERVSPPLRDEILALDLDSTTHDAFDMPRFHYFMRRWIKHSGWYPDRNIRLFRKDRCHWGGYAPHDKIQVPGSLGTLKGDLFHYIYRDLAHFAATKNSYSTLTSIDHNRNGRKATLLHVTLRPLHAFMSRYFIRLGFLDGLAGFTICVMEAHCVFMKYMKLYEIQHRLMRFPDKS

SEQ ID NO: 194 - protein, 211 aa, Unknown
  Description of Unknown: uncultured bacterium sequence
MAKLSVIIPAKNEEVVIKDCLESVNWVDEVIVIDNNSSDRTVEIAREFKVNIYKYAKGNYSDRRNFGLKFAHGEWVLFLDADERITPLLRNEILKIITDEKLQMSNSAYAIPRKNIIFGKEFKHGGWWPDYNKRLFKKDSFEKWEGELHEEPIFRGILGHLINPMTHFKNMTMAEMVDKTNKWSEAEAKLMFEAGHPPMNIIRFTTAVFRE

SEQ ID NO: 195 - protein, 296 aa, Pseudohoeflea suaedae
MVPGTCLELPCDALSPDVAERFSRPRPPQGAPGVTHSGAFIPVSVFIICFNEERVIEASLRALSRFQEILVVDSGSTDRTVDIVEGLSRDGLPVRLIHHDWTGFGAQKQFALEQCSLEWAFNVDADEIAEPTLVDAIAKNVASPGENAGFSVERRHWVPGYGYAHPWVKHDRIVRLVRRAKSYYDTKQTIHESLRVDGATGRVAGGYLLHASIIAPALEFEKQNSYTSLKASERSARGRRTSPSKMLTAPIGYFVKFYLLKRYFLCGWGGFAMAAGAASYAYQTEYKSWRAGLDPR

SEQ ID NO: 196 - protein, 261 aa, Unknown
  Description of Unknown: bacterium (candidate division B38) B3_B38 sequence
MEMLKISAVIITKDEEKRIIPTLQSLHWVDEIVVVDAHSQDRTRELCRKYTDKVYVREWNGYVEQKNYALQFASHDWVLSLDADERVSEELRMEIEELRRRGQDCDGYYIPRKVFYLGRWIKHCGWYPDYKMRLFRKSRARWVGGSVHESCQVEGKVGYLRSPLLHFTYRNITEHLSRNNLYAKLSAQDKFRQGERAGIVKMVFFPMATFIKTYFIKLGFLEGVAGLIISVLSATYVFLKYAKLWDMRRREKEGKTSPGIK

SEQ ID NO: 197 - protein, 264 aa, Unknown
  Description of Unknown: Xanthomonadales bacterium 15-68-25 sequence
MPREPLSVVVITYNNADTLDACLREVDWADEIVVLDSGSTDDTVAIAERHGARVAVHPFDDYGPQKQRAIDMARHHWVLNLDADEVLSPGTRAVIERALEAPRHAGFRLPRRERMFWTVQHRRSWRNGHLRLFDRRRGRMNDVEVHAAVEVDGPVKTLHAADFVNDGDGDIATRVDKINRYTTGMVAHKLRKRQRFTGLRMVLYPPVFFLRQYVGKRYFLNGWAGFIASVTGAFYAFLKYAKLHEARQRQRASARRRSEPVEPR

SEQ ID NO: 198 - protein, 647 aa, Desulfotomaculum hydrothermale
MKLSACVITKNEEKNIVSCLESVKSLVSEMIVVDTGSTDKTVDVAKGLGAKVYHYEWCNDFSKARNYAISKAKGQWIIFLDADEYLTRESINKLKLVVIEANNRKADFLVCMLTNYDKKSKKAINSVPVIRIFRNDNNIEYYGAIHEMLIRKDCNPKILDATNYIKIIHTGYSLDDIRDKNKMHRNLELLLKELEKNPQDSNLCFYISESYAIGGCYDKTIDYALKAIKYNNGTLLGMYQKNYLNLINAMVQLKYPKEEVINIVKEANKAFPEFPDFYFYLADFYEQDKRYYDAIDAYERGIQNFENGLIGQSSAHFNLANITRLMGDIYFKKGNFHKSIEMYIESLKTDYDNYISLKQLLFILSKFESAKEIIKFLGNMYDYSNLKHLLLLLKASLQANSPNLAEYYYFLIQNLSQGDKLTKESADIDMLNDKYDSAAMKFNQLYLHAYDTRFAIKGTIASILAKDEESLCRLKKIVKPSLKRFIQWYLKEDVSFLKSDKYVLLDVFQEMIKLSKIDKLTIFNDIIENMDIIQEVAELCYYYGQYSYAVEMFHKYIEKDNILPSHKLADILVKMADCLYKTGQLDLALEFFIDALKINPMDFRVYETPIEICKKLNNQQLLKELVDKAILYFPDSKYIMSYKKVVN

SEQ ID NO: 199 - protein, 267 aa, Flagellimonas sp.
MAVLSTPNQKLSALIITYNEIGYIEKCIDSIAFADEIVVVDSYSTDGTFEYLKNHPKVTVIQNPFENFTAQKNFALKQASNDWVLFVDADEVVGNKLQKEIIDTVNNPNACEAYWFYRKFMFQNKPLHFSGWQTDKNHRLFKKSKVKFTDKKLVHETLEVDGKSCILKEKLTHYCYKNYEDYKGKMLRYGQLKAKESFYKEKQFNYLLLVVKPLWKFFNHYVIRLGFLDGKKGVIISYLNALSVLERYRELKRLEKKNQITYYLVMP

SEQ ID NO: 200 - protein, 238 aa, Leptolyngbya sp.
MFSIFILTHNEERDIAACIESALLSDDVIVVDSCSSDRTRAIATQYPVRFVEHPFASHGQQRTWMLENVPYRHDWAYILEADERMTPELFAECLTVIAQDRAQSSDQSSDQSSDQTRNQEHTQDGQSASPGSPVGYYVAEQVMFMGTWIRRSTQFPRYQLRLLRRGKVWFDDYGHTEREVVDGATAFLQATYPHYTCSKGLSRWIEKHNRYSADEAKETLRQLQGGRVDWRGVVWGKS

SEQ ID NO: 201 - protein, 253 aa, Aggregatibacter actinomycetemcomitans
MPTISVAMIVKNEAHHLASCLDTVKDWVDEIIILDSGSTDDTQRIAEQYHAKFYQNTNWPGFGKQRQLAQRYVTGDYVLWLDADERVTPALRQSIQNAIAQDAPNTAYKIPRLSEVFGSKIRHSGWYPDYVIRLYRTDFARYGDQLVHEKVELPANADIQKLNGDLLHYTYQDIHHYLVKSAGYAKAWAEQREKAGKKATLWQGVSHAIGCFVKMYFIRLGFLDGKAGLLLAILSAHSTFVKYADLWVRTRGK

SEQ ID NO: 202 - protein, 257 aa, Unknown
  Description of Unknown: Candidatus Erwinia haradaeae sequence
MQQIQKLSVVIITHNSEEVLAQCLESVNWADEIILLDFKSSDKTLDIAVRYGVIIYHSNVWYGYGKQRQIAQNYANHDMILMIDSDERVTPELQKSINLILKKPPKKIVYSIARCNLFLGKAMRHGGWYPDRVIRLYPSFCVYNDNLVHESLNVSKIPIQLLYGDLLHVTSRDFCDFQFKQCTYARAWAKQRYQQGKHYGRIKILYHSFWSFIRTLLIRRSFLDGTRGWLLAIVVFQYTFNKYTALWALNCTSRDKN

SEQ ID NO: 203 - protein, 250 aa, Halomonas alkaliphila
MSMDVSVVIITRNAAATLSRTLDALTCYDDVVVYDNGSTDETCSIVQAYSNTTLHHGEFLGFGPTKRAAVSLAKYDWILSIDADEAPTKELNAAINDWVATATPQQAGKILRENWMLGKPVHHSGWGNDWLVRLFNRNTCNFNDAAVHESVNLEKNTEVSPLNGKIEHLAINDLSQFLDKINRYSDLRASSKKLKHHPFSLIFLKALFAFIRTYFFRLGILDGWRGLTISVANANGVFWKYAKNNVNNRL

SEQ ID NO: 204 - protein, 272 aa, Parapedobacter luteus
MKLDLTIVIPAKNEEKNLPGCLEAIGQDFAQQVVLVDSGSTDRTRTIAENYGATYINFQWDGQFPKKRNWYLRNHTPATEWVLFLDADEYLTPTFKRAVEKALADTTKVGYWLNYTVYFMGKKLKGGYPLKKLALFRVGTGEYEYIDEKQWSHLDMEIHEHPILTGDVGIIKAKIDHRDFRGVAHYVNKHNEYSSWEAARYLKMMTAANKALLTKKQRIKYRLLRTPLIGPAFFFGSFFLMGGFLDGARGFAFAVLKMAYFTEIYCKIKEKS

SEQ ID NO: 205 - protein, 296 aa, Unknown
  Description of Unknown: Candidatus Pacebacteria bacterium CG10_big_fil_rev_8_21_14_0_10 _42_12 sequence
MRLSVVVQTKNAEQTLEQALRSVAFADELIVVDMESSDTTREIALKFTDNVISVKDVGYVEPARNDAIAKATGDWILLLDADEEISVSLGEKIQTLIATESDVACYFLPRKNMIFGEWVSDSGWWPDYQPRLFRSGVVTWKEEIHSRPLITGKTEKLPIDESLAIIHHNYATVSDFVDRLNRYTSITAKLSKAESPTTKAGLISSYRSEFLRRIFMQGGIDGGYRSVLLSLLQANYELVVSAKRWENAGRPEDKSSSIKEMEKFNSELSYWIADWHEKRSGFLSKLFWRIRRKLRV

SEQ ID NO: 206 - protein, 252 aa, Unknown
  Description of Unknown: Chromobacterium violaceum sequence
MRVAISAVLITKNAGKQLEQCLQSLSFADEIVVVDSGSSDSTLAIASAYKAKVIHQEWLGFGPQKQFAVSQASHDWVLCLDADEYLSEELSLSINKIRENPQAAAYRFPRCNRFMGRFLKHGEGYPDWSLRLFNRRRARWSDDAVHEYVICDGPVEKLAGDLMHESGEDIALYLSKQNRYTSLQAEQLHARGKKVGAGKLLFSPLLRFFKFYFVRRGFLDGLPGLVHISIGCFNSYIKYAKLIELRRLDKDR

SEQ ID NO: 207 - protein, 252 aa, Unknown
  Description of Unknown: Chryseobacterium taiwanense sequence
MKNPKISALLITYNEEKNIEEALKSVDFADEIIVLDSYSTDKTIEIIKTKFPAVKLYQNKFEDFTKQRNLCLSYANFEWILFLDADERVTPALKAEILQEIENPKAKDAYYFKRKFFFMGEPVHYSGTQNDKNIRLFKKSVGSYDENKRVHEGLQNLNNPGTLKNYLLHFSFDSYQAYYHKVIHYAQLKAKDLREKNVPYLFVKQISKSIFNFFKMYILKLGILDGKKGIILSYLSALSSFKTYEYLKEEYI

SEQ ID NO: 208 - protein, 290 aa, Unknown
  Description of Unknown: Chloroflexi bacterium sequence
MSSPCTVILLTYNEEANLERCLNSLKDFTDDIVVVDSFSTDRTLEICKQYGCRIYQNKFVNHAVQFNWALDHLPLDRPWILRMDADEVLPAQLKQELRELVRSCDPEITGIYLNRRMYFMNRWLKHGGIYPHHILRMFRRGMGRYEEKTEEHLVLAGGRAIYAEHDFLEDNRQNHLKYWLRKHDELSDGEIRDTLLETHDPKNDLPPALFGSKVQRTRWLKVHVYAKTPLFVRAFLYCVYRYVFRLGFLDGIPGLIFHVLQGFWYRFYVDARIYEIRSRWQSTTEEFRNI

SEQ ID NO: 209 - protein, 326 aa, Leptolyngbya sp.
MTTVSSKVPVSVLIPAKNEEENLPACLESVARADEIFVVDSQSEDRSIEICDRYGAQVVQFHFNGRWPKKKNWSLDNLPFRNDWVLIVDCDERIPPALWDEIEQAIQNPAYGGYYLNRRVFFLGKWIRYGGKYPDWNLRLFRHAQGRYENLKTEGIRNTGDNEVHEHVVIEEGAVGYLKNDMLHEDFRDLFHWLERHNRYSNWEARVYYNLLTGMADSGTIGANLFGDSVQRKRFLKKIWVRLPFKPTLRFVLFYFLRLGFLDGRAGYTYGRLLSQYEYQIGVKLYELRQFGGRLNVGTPAAPVASPEDSQGQADMEPATPAKIKG

SEQ ID NO: 210 - protein, 258 aa, Hymenobacter elongatus
MPAISLSVVIITFNEEANIGRCLDALQDIADEVLVVDSFSTDRTVEICRKHGVRVIQHAFEGYVEQKNYATAQACHDHVLQLDADEVLTEELRHSIRAAAASWQHAGYTLARLTNYCGTWVRHGGWYPDRKLRLYDRRLGQWEGLLLHERFEVCAGQRIGALAGDALHYSYHSVEQHVSQLNRFTSIAAAELALRGRSQVTLFHLLLKPVWKFVHGYFFRLGFLDGFAGLCIATISAWGVFLKFAKLRTKPTAASATV

SEQ ID NO: 211 - protein, 253 aa, Unknown
  Description of Unknown: Acidobacteria bacterium sequence
MKISVTIITLNEEDRLADALQSVTWADEIVVVDAGSTDRTVAIARQYTDRVITHSWSGYAAQKNFADDQASCEWILSLDADERVSPELKRSIERLKREGPRYDGYRIARRAWYLGRWINHSGWYPDYQLRLYRRDRARWQGDYVHESVRVNGRVGTLAGDLWHFTRRNLAEHHDVLGRYTTLAAEGDFAQGKRVGWLSLLVKPPLAFLRSYILKQGFRDGIPGLVIASFAGYYVFLKQAKLWEKQRFPEGWKK

SEQ ID NO: 212 - protein, 294 aa, Mucilaginibacter sp.
MISVIILTKNEETDLPACLNSLTWTDDIHVMDSFSTDKTCEIARQHGAKISMNAFESFGKQRNFALENIVLKHNWVLFLDADEVSTPAFANAIKLAIDNADEETAGFYCCWKMMLEGIWLKRSDNFPKWQLRLLRKGRVTFKDFGHGQKEDKVIGNVLYIKEPYTHFGFSKGWSHWIERHNRYSSLEAIARLDICPPFKNIFSKHGSTRNPALKSWMIKVPGWPLLRFIYTYIFSLGFTEGLPGLIYAINLSFYEHMIMIKTREILSQRHKTSKDIGQNSIAISKQESPELELI

SEQ ID NO: 213 - protein, 245 aa, Kordia jejudonensis
MPTLSVIIPTYNEALYLKDALYSVQFADEIIVIDSLSTDETVAIAEAHGCKVISRKFDNFSNQKNHALQFATCDWVLFLDGDERITYQLQKEIIAAMNSGKHTAYKLNFPHFYMNRFLYFHTNDVTRLVEREKCHFEGNVHEKLIVDGTVGKLKNKVLHYTYKGLLHYISKKDSYAWFQAERMLEKGKKATYFHLAFKPLYRFFHEYVVKRGFMDGVPGLAVAGINAYGVFSRYVKLILLQKGIR

SEQ ID NO: 214 - protein, 290 aa, Unknown
  Description of Unknown: Alphaproteobacteria bacterium sequence
MNQKDQTANVSVLIPTKNEEKQLARCLDNVKGWAKEIVVVDSGSTDNTLAIAEQYGATVLNFDYRGGWPKKRNWALKTHSWKADWILLLDADEILTEAVKSEIKQVIESGKHDGYWINFEIVFLGRQLRHGDTSLRKLSLFRAGKGMYERRLENQDQSMLDMEVHEHVVVDGSVGRLSSSIRHENIQSLSHYIQKHDAYSNWEAHTWVFGDEGSLTPRLFGNQAERRRWLRKSLMNMPGFPVIVFVYTYFLRLGILDGKPGFFYALFRMVQFFHIKAKIYELSIQPVDSQ

SEQ ID NO: 215 - protein, 294 aa, Unknown
  Description of Unknown: cyanobacterium G8-9 sequence
MPEDEAIRTVLNASQKHKDKKNRKKKLLKYIKPKKISGKKMEAIKKGINHISVVIIAKNAEETIADSLDSLTLFDEVVLYMNNSTDKTKEIAKNYSNVKIVEGEFLGFGKTKNEAAKHSKHNWILSLDSDEILNKTLLNEIAQLDFSDIKNLYKLKRDNYFLGHETQNSNFIVRIYNKKYTHFDNSIVHEKIVIPGDASVITLKNSFQHLYVLNINQTLKKIIHYTDSGSEGKKTCFFSVVIAKSIFAFFKTYIIQGNIMKGWVGYALAVNSANKRHYKYLKQFINCQDEKKNR

SEQ ID NO: 216 - protein, 258 aa, Pseudobacter ginsenosidimutans
MEKLSVVIITFNEQKNIGRCIDSVKGVADEVVVVDSLSTDKTKAICLEKNVRFIEHAFEGYGRQKNFALQQASYDHILSLDADEALSEVLKQSIERVKKDDFPHSGYTMNRCTNYCGQWIYHGDWYPDRKMRLFDRRRIRWSLDDVHESTMAEEGASFGHLSGDLLHYSYNSLEEHISQNNKYSSISAELYYRKGKRSGWFRMLVNPAWAFVHSYLIRLGFLDGFSGYVIAKNIAHGTFMKYYKLYALQKGIPVKPVA

SEQ ID NO: 217 - protein, 256 aa, Unknown
  Description of Unknown: Flavobacterium sp. RB1R5 sequence
MKYNNNTNLSVLIITLNEEAQMNGLLADLDFADEILIVDSFSTDNTESISKSFKNVKFIQNKFENFTTQRNFAIAQAKNDWILFLDADERLTAELKNEILDTIKTNETYTAFLFYRTFMFKKTILRFSGSQTDKIFRLFHKNFAKYTTERLVHEKLEVEGKIGILKNKLIHYSYSDFDSYKAKMIIYGKFKAQEKFIKNLKPSLLLQLFHPMYTFLYNYIIRLGVFDGKKGITICYLNAYSVYVRYQELGNLWNKK

SEQ ID NO: 218 - protein, 255 aa, Unknown
  Description of Unknown: Bacteroidetes bacterium SW_9_63_38 sequence
MKLSLITPLLLTYNEEANINRTLDRLTWADRIVIVDSYSEDATVEIVRSYENVDLLQREFDHFDAQCNYGLEQIDTEWVLSLDADYLCSEELISEIRSLPASPAFDGFSVEFIYCVHGHPLRGSLYPPRTVLYRRKQAKYHRDGHSHRVRIDGNAGKLETPIYHDDRKPLSEWLDNQRRYCRLEIDKLEETSEVTLVDRVRKTGVLAPILIPFYCLFVQGLILDGWPGWYYALQRTYTELLLALKLIDRNIRRQE

SEQ ID NO: 219 - protein, 290 aa, Unknown
  Description of Unknown: Deltaproteobacteria bacterium sequence
MQLENKIGLTVIILTFNEELNLPYALDSVIGWADQVFVVDSFSTDGTLEIAKNYNVPVYQNPWTDWATQRNWALSNLPVRNEWIFFLDADEQVTRELKKEIEVKIKNASPEVAAYSVRQAFVFLGRYLKHAHDAPPLIRLVRRGRVKWFCKGAREYCEVKGKVKQLKHRLWHEDHKGISEWIQKQNLNATREALAILNAQNDIKEKKKISAERPLRTWIRENIYARLPRWLRPFFHFTYRYFLRMGFLDGYPGFVFCFLHAFWLPLLIDAKVYEIKRKNSRQKAFGAECT

SEQ ID NO: 220 - protein, 246 aa, Tenacibaculum sp.
MTKLTVIIPTLNEESNIQRALDSVFFADEIIVIDSYSSDKTVTIVKKNNVTLLQRKFDDFSSQKNYAIQKASNDWVLIVDADEEVTDELSKEIKEIFSKELNYVGFYIRRNSYVENKRLQFGGYSSKIVRLFNKKYCFYEGIVHETIKTTGKLENLVGRLNHYTYKDYTHFKKKMNYYAKLRAQELFAKEKKVTIFHLYIKPFIRFLIHYIFKLGFLDGKEGIIFSYLMAYGVAKRYKELTLLNNK

SEQ ID NO: 221 - protein, 285 aa, Pontibacter virosus
MISVVILTKNEELDLPRCLESVNWSDDVHVLDSGSTDKTVEIAYLYGVKFWENSFESFGKQRNHALDHLALRYDWVLFLDADEVVTDEFRAAIIHAINNANSDVAGFYCCWKMMLEGRWLKHCDNFPKWQFRLLRKGKARFIDFGHGQKEGEIVGRIEYVKEPYLHYSFSKGWSQWIDRHNKYSSQEAVARLHALPPFANVFSRHGSVRNPALKSYLSRIPGWPILRFIHAYVINLGFIEGIPGLIYCINMGYHEFLIQIKMRELKKVHSASRHTHAKRIVQTER

SEQ ID NO: 222 - protein, 277 aa, Unknown
  Description of Unknown: Deltaproteobacteria bacterium sequence
MLRRITQPRRTRAGFRHFRHLVMTISICIICFNEEKNIRRCLESSKWAEEIVVVDSMSQDRTVEIAREYTDKVYQREWPGYIDQKNFALSKAKNDWILSVDADEEISQSLQYEIKAEIEKQDAKDGYRIPRRSFYQGRWIKHSGFYPDRQLRLFRRNKGYWVGKRVHERVHINGEVGLLKNDLLHYPYNGTISGQVQTVDRFSSLLAENRFQEGERYSLFLLLLRPPIKFIEVYFFRLGLLDGLAGFIIALTSAYAMFVRYVKLRELCNRVGNQPSL

SEQ ID NO: 223 - protein, 275 aa, Unknown
  Description of Unknown: Candidatus Omnitrophica bacterium sequence
MGATTDTRDTLTKGAQMEKIPLSVVVMTRNEEKNIAECLESVKGWAQEIVIVDDYSLDRTLDIARKYTDKIFQRKWDMEGTARNFAYSKANNEYVLSLDADERVSHELRDELIALFSVPLTFNGYNIPHRNHLGSYWIRFGGWYPNAKLKLFRRDKFRYEEAEYHPRAFMEGKTKTLTHDIIHYTYADFHSVFAKVNHATDFEARKWLRDKRKMSLGICFWKSITRFFKFYFIKQGFRDGFIGFFLALYSGTYQFYTYCKYWEAKTKSTKGGKAC

SEQ ID NO: 224 - protein, 261 aa, Unknown
  Description of Unknown: Flavobacterium antarcticum sequence
MHPQPSTKISVLIITLNEEIHMYELLSDLGFADEVIIIDSFSTDRTKAISESFENVRFLENKFENYTTQRNFAIDQARNNWILFIDADERLTPSLKAEILETVQRDDDVSAYLFFRKFYFKNKVLRFSGWQTDRIYRLFKKDKCRYTHRRLVHEKLDVDGKIAYFKNRLVHYSYADYNSYKGKMIAYGKLKAMEKYQIGFKPTVFHTYGHSAYNFLYQYLIRLGILDGRKGIIICYLNALSVNARYTELKRLYQKSDSNVQ

SEQ ID NO: 225 - protein, 250 aa, Unknown
  Description of Unknown: Chryseobacterium arachidiradicis sequence
MQQLNEKISGLIITFNEEKNMREVLECFDFCDEIIVVDSFSTDKTIEIASTFPKVKIIQNKFEDFTKQRNIALDAAKNDWVLFLDGDERITSELQEEIIKTVKDSNAKDAYYFYRTFFLGKKKINFSGTQNDKNFRLFRKSKAHYSKNKKVHETLEVNGTVGILKHKLLHYSFENYDQFKNKMLSYGRLKGLELQLKGKKYSFLAQWGKVIFKFFKTYFLKLGILDGVNGLKISYLQSLYVYETYRTLKQ

SEQ ID NO: 226 - protein, 258 aa, Marivirga tractuosa
MKIKLSAVVITFNEEKNIRRCLNSLVKVADEIIVVDSFSSDRTVEICKEFGCDFRTNPFEGHIQQKNFALQQASNDFILSLDADEELSQKLIESILEIKADWKYDAYYFNRLSSYCGKFFPHGSWYPDQKIRLFDRRLAKWGGTNPHDKIVLSTNSKEFLKGDLLHYTYHTIEEHIKQINYFSGIAAKAAHDKGKRFNILKLVFKPFWRFFRDYFLKHGFLGGIRGLTICLLTAVETYSKIIKLWELERAEKLNQKPS

SEQ ID NO: 227 - protein, 255 aa, Xenorhabdus koppenhoeferi
MSDKKRLSVVMIAKNAADVITDCLLSVSWADEIIVLDSGSTDATCQIANEMGAKVYTNTQWPGFGRQRQLAQSYASGDYIFMIDADERVTPELKASIEQILANPDDSKVYSCARLNLFMGRFMQHSGWYPDKVIRLYCRARYQYNDNQVHESLDTQGASIVTLKGDLHHLTCRNLMEFQQKQLNYARDWAKHRYEQGKKTRYFSVWSHMLGAFFKTWLFRAGFLDGKQGLMLAVVNAQYTFNKYAALWELSQRKE

SEQ ID NO: 228 - protein, 263 aa, Unknown
  Description of Unknown: Ignavibacteria bacterium sequence
MRTPLSVIIITLNEEERIVDCLKSVEWADDIVVVDSGSTDRTVELAKQYTQKVLAAGWMGFPQAKTFALRHAANEWVLWLDADERVSPELAGEIRDILRRGSAAYAGFEVARRAYFIGKWIRHCGWYPGYVVRLFRKDAGAFTGSRVHEKLEVRGPVGRLRHDLFHFTDENLYHYFGKFNTYTSLAAEDARDAGKRFSYYNLLVRPPYLFFKMYILRLGFLDGMHGFTLSLLSAAYVFVKYAKVWELSSGGGPLAGTGAGRGQ

SEQ ID NO: 229 - protein, 259 aa, Niastella sp.
MTPFSVVIITFNEEKNIGRCLESVKGIADEIIVVDSLSTDGTKAICATHGVTFIEQPFLGYSEQKNFALNRASHEYALSLDADECLTEELRKSILAEKQKGFTFDCYRMNRLSSFCGQWIKHGTWYPDRKVRLINRKKGQWGGVNPHDKIVMQEGSSMKQLRGDMLHYTYDTIDQIMDQTNKFTTIQSKAMYERGKRANLIKIVINPLVAFISGYIFKRGFLDGYNGFIIARYASHATLAKYSKLLHLQRKMKKLAANS

SEQ ID NO: 230 - protein, 248 aa, Ferriphaselus amnicola
MPSLSIIIITHNESANIRDCLASVAWADEIIVVDSGSTDGTLEVAHEFTPNVYSHLDWLGFGVQKNRALAYATGDWVLSLDADERVSPQLHAEIKAVLASPQAEGYRLPRSSSFCGRFIRHSGWYPDYVLRLFQRGAGRFSEALVHESVQLQGRVESLSQPLIHYTYRDVESVISKLNHYSSAAAEQMDAKGKRGGLAQAILHGSWAFYRTYVLRAGFLDGREGFMLAVMNAENSYYRYIKLWLKQKS

SEQ ID NO: 231 - protein, 256 aa, Phaseolibacter flectens
MNLTVCLLTHNSQRTLEQVLEPLNSIADEIILLDSGSTDETLNIAKKYAITPHFSPYQTHGSQMNKAIAMASHDWVFCLDSDEIIDNDTLNFIQSLKQQPSEPDINQVWRISRYWYVLGQQVRAIYPVSSPDYPVRLFNRNNALFNDRPVDDKVENLDGSQPVYHVIPGHIRHDTFYSLHEMQNKLNSYTTRLNQYHKLKPSLWRGVFSAIGAGFKWYLIKGAWRDGSTGVATGLYALQYSFIKYFKAWYQAQNKS

SEQ ID NO: 232 - protein, 473 aa, Clostridium botulinum
MISLCMIVKNEEKNLKSCLEKAALFVDEIVIVDTGSKDRTIDIAKKFTDKIYNFSWCNDFSKARNFSIEKASKDWILILDADEFITKFDIKEVEEFIKEENIVGRVNVINLFENESIINKSNFRLERLFNRNYFKYIGKIHEQLTPIHNQAYEKKNINIEIEHIGYIKSEIKRKNKIERNISLIKNSIKEDGENPYLYYQLGKIYYTDKNYKEASNAFAKAIEMPLNLKECYVQDLMESYGYTLINIKNYNEALKIKKFEGCYKNSVDFQFLMGLIFMNNNRFTEAAKRFYKCLELEEGKIEGLNSFLPNYNLGVIFETLGYVKEAEDCYKKCAQYDLAKERLKNIDNFNRSPKGIKKEIERLINLNYIEKARKILEDNKEKLREDIDIFSMKAIMSIMENNLEEAEKLIFQGLNKDKKNFDLNYNLAYIYEIKGLYKEAISKYKESIKLCNNEKLKDNIITKIEEIKKIIEN

SEQ ID NO: 233 - protein, 254 aa, Unknown
  Description of Unknown: Paraphotobacterium marinum sequence
MTKISFYVLTFNSEMYIESILNKIQHIADEILIIDSGSTDKTKEIVSTFANTAFIFNKFEDFKQQRIFAEKSCKFDMILFLDSDEEPNDELINSIKHLKSTGFVYDAYRIKRLWNVLKKDVHSIYPICSPDYPIRLYNRKSCNFNDSPLCHEQVSGYSSEGIISGHIKHITFENFKTLKRKLKLYTNLAANDLILKNKKPSNLKIVFNPIGAFIKWYVFKSGFKDGIVGVQLGVYAYLYTLKKYNKAQKFLNQH

SEQ ID NO: 234 - protein, 248 aa, Unknown
  Description of Unknown: Bacteroidetes bacterium sequence
MKISATIITYNEEENIGDCIDSLKEVADEIIVVDSFSNDATEKICKGKNVKFIQHKFEGHIQQKNFALEQATNNFVLSLDADERLSDELKKEIRDCVICHAEPFEAYIMNRLNNYCGKWIKHGVWYPDKKIRLWNKQKGKWGGSNPHDKVLMDTNTLTKTFSGNILHYTFRTPEQYKSQMEKFSTIAAQSMLHEGKKSNLIKAYSAGAFAFVRSYILRAGFLDGNSGYQIAKGYAQYTRMKYEKMLKK

SEQ ID NO: 235 - protein, 273 aa, Parabacteroides goldsteinii
MEKIPVSVIVPVKNEEKNLPNCLALLNDFSEVIVVDSHSTDKTPEIVAKFGYRLIDFSWNGQFPKKRNWVLRNVPLKNDWVLFLDADEFLTESFISCLRKAIQHTTADGFWIYYDDHFMGKQLKHGVKMRKLALFKKDKGEFERIEENAWSKLDMEIHEHPVIDGKIEYLPVKIVHMDYKGIEHYIARHNSYSSWEAQRFIQTGKQKDQFTFRQKVKYTLLDTWFLGFIYFIYSYFIRLGALDGKAGLLFALFKMQYFFHIKCKIVELRRMVF

SEQ ID NO: 236 - protein, 257 aa, Parabacteroides distasonis
MGISVVINTYNADLHLDKVLSAVQDFDEILLCDMNSTDKTIQIAQKHNCRIIYHEHTGIVEPARNKTIQAASQEWVLIIDADEIVTPQLKEYLYQQINLPNPPDAIRIPRKNYFMGKFMRATYPDYLLRFSRKEAIDWPPFVHAIPHITGKTATIPAHKTELALIHLANESVADFIRKINTYSDKEVERRKNKKYALFDIAMQVSFRFFKQYILKKGILDGTPGFCYAILSAYYKFATMAKVYEYHHKKQPAPRTGL

SEQ ID NO: 237 - protein, 258 aa, Unknown
  Description of Unknown: Flavobacterium sp. HMWF030 sequence
MILSEKQPLTALVITYNEEQNIKTVLDHLAFADEIIVVDSYSSDKTFEIASSFQNVKVVQRKFDNFASQRNFAINLATNSWILFMDADERLTAKLQDEIVYIISLKNSATAYFMYRTFMFKGRKLHFSGWQTDKIIRLFKKENAFYNHEKIVHEKLIVKGEIGKLRNKLTHYSYSNYEDYKKKMILYGQLKVQEELQKKTNPNFFHFYIRPAYQFLNQYIVRLGILDGKKGIIICYLNALSVAVRFRELKKVKTLKQQ

SEQ ID NO: 238 - protein, 272 aa, Unknown
  Description of Unknown: Candidatus Magasanikbacteria bacterium GW2011_GWC2_41_17 sequence
MDKIFCTVGILTFNSANTLRRALESIKDFAEIIVCDGGSADATLEIAKEYGCKIIFQNSQFKDPDNRIKDFAGARNQCLDEANFDWFLYIDSDEAISPGLKLEIEQIVASDVGAHIYNVPLGLWIHGKLMRYSSNYPGYQNRFFNKKSGARFFKTVHERIKFDESVNSVKCLKNPWYVFCTDEEADHYFRETRKYLKIEAQRYQNLPFIDSLRRCSRYLKNVLKIIIKSFRNYFLHGFRYSVPPQMEIGRALYQLAVVYILLINQVRRLFKF

SEQ ID NO: 239 - protein, 352 aa, Paenibacillus sp.
MIVRDEEETLGGCLASVQGLADEIIIVDTGSVDGTRRVAEAYNGRVAAYDWQDDFAAARNYAFSLANGTFILWLDADDRIAGEDLKKLLALKRELTAEVSGVVMPYCLAEDAVGRPLVADRRLRLVRRESGCRWSGRVHEYLEFPRKGEIRVWDAMIRHTGRADHSRRNLRILRRWIAEEPGVSGRRLLWYAHICYERGHYGQAAKGYRKLLLEPSGFREDRLIACFRLADCCRRLGDGRGRLESLLGSFHYGPPQADFCCQLGEWFEERADWRTAAYWYTQAIAVSGLDTGLRPVASAALTWLPHARLAAVCLRLGDAGAAYRHNEQALRHLPDDPGLLGNRARLEAALRS

SEQ ID NO: 240 - protein, 255 aa, Unknown
  Description of Unknown: Microgenomates group bacterium GW2011_GWA2_40_6 sequence
MSNISLLLITKNESENLKRWKDWLPKLKKVDELVVVDDNSTDDTKKIVNNFQSEKLKINLFNRGMEGDFSAQRNFAISKAKNDWVLFVDADEEPSDKLIKFLNIEELNPNICFAFKRNLIYIDQVVTHGQAQNDYPIRFFTKDSGKYINSIHEIWETDNCVVKINKPLYHYSAPNLKIFISKLNLYSTLRAQELFQKHASVNLFQIVFYPLAKFLQTYIWHLGFLDAIPGIIICTSLSFYSFLVRSKLWRLYHAS

SEQ ID NO: 241 - protein, 255 aa, Unknown
  Description of Unknown: Chryseobacterium humi sequence
MNNTIAKISGLMITYNEEKNIHEVLKCFHFCDEIIIVDSFSTDKTVKIVQKFPKVKIIENKFEDFTKQRNLALENAANDWVLFLDGDERITPELEKEIITELAKPNKKNAYYFYRQFFFAGKALNYSGTQNDKNFRLFRKSQCHYIADKKVHETLAVNGEIGVLKNKLLHYSVNNYKSYREKMLHYGELKGQELFSKGKRFSLLAQYLKTTFKFFKSYILKFGILDGKEGYQLSYLQSLSVFETYESLKRVENKS

SEQ ID NO: 242 - protein, 219 aa, Unknown
  Description of Unknown: Deltaproteobacteria bacterium sequence
MASRDKISIVLVTFNEEKNIEECLDSAKWADEIILVDSFSSDRTVEIARKYGARIFERSWPGFGKQKNFALQQASMDWILLLDADERIPEELRREIENLLVSQSKRPAAYRVARKNYFYGHWLKWGGQYPDWQTRLSKKGVGSYDNTEPHESFIYEGELGTLENPLIHYTERRISDHFPKLNNYSSLAAAQRAQTCKKVHGYDLVFRPLIAFYQFYLRK

SEQ ID NO: 243 - protein, 258 aa, Unknown
  Description of Unknown: Marinilabiliales bacterium sequence
MDKISVVIITLNEERIISRCLESVKEIADEIVVVDSFSTDKTIEICKSYGAKIDKHEFHSYIDQKNYALSQSSNNIVLSLDADEELSDELKKSILNLKSEGINFSAYSMNRLTRIGNKWINHSGWYPDTKIRLFDKTKGKWEGLNPHDEFVILNNNGVYKLKGNILHHSFYSFKELKTQTKRFAKLSAEAYFHKGKKAPILKVVFNPFLRFIRDYFFNRGILHGKTGIKVCYNNAQSTYLKYKYLHDLYSKNPDLMEN

SEQ ID NO: 244 - protein, 249 aa, Luteitalea pratensis
MPPISVILITKDAAAHVERALQSVAWAAERIVVDCGSRDATLALAEPLATRVETHPWAGYGAQKNHAASLARHDWVLSLDADEAITETLRDQIAALPTNPGAAAFRMPRVTWYLGRWMRTTDWYPDRAVRLYDRRRAHWDDRPVHESLVVSGDVADLGGEIEHRPYADVAQHLARMNHYTTLAAAQMQAQGREARAWHLLLHPLAAFLRNYVARGGFRDGAPGLIVSMLGGVYVLQKYVKLWERQRQAP

SEQ ID NO: 245 - protein, 278 aa, Unknown
  Description of Unknown: Flavobacterium sp. AT- 3-2 sequence
MRIDFNNLSKIPVTVIVPVKNEEKNLPECLGRLKDFSEVIVVDSKSTDRTPEIVKDFGFQFVQFDWNGKFPKKRNWVLRNVEMRNEWVLFLDADEFVTKDFLEELRNKIIADEYSGFTIMYENYFMKKKLNYGDKMKKMPLFKVGSGEYEQIKEGSWSHLDMEIHEHPIISGKIGFIKSPIIHNDYKGLEHYIARHNAYSSWEANRYVSLNSSNYGLLTSRQKLKYKLMKIGLLPIVYFIATYFFKFGFLDGKEGFYFAKYKSQYFFQIKTKIIELQS

SEQ ID NO: 246 - protein, 245 aa, Ulvibacter antarcticus
MSTLSVIIPTFNEADYIEDALQSVAFADEIIVVDSYSSDDTKTIAQSLATKVLERKFDDFSAQKNYALEHATGDWVLFIDADERVTRSLEAEIKSVLINPKHSGYKINFPHFFMNRFLYFQSNDVLRLVKREGANFTGLVHEKLHCNGSVGKLRQKMIHYTYKGLHHYITKKEKYAWFQAEQRFEKNKKTTYFQLFFKPTYRFFDSYIKKGGFRNGVPGLTLAAIDSYGVFSRYAKLILLNRGMK

SEQ ID NO: 247 - protein, 297 aa, Mesorhizobium sp.
MTKQKLTVIILTYNEEIHIARCLESVASIASKVVVVDSGSTDSTRAIALKLGAAVYTNKWRNYSEQFNWALDNTGPHTEWILRLDADEIVSKELAKTLEAVLNGEVAERGFTITRRIYFLGKWIRWGGIYPARMLRLWRSGFGRCESRWMDEHILVDGLVGHIAGDLYDKNLNNIGWWTAKHNSYASREALDLLLSEHGVDHELDRGFNKQAKAKRWLKIGVYSRLPLGWRSMAYFVFRYFVLLGFLDGSRGFAFHFLQGFWYRFLVDAKICEVRLRMTRDRISFEEAVAVSLDIKL

SEQ ID NO: 248 - protein, 258 aa, Rhodoferax sp.
MRLSVIVITRNECANISDCLLGLDFADEVVVLDNASTDGTADIARSLGARVAISDDWPGFGPQKNRALDLVSGEWVLSIDADERVTPELRNEILAVISTAPLNDAYCFPRLSSYCGQFMKHSGWQPDLVVRLFRRGKARFSDDLVHERLISREPIGKLRSPLRHLSFPDFESVLDKVNRYSTAGALGMARKGASASLWGAIGHGVWAFFRTYVLRRGFLDGQLGLALAISNAEGTYYRYAKRWLMSQAQAPTAKASGK

SEQ ID NO: 249 - protein, 265 aa, Raoultella sp.
MFKLSVCLLTCNSARLLREVVPPLLKVADECIVVDSGSTDATLDICQQFGLTVHHHPYTTHGAQMNYATALASHDWVLCMDSDEILDSEVVAAILRLKAGQGSDPGCAWRLPRYWYVLGEAVRTIYPVSSPDYPVRLFNRTVAAFNDRPVDDRVVGHSRSSKLPGRVRHDTFYSLHEVFNKLNSYTTRLVQYQKVRPSLSRGIVSATGAFFKWYLFSGAWRNGKVGVVTGLYAALYSFLKYFKAWYADQDKREPVADKRPDSRSV

SEQ ID NO: 250 - protein, 256 aa, Unknown
  Description of Unknown: Flavobacterium sp. KJJ sequence
MILAEKQPLTALVITYNEEQNIKDVLDHLAFADEIIVVDSFSTDKTFEIASSFNNVKVVQRAFDNFASQRNFALSLSSNSWILFVDADERLTPELQKEISLVINQKDSASAYFVRRNFMFQNKKLRFSGWQTDKIIRLFKKESAIYNHEKIVHEKLIVNGKIGQLTTKLIHYSYSKYEDYKQKMVFYGKLKAQEELLKNTKPNFFHFYIRPVYQFLNQYILRLGILDGKKGIIICYLNALSVAVRFQELKKIRSNN

SEQ ID NO: 251 - protein, 258 aa, Unknown
  Description of Unknown: Sphingobacterium sp. HMA12 sequence
MSQKISALIITYNEENNIDEVLQSMEFADEIILLDSFSTDQTLERARLHPKVKIYQNKFEDFTKQRNLALTYANNDWILFLDADERLPAASQAEILSTVNDPQAKDAYYMYRLFFFCGERINFSGTQNDKNFRLFKKSKVTYDTKKKVHETLIVNGTIGSLKNKIWHYSFADYASYKEKMVHYGELKGKELYAKNKRYSLLSHLAKVSFKFFKAYFLKLGILDGRRGYQLCYLQSLSVHETFMSLKREEKNEDLYYKL

SEQ ID NO: 252 - protein, 258 aa, Budvicia aquatica
MDKKRLSVVVIAKNEAELISDCLISAEWADEIILLDGGSTDDTVQIAQRLGAKVYTNTQWQGYGKQRQIAQSYAGGDYIFMIDADERITPELRLSIEKIITSPTQEKQVYSCARRNFFLGKFMRHSGWYPDRTIRLYQNKLYGYNDNLVHESLDYSDAQVIRLDGDLLHLTCRDYFVFQRKQFSYAESWAFQSYQRGKSASMTSAVGHGLGAFFKTLVIRRGFADGKHGFLLACINAQYTFNKYAALWTLGQQKKAEK

SEQ ID NO: 253 - protein, 279 aa, Unknown
  Description of Unknown: Acidobacteria bacterium sequence
MSLSRLEVVILTKNEEAHIEDVLTSLDGLDCHVLIVDSGSTDSTLEICEKYGAEIVFYEYVTEAKTRNWVLAERADVDWILFLDADERLTPELNKELRELPDPSDGVVGFYIRREMWFLGRPLRYGGHQNNYLLHLLHPPVSQVVEQTRTLEYVNVEGQTGRLKHHMIHENKKPLRDWVMKHDFYAQREAEDRRSGVKRDKSVTEGRARAFTHKHVLSRLPPLLLPFAFFIYRYFLRFGFLDGRVGFIYYVMHDFWYPTLIAAKLVELEVYPAGDDEGS

SEQ ID NO: 254 - protein, 258 aa, Moritella sp.
MNKKISVCIICKNEENKIEACLQSVSWADEIVVVDSGSTDRTLDIVKKYTDKVFVLEDWPGFGEQKRRAEALASNDWIFSIDADEVVPETLALEIQAALNSANVEQVFSVNRLTHFCGKFVYHSGWYPDKLPRIYNRSRYRYNQNMVHESLECKGAPIIDLKHNLLHYTFSDLSVYLQKRTGYAEAWAEERYKKGKKGSLLNGSFSAVFAFIRHYFLRRGFLDGRIGFLIAAIQFQYTFNKYALLKFKNINTKPEPKD

SEQ ID NO: 255 - protein, 277 aa, Persicobacter sp.
MNKLPISVVIPVKNEGKNIKKCIERVMGSFSEIIVVDSNSSDDTLQIINSYSSVRCVNFSWNGHFPKKRNWVLRNIEIKTDWVLFLDADEFVDEAFIDELRQIFISEPKEVGFWLNYSNYFMGKQLRFGDKMRKLALFNRRFGEYEFIAEDSWSHLDMEVHEHPILDGKVGFVKAQIEHNDYRGLTHYIKKHSDYSDWEVNRFLSLANNYASLTKRQRLKYWLLSSGFLPTVYFLGTYFFKLGLLDGKIGYYFARFKANYFLQIQAKLGEAKRGSNA

SEQ ID NO: 256 - protein, 247 aa, Sulfurospirillum sp.
MVKISVTILTKNSEEHIKQCLEALQSFDEIIILDNGSMDDTLQIAQQYPNVKIVKHEFIGFGPLKNLAISYAKNDWIFSIDSDEIATPSLVQEIHALNFDKNTLYAIKRSNFYGMKKMQCCGWDNDFVKRIFHKQSTKFSDDLVHESLLNNGLKIKKLHNELEHYSFKSADELIDKMQKYSSLWAQDKKGKKSASPLQAVVRAFFTFIKFYFLKKGFLNGYEGLVISISNANGTFYKYIKLYENNKR

SEQ ID NO: 257 - protein, 257 aa, Empedobacter brevis
MSTKISALLITFNEEKNIQRYLNDVSFADEIIIVDSYSTDKTEQFALQNPKVKFVKRKFDNFTNQRNYAISLANNEWITFFDADEGISNELKEEIVSIIDNQPKFDAYYVYRKFFFKNKHIKYSGMQSDKAIRIFRKSKSKYKLDRMVHEIIECGGEVGALKNKLDHYTYDNEQEYLDKLNSYSKLRAQELRLKNLVPTFFHYKIKPAYRFFNYFIIRFGFLDGVSGYKIAKLHAISVANRYKYLDEIYRKENLNLG

SEQ ID NO: 258 - protein, 361 aa, Paenibacillus aceti
MVKNEEHNIKDCLNSVAQYADEILVVDNGSTDKTLDILKDFGCKVIYSDEYYFDRARNLYLEQATGEWILAIDADERLTSEGMKQIRKFISNAPQIIMGAYLPFYQYLGTGRWAYIEMMRLFRNHDQIRYNDKKIHPSPRPSIDKLGGVIHRGLYSPIHHMDSLDGKRTSKKREKYIKLSMEEIKDPGIQVLLGNEYIAVGEYKKAEVNLEKVILSQAPSDIRNRAALHLAQLYILQDDFDKASFVLDNIKTANVQFQSKIHTASAMNYMKFGLFEKALSASFRAIEKDPNAAHNYLNIGVIYDRLGDSKADEYYYSALKLNPYLLNPVIYCDGDSPNPYLHQNVVIESNLERILACMKNK

SEQ ID NO: 259 - protein, 250 aa, Halanaerobium salsuginis
MADLTALVLTYNEEKNIAGCLSSLDWVKNIIIIDSFSTDQTKEICLSYNNVQFYQHEFNNFAEQRNFGLKKLKTDWVLVVDADERVTEALQLEITKTLKSPAAPAYKIPRKNYFLGKWIKYCGWYPDYSIRLFKSSYHYQGLVHESPIIKEPILALQNDFIHYTYSDLASYLAKINQYTTLDAAKKFARNKKIGPLYLLIRPILEFIKKFILKKGFLLGSQGLILSVLSAYYQFLKAAKLWELNNLKDEK

SEQ ID NO: 260 - protein, 250 aa, Unknown
  Description of Unknown: Candidatus Rhabdochlamydia sp. T3358 sequence
MITVIVLTKNSQETLEDTLSSVRGFPEVLVYDTGSTDTTLDIAKQFPNVKINQSEFIGFGPTRNKAAKLATYDWVLALDSDEVLSSNLSQEILNISLDPNFVYQIDRHNFFNGKWIKSCGGWYPDPIIRLYHRKKTQFTDSMVHEKVSSQEMQIYSLSYPLLHTPYRNIHDFLKKMQVYSDLFAAQKKDSKPVSLTQAILHGSFAFFKSYFLKKGLKQGVEGFIISAYNGHTAFYKYLKLREAQKNQDTL

SEQ ID NO: 261 - protein, 256 aa, Unknown
  Description of Unknown: Flavobacterium sp. HYN0086 sequence
MILTEKQRMTALIITYNEEENIRDVLYNLAFADEIIIVDSFSVDKTYEIASSFPNVKVVQRAFDNFASQRNFALSLASNSWILFVDADERLTQELQKEISFVTSQKDCASAYFVRRNFMFKNKKLRFSGWQTDKIIRLFKKENAIYNDEKIVHEKLIVNGKIGQLKTKLIHYSYSNYENYKQKMVFYGKLKAQEELLKNTNPNFFHFYIRPAYQFLNQYLLRLGILDGKKGVIICYLNALSVAVRFQELKKIRCRN

SEQ ID NO: 262 - protein, 275 aa, Vibrio crassostreae
MRKHTLSVIVITKNEEDRIETCLKSVVDIADELIVLDSGSTDATVEICQKYTDNVTITDWPGFGKQKQRALDKATCDWVLSIDADEALDKEMSDALVELLKQDQIKHTAYKLPWGVTLYGTTLKHGRSARAVLRLFKREGSRYTLDEVHETVVPEQGSTGVLKGFLLHYTHRDYGHGLDKAAQYAWLGSQKYHRKGKKSHGLFLALLRAIWTFFLVYIIRRGFMDGSVGFIMAMTYAQVNFNKYVGLWILENRSDDRSDDRSDDRSDDRSNDQAK

SEQ ID NO: 263 - protein, 259 aa, Odoribacter sp.
MKISVVIQTYNSELYLGRVLESVKSFDEVVICDMYSTDRTLEIAQRYGCKVVYHEKIPFCEPARNFAIQSASYEWILVVDSDEVVPEDLRSYLYERIERKDDLQGLWIPRKDYLFGKFMHGDYPDYILRFFRKDNVFWPPYVHAIPRIEGNVEKIPRKKKNLAFIHLINNPLELKLQKMNTYSTMEIPKREGQNFSLWKMFYAPAYRFIKAYFIKGGFRDGKAGLVNAGLDAFYKFLTIAKIWESRIRPEDMDRELRDS

SEQ ID NO: 264 - protein, 265 aa, Unknown
  Description of Unknown: Candidatus Erwinia haradaeae sequence
MSARQKLSVVMITKNSEKLLSDCLESVAWADEIIILDANSSDATITIAAKYGATLYQSSVWSGYGKQRQIAQSYASYTMIFMIDSDERVTPELRKSIDFVLQQPPEKIVYSVSRCTLFLGRFMRHSGWYPDRVIRLYPRSFQYNDNLVHESLECFQTTVKPLHGDLLHLTDRDFCSFQLKQCAYATAWAKQRYQQGKNYGFLNIFYRTIWAFIRTLLVRASFLDGKQGFLLAVVIAQYTFNKYTALWALHYTSSHDRPSNKSNES

SEQ ID NO: 265 - protein, 252 aa, Halanaerobium sp.
MNNLTALVLTYNEEDNIAECLDTLKWVPKVVVVDSLSSDKTDEICLRYKNVSFFAREFDDFSSQRNYGLEQINTEWVLVVDADERITDSLQDEIKKILSNPKAEGYNIARKNYFLGKWIKYCGWYPDYTLRLFKSIYRYQGLVHESPEIKGKVDNLENDFIHYTYSNLKEYVSKMNQYTSLDAEKKYQKSKKIGVSYILIRPVLEFIKKFFLKKGFLLGVQGLILSLLSSYYQFLKSIKLWELNNISEDEVK

SEQ ID NO: 266 - protein, 252 aa, Dokdonia pacifica
MEKLTAIIPTGNEEHNIREVLESVTFADEIMVVDSMSTDNTISIAKEYTDTILRRKYHYSASQKNWAIPQAKHEWILLVDADERVTPDLRDEIIEILKNPPSDGTVAYWIYRTNHFMGKRVRYSGWQNDKVIRLFRKSKCAYEDKMVHAEIVADGNVGFLKNRFHHNTYITLNSHITKLNRYAAWQARDYDKKTGRLHIYHFVIKPFWGFFKHYVVQMGFRDGVVGLIISYLHAYAIWMRYAKLWLYRRGLK

SEQ ID NO: 267 - protein, 228 aa, Unknown
  Description of Unknown: Photobacterium aphoticum sequence
MDIADEIIVLDSGSTDETVAICQRYTDNVTLTDWPGFGKQKQRALDKATCDWVLSIDADEALDDTMAEALNTLLTQETIPHNAYKLPWGVTLYGKTLKYGRSARSVLRLFKREGARYTLDEVHETVIPAEGSVGTLPGYLLHYTHRDYGHGLDKAAQYAWLGAQKYHRKGKKSHGLGLALLRAIWTFFLIYIIRRGFLDGSVGFIVAMTYAQVNFNKYVGLWLLERDR

SEQ ID NO: 268 - protein, 548 aa, Unknown
  Description of Unknown: Microgenomates group bacterium GW2011_GWA2_46_16 sequence
MTKQSTIYDLPSKISVIIPTVNAHEELDLAIKSIKKNSDCSIEFVIVIDPDLNTGKVSGDILKVCKKHHVKAWVNKENLGPYGNWNRGAEVASTDWLVFATDDQYFAPHWDSNLLKYWEPKRLIAGRLIEPGIIPVYKTNIQQDFGVLPSGFKEAEFIAWCKNRQERGYTPDGFFIPMLQKREDYDALSHYPIAGKFGTSTAVSNDYLYVQAALKKGYQFGTAQDSYSYHFQASSWKKKTLEPTIVAVVLTKNEQKDLDNCLKSLAWVSEIVVVDSLSTDKTLTIAKKYKAKVFFRDLDNFSGQRNFALSKVTDSDWVLMVDADEVVEPALAKELQFFAKDIYLGGVQIPRKNYIFGKWIEHTDWYPDHRLVFFRPKIVQYTGAVHETASFIKGNETVAVASGHLVHHNYDTIREFVVKNLVDYPLQYAKVLDGDKVHFTALDLLSKPLGEFMRRFFLTDGYKDGLYGLILSALMGVQTLVAYCYLWEIQGKRADLTTQETQTLFRSLRGKSSELTYWLLTLTIESATGLTKLAHRARRKILKLANGL

SEQ ID NO: 269 - protein, 254 aa, Nonlabens xylanidelens
MPKYPITAIIPAYNEAHNIVEVLKSVSFCNEVILVDSNSTDNTVELAQPYFDKLLSREYIHSASQKNWAIPQATNEWILLVDADERVTPALKEEIINLLPNLETNGHTGYWMGRRNFFMGKQVRYSGWKNDKVIRLFQKSKCKYVDKHVHSEIETNGSLGWLDNKLLHYKYVNIDHHVNKLQRYASLQARDFDKKVGKITLFHVVVKPFWGFFKHYIIQLGFLDGFVGFTIAYLRSYGIFMRYVKLWLLRRGIN

SEQ ID NO: 270 - protein, 267 aa, Dinghuibacter silviterrae
MLVQQERLVSLRVTGNSLRRTLPVSAVLITYNETENIRRTLSRLFWCDEIIVVDSYSTDDTVDACRLFGAKVFFKEFEGYGAQKRFAISKATNDWVLCLDADEVLSDALIDEICREWEDGPRGAGYLLPMNLVFLGREFTHGRESGRHFLRLFNRRHGNVNEALVHEKIELDGTVRKLRHHILHYSYRDIHQWYVKCDRYTTLAAREAVRRGKRKSRLAVFFSFPYYFIHYFVINGNWLNGMEGFYWSAYSALYHFTKYLKIRELQK

SEQ ID NO: 271 - protein, 252 aa, Ferriphaselus sp.
MPTTLSVILITRNEAANIRDCLASVSWADELIVVDSGSTDETLTMAREFTDRVFSYDWPGFGPQKNRALGYATGEWVLSLDADERVTPELRQDIEAAIREGRCDGYRMPRLSQFCGKFVHYSGWYPDPVLRLFRRTQGRFSDSLVHERVELPGKAGMLEHPLLHYSYLSRQDVERKVEHYSSAAAQQMFQNGRSAWPMTAPLRGAWAFVRTYLFKLGVLDGWTGWQIAAMNARTTYLKYHKLARLRSGQTSA

SEQ ID NO: 272 - protein, 259 aa, Unknown
  Description of Unknown: Fusobacterium sp. oral taxon 370 str. F0437 sequence
MTLTVSIITLNEEKNLERTLKSVEDFADEIVIVDSGSTDRTEEIAKKFGAKFVYQKWLGYGAQRNKAIDLATSDWVLNIDADEEISPELAKRIKAIKENSRYKVYKINFMSVCFNKKIKHGGWSNSYRIRLFKKDSGRFNENNVHEEFETTQEIAKLHKYIYHHTYSDLEDYFDRFNKYTTLGAIEYYKKGKKASLISIVLSPIYKFLRMYIVRLGFLDGLEGFLLATTSSLYTMVKYYKLREIYKNKSYIEKEGNNGN

SEQ ID NO: 273 - protein, 255 aa, Arcobacter cryaerophilus
MNISVVVLAKNNEKTIENSLKSLVDFDDVVVYDNGSTDETISIVKRFPNVNLIQGEFKGFGWTKNHATSFALNDWILIIDSDEVVDSELLRELKNKKLDEKTVYKLNFKAFYKDIQVKHCGWNNQKIKRLYNKNITSYNSNDVHEDIITDGLNIEELKGNVEHYSYHTISEFIIKADRYSTLFATNNVGKKSSSPTKAFFNGIYSFFRTYILKQGFRDGYVGLVIAFSHMVTNFYKYIKLYEKNLELKNRYNDKK

SEQ ID NO: 274 - protein, 261 aa, Roseivirga sp.
MTSTRNKVTAIIPTYNEEVNIGQAIESVLWADEIIVVDSFSKDRTVEIAESYDNVNVIQHEYVNSATQKNWIIPQAKHEWVFILDADEVVTSELEQEILNTLRNPNKTAYWIKRRTVFMGEEVKYGSWRSDKVVRLFLRDECRYQDKKVHSEIETEGEIGILNNHLRHYTWKGINEFIVKVNWYSTWKAYDKIENGKPTGFFVTTVIKPFWRFIYEYLVRFGFLNGKVGFHIAILSAYDVYSRGLKIQLIKNGEAIAKDRI

SEQ ID NO: 275 - protein, 249 aa, Halobacteroides halobius
MVSIGVLVLTYNEEDNIEECLESVSWVDEIVVVDSYSQDDTLELARQYTSNIYQREFDDFATQRNYGLDQMESEWVLVVDADERVTSDLQEEVLNKLSNPEASGYKIPRKNYFLGKWIKYCGWYPDYTLRLFKVADNRYSGLVHEGLKIEGTVEKLEGTLIHYTYRDLEHYLNKINHYTTLDAQKKYQAGKRKRLLYILMRPVLEFIKKYILKKGFLLGSQGLILAILSSYYQFLKYIKLWEKYNSDES

SEQ ID NO: 276 - protein, 245 aa, Mangrovimonas sp.
MPTLSVIIPTFNEEHYIADALHSVQFADEILVVDSMSTDKTVQIAKSFGARVLPRKFDNFSNQKNHALSYATGDWILFVDADERITFPLKKEIYDAMEKGTHTAYKLNFPHFFMNRFLYHHDNDVTRLVLREKCHFEGLVHEKLIVDGSIGKLKTPVLHFTYKGLAHYIGKKDSYAWFQAEQLLKKNKKVTYFHLAFKPFYRFFSSYILRGGFLDGIPGLAIASINAYGVFSRYAKLMLLKKNMS

SEQ ID NO: 277 - protein, 245 aa, Unknown
  Description of Unknown: Candidatus Levybacteria bacterium GW2011_GWA2_36_13 sequence
MKISAVIIAKNEEKMIAEAIDSVAFCDEVIVIDNSSNDKTSEIALEKNAKVTKIESNNFSEIRNLGKDLAKAEWIFYIDADERVTTELRKSIQENIEKEEFSAFKVLRQNFYMNRKWPNIEEMERLFRKEALKRWTGKLHETPDYEGKIGILDGYLLHYTHRDLSQMLDKTIEWSDAEALERFSSNHPKMSWWRFLRVMLTSFIKSYFIERGFRAGTVGIIESLYQSYSSFITYAKLWEMQEKKK

SEQ ID NO: 278 - protein, 248 aa, Thermosinus carboxydivorans
MTLAVLILAKNEEKNIGDCITSADFADEVIVIDDFSTDNTALIAEKLGAKVYKHALNGDWGAQQNYALEKATADWVFFLDADERITPGLAKEIKDAVTDGRHYAYQVPRLNHLMGQPIRHGGWYPDYVLRLFPRGHVRVEGVVHPRMVHDLSVRTLKNDIVHYTYPSWEHYFNKLNLYTTLAAEKNAQKGVKVSFIRDIILRPIFAFFKMYVLRSGWRDGKAGFVLAAFHYTYTMAKYTKLYWRQRGA

SEQ ID NO: 279 - protein, 259 aa, Unknown
  Description of Unknown: Candidatus Schekmanbacteria bacterium sequence
MTGKNKKISAVVITFNEEENIEECLKSLLWTDEIIIVDSFSNDNTVEIAKRYTSKIYQKVFSGHIEQKNFALSLTNYEWIISLDADERISNGLKNEIIETINSPSSCNGYFIKRENYYLGKKINHSGWNPDYKLRLFKKEYAKWDGINPHDSISLEGKKGYLKNPIIHYTYKNLTQHFSQIDYFSSIGAKEYYSKKKQCRFYHLLLLPFITIFKKLIIKGAFLDGSRGIMISMATVFSEFLKYAKLWELNERERRSKKT

SEQ ID NO: 280 - protein, 228 aa, Unknown
  Description of Unknown: Armatimonadetes bacterium CG_4_10_14_3_um_filter_59_10 sequence
MSDAFHRPDAPTRPTTLSVVITTYNEAEHIGPCLDSVAWADEKIVVDGESTDHTREIAEGRGARVFVQPNYPMLNHNKNYGMEQAKGDWVMSLDSDERVSPGLRDEICAALSCSPVDGYRIPLRNFFWGKQLRRAGGYPGVVTRICRRGNGRFGTEYVHQGLEIEGAVESLASPLHHYPARNLYELIAKLNFNTTMTANHFGRKGTRGSIPRACLHAFGDFIYRYFCR

SEQ ID NO: 281 - protein, 267 aa, Unknown
  Description of Unknown: Chloroflexi bacterium sequence
MERIVKKLSVLVPTYNNESIIRECLESVKWADEILICDSYSTDRTLDICREYTDCILQHEYINSASQKNWAIPQCSHEWVLVIDTDEQLEPQLEEEIRAFLVDPPSDVDACRMPRKNIILGQWLTAMNLWPDYVTRLFRRDASRYQDKEVHADIEVRGSVLTFERSFIHHGTPSLSKQIGQLDRYTRYQADEFVKRGRHFSWARLLLRPPAAFFYYYFLKRGFTAGFRGLFLSAHASMYSFCTYSKLWEKERQVEGQITSRRVVDRG

SEQ ID NO: 282 - protein, 256 aa, Unknown
  Description of Unknown: Flavobacterium aurantiibacter sequence
MLHPHKGKLSVLIITLNEERNMKELLTELAFADEVIVVDSYSTDRTKEICMSFPYVKFLENKFENYTSQRNFAMDQAQNDWILFIDADERLTPELKKEVLETIVSEHPKSAYLLYRTFMFKNSKLRFSGWQTDKIFRLFHRGKARYKNERLVHEKPDVIGEIGKLKSKLIHYSYSDYQSYKAKMVAYGRLKAIEAKNRGIVPNFFHFVIKPLYKFVYQYLIRLGILDGGRGIVICYLNAYSVYVRYQFLKEMTAKN

SEQ ID NO: 283 - protein, 297 aa, Unknown
  Description of Unknown: Verrucomicrobia bacterium sequence
MSGRSNVRAPLSVLIPVKNGAANLSECLATVAFADELVVVDSASTDGTQEIATAARARVVQFTWNGKFPRKKNWSLENIPWRHEWVLIIDADERITPELEREIISAIRRSDVDGFYLNRRFWFLDGWINHCGYFPSWNLRLFRHRKGRYERVEAGSEFDSGDNEVHEHVLLDGRAEYLSTPMEHYAFPDITTFIEKHNRYATWEAAVRAQLCRRSDEETLRPNAFGTALQRKRWLKRLARRAPFRPTLRFLYHFVWRQGFRDGYRGWILCRLLAWYELISAAKARELAICRVRRESC

SEQ ID NO: 284 - protein, 265 aa, Unknown
  Description of Unknown: Candidatus Schekmanbacteria bacterium sequence
MREKLTALIPCCNEEENIRDCLESVKWADEIFVVDSFSNDRTVEIAKEYTSRVIQHEYINSATQKNWAIPQASNEWVLIVDSDERVTPDLRDEIINILSSNPRYDGYYIPRKNFFLGREVKYGGWGYENDLNIRLFRRDKGRYEDKEVHADIIIDGKVGRIKEPFLHYSYNSLEQYMKKMSRYTNWAAMDLCKKHKRIGVTHLLFRPFFTFLKMYVLKFGFLDGIRGIILAFLSSYYVYIKYAKAWEMINAENIKKPEAHPRSEK

SEQ ID NO: 285 - protein, 255 aa, Cellulophaga tyrosinoxydans
MAKLSVFIITYNEERILDKCLNKLSWVDEIVVVDSGSTDATLDICKKYHVKVFHNDFQGFGAQKQFALEKTSNDWVLSLDADEILSNELIDEIKEVLIENTYIAGYFINRQHVFLDKVFNYGQDSKKCVLRLFKKSKGKFDGKMVHETIVVNGNTGNLKNSFLHFTARSLEHYLEKINTYATIFAEGQYLKNKKYSILEIALKVKLEFLKKYFLNLNILNGKEGFYWSFLAAYSSGLKYIKTNEQYKKVKKQLMF

SEQ ID NO: 286 - protein, 273 aa, Unknown
  Description of Unknown: uncultured bacterium sequence
MSITVIIHSFNEEKNIHDCISSAKLLTDKIILVDMASTDKTMEIAKNLKVPIFNFQIKSNYVEPAREFGIKQATTEWVLILDADERITNELANEIKSVIGQSRLNRSESVKSVTDSTDLTDSTYYKVPRRNIFAHMKWLKHGGWWPDYQIRLINKKFFVNWPKRIHSTPQIKGNFGYLNNPLTHYFHGNLSNMIKKTIIFEDIESELLYKAGRKTTNMTFFRKFFAELYRRLIKNLGFLDGPLGIIESIYQAFSKTITYLFLYEKQIKKNRPL

SEQ ID NO: 287 - protein, 256 aa, Motilimonas sp.
MKKQHSLSVILITKNEADRVEKCLQSVAHVADEIIVLDSGSTDDTVAICQRYTDKVTITDWPGFGKQKQRALEQATCDWVLSIDADEALDEVMQQSMTQLLCQTDIECTSYRLPWGVTIYGKTLKYGRSARSVLRLFQREGARYTLDEVHETVVPAEGKKGKLAGLLLHYTQRHYGHGLEKTAKYAWLGAQKYHRKGKKARPFPLIVLGGGWTFILIYFIRRGFLDGAIGFIVAMSYAQANYNKHMGLWLLQNRKP

SEQ ID NO: 288 - protein, 264 aa, Unknown
  Description of Unknown: Candidatus Levybacteria bacterium CG_4_10_14_0_2_um_filter_36_ 16 sequence
MKTQTLLLQKNIMTNISAVILVKNEEKNIKNCIKGLIKLDEIIVVDDDSTDDTIKRIKSFRNKKIKIFYRSLNCNFAKQRNFAMEKAENDWVLFVDSDETVSEKLLSEILRIVENNTDTNGYYIKRLDYAWKKKLKYGEAGNIKLIRLGMKSRGLWKGKVHEKWIIKGKIGVLENEIIHCPHQTVREFIKEINEYSNLRARELHESRYSSNVLSIIFYPFTKFTLNYFIKLGFLDGVPGLVYALIMSFHSFLSRSKLYLYDKKK

SEQ ID NO: 289 - protein, 271 aa, Unknown
  Description of Unknown: Candidatus Accumulibacter sp. SK-11 sequence
MADRTRLSVIVTTYNNDRTLRACLESVRWADEIVVLDSLSSDDTLVIARSYNACIKQHPFMGYGPQKQMALELTSNDWVLLLDADEALSPGLQNEVRRLLQDGPLVDGYEIPRQEQLFWRMCHPATRMNHFLRLFDKRRGGIDDMPIHAAPKVQGRIGRLKSLLYHFGETDVHAKVEKINAYSTGLVKEKLKKERWGIPLIMIFYPPFFFLRSYFFKRNFLNGWAGFINSVVAAFYVFLKYAKLYEHDQFAKHGTRLFPEGAPPVPAARQD

SEQ ID NO: 290 - protein, 255 aa, Unknown
  Description of Unknown: Pectobacterium brasiliense sequence
MEIRNKLSIVIITKNASELLDECLRSVEWADEIIIVDSGSTDNTVEIAENYGARIYHTNDWLGYGKQRQKAQRYANGDYIFVIDTDERVTPELRDSIEKILAKPDIDNKNVYYCARRNLFLGRFMRHSGWYPDHVIRFYANNCFTYNDNTVHESLNYGNASLKKLSGDLLHLTCREFSSFQKKQLHYALAWAEERHSRGKRCRYSDILIHTAFAFLKTWVFRAGFLDGKQGLLLAIVNSQYTFNKYTELWSLQKK

SEQ ID NO: 291 - protein, 247 aa, Unknown
  Description of Unknown: Microgenomates group bacterium GW2011_GWC1_39_12 sequence
MISAVVLTHNNEDVICKTLESVSWCDERIIVDDNSTDRTLEVVKPYDVIIIQHALNDDFSTQRNIGLAKAKGEWVLFVDSDEIVPIALQKEILSLPKDDKYIGYYVNRKDILFGRELRYGETANVKLLRLAKKGTGVWVRPVHETWNVRGPVASFTTPLLHYPHKSVSAFLSQINRYTTINAKVFFDQGIRTSALQIIMYPIAKFIQNYIFRLGFLDGVAGLVIAIMMSFHSFLTRGKIWELQQKNI

SEQ ID NO: 292 - protein, 249 aa, Unknown
  Description of Unknown: Candidatus Collierbacteria bacterium GW2011_GWB1_44_6 sequence
MKVTAVVITNKEELNKQLLESLSFSDEILVVVDAPVIPAKAGNHQITPKNKKIKDLFHALRDDFSSQRNYALSKAKGGWIFFVDDDEYVGTELQREILDKVNNPGYSGYYIRRQDVVYHQPLKHGETGKIAILRLARRTAGRFVRPVHEVWKVKGKIGKLQSPLYHIKDHLVSDFIEKMSFYSQIDSLALAKEGKPFSYFRLLLFPIAKFNLNYLFKRGFLDGTAGLFLAYLMAVQSLTVRVAQWENQN

SEQ ID NO: 293 - protein, 245 aa, Nitrospina sp.
MEKISVAIITLNEEKNIERCLESVRWADEIVVVDTFSTDRTVEICRRFTDRVFQETWQGYGPQKNLCASRAANRWILNVDADEVITAECAEAIRNLLAGEPERPVYRFPRKNFFGKRWVRHAGWYPDRIARLYDKSRAAFSESMVHERLIPDDDAGLIDFPILHYSFAGMEDYIRRQNRYSSIYAEEKIRNGWRANWTHLYLRPPWVFFKTCFLRQGFREGFLGVFLSLAMAFYTYLKYAKTRSV

SEQ ID NO: 294 - protein, 256 aa, Unknown
  Description of Unknown: Fusobacterium ulcerans sequence
MKLSAAIMTFNEERNLERTLKALADICDEIVIVDSGSTDRTKEIAENYKARFIHQPWLGYGKQRNTSIESCNGKWILAVDADEELSPELKQKILEIINGNEDKKVYEINRLSVCFGKQIKHGGWGTSYAVRLFLKTAGRFNDNTVHESFVTQEEVYKIKEDIYHHSYLTLEDYFSKFNRYTTEGALEYYKKGKKASIGQIIFNPMYKFIRMYIIRLGFLDGVEGFLLASTSSMYSMVKYFKLREIYKNGSYINKKN

SEQ ID NO: 295 - protein, 256 aa, Desulfovibrio alaskensis
MKSGITGLVLTYNGGRLLDKCLASLAFCDRVLVVDSFSTDSTVEIARNRGADVLQNPWHGPAAQFEFALAQIDTEWVVSLDQDEICTPALSQAVQKTVRTAPAGLAGCYPRRRNWYHDRFMKHSGWYPDRLLRVFRPALMQVHVSGAHYSFHPQGPTQNIDADILHYPYESFFQHLEKINAYAQQGADDLRRKGKKGGIAAGMAHGFARFFKLYVIQRGMLDGRAGFINATHGAFYAYLKYVRVQEGDWGAPYDHS

SEQ ID NO: 296 - protein, 251 aa, Microvirgula sp.
MKKLSVCVLTFNSERLLEACIEPLTRIADELIVVDSGSSDGTLAILEKFGLTPLYRPYSTHGSQMNFAIDHASHDWVLCMDSDEVIDEATVNAILKLKQELDDPTLAYRITRHWFVLGQEVHAIYPVSSPDYPVRLFNRSIARFNDAPVDDRPAGFADTRIIAGFVRHDTFYTIHEIFKKLNDYTTRLVKFKKVSPSLARAFASSIASFWKWYVVKQAWKDGRVGLVTATYASWYAYLKYMKAWFQARHKP

SEQ ID NO: 297 - protein, 297 aa, Unknown
  Description of Unknown: Acidobacteria bacterium sequence
MQVLEELRQSRPRPAAVYLPVTVIIPTRNEARNLPRCLESLRGAGEVYVVDSNSTDETPEIARTFGAKVVQFHYHGGWPKKRQWALDTLPIAYDWVLLLDADEALTPRLAEEIREAIKDSRYQGFYVRLHVVFLGRPLRHSGARFHKLSLFRRGKGHFECRLREQHESMCDMEVHEHVIVDGPTAKLKNPLLHCNADSLFQYIAKHNEYSNWEARVWLKEKGNATELPPALLRTQAQRRRWLRRNCFGLPGSPVLFFLYKYFFRLGFLDGIPGLIYCGLQGIQFFHIKAKIHELAKG

SEQ ID NO: 298 - protein, 252 aa, Unknown
  Description of Unknown: Calditrichales bacterium sequence
MHTVKLSAVIITFNEEKNIVRCLDSLIDVVDDIVVVDSFSTDQTPALCAQYKVNFVQRPWLGYAAAKNHANAIAKYDFLLSIDADEALSAELKEAIIKIKSDMRLDAYYISRLTNYCGKWIKHCGWYPEYKIRLWNRTCGEWRGVIHESLVFHNTVRSGTLKGDLLHYSFYSISDHIHTADKFSEIAAEEKVKEGFRVNIIWHLILNPLFTFFQKYILKRGFLDGYYGFVISIISAFSNFLKYAKIKQKSQT

SEQ ID NO: 299 - protein, 252 aa, Megasphaera sp.
MPKITALILAKNEESNIRDCIESVQFADEVLVIDDFSTDSTKEIAESMGARVLQRSMNGDWGGQQTFAIQNAASEWVLFIDADERISGPLAEEILEVVKRGEKCAYWIMRENKFHHNQATHGVLRPDYVNRLFPAAGSYVTGYVHPTIVTPYPNKKLNHIMYHYTYDNWDQYLNKLNNYTRLAAEKYKEQNKKCSFIKDVMFRPLWAFIKVYFLNLGFLDGKMGWVLSVNHYFYTMNKYVKLYYLYKDNGKL

SEQ ID NO: 300 - protein, 247 aa, Unknown
  Description of Unknown: Chryseobacterium sp. YR460 sequence
MNVSGLIIAYNEEKNIQEVLECFDFCDEIIIVDSFSTDKTLKIAEKFPNVKIIQNKFEDFTKQRNLALDAAKNDWVLFLDGDERITPELRKEIIEELNKPEQKDAYYFYRKFFFAKKPIHYSGTQTDKNFRLFRKSKARYIAGKKVHETLEVNGTIGELKNKLLHFSVNDYESYKKKMIHYGVLKGQELALKGKKFSSLTQYSKTAFKFFKAYILRLGILDGKEGYQLSYLQSLSVFETYESLKEQN

SEQ ID NO: 301 - protein, 251 aa, Unknown
  Description of Unknown: Bacteria sequence
MEDMHKISVAINTYNSAKYLPEVLDSLKGFDEVVVCDMESTDDTVDIALAHGCRVVTFPKGNINICEPARNTAIRSASNEWVLVLDDDELVTPELHKYLHGRVMSPDCPEGIDIPFVNKYMGEFDRHVSEYHVRFFRRDKVDWPPVIHARPVVDGRVGRVSRKNACILHINDACIADRITKLNRYSDNEVPKRVHKNYGVVSMLMRPFWFFFKCYILKGNIRYGRRGVVRAYFESMYQMSIMAKVTECRLK

SEQ ID NO: 302 - protein, 253 aa, Helicobacter valdiviensis
MNKISAVILTKNSARLLKKVLEALKELDEVVILDNGSKDETLTIAKSFSNVSIHFHEFIGFGAMKALGSKLAKNSWILTIDSDEIASKTLIDEILNKDLSPTFCYSYDVKNYFQDTYIYSCGWGNDRCIGLYHKDFYEFNQNKVHEAIVPLSNKPLKVIDLKGHISHYPYENLEAFLDKMQKYSTLFAMQNCGKKQSSLKKALLHSSWYFFRNFFLQKGFMQGKIGFIISAYNAQTAFWKYLKLDALNKSEKL

SEQ ID NO: 303 - protein, 245 aa, Unknown
  Description of Unknown: Ichthyenterobacterium magnum sequence
MPKLTVIIPTYNEEHYLEDALYSVKFADEIIVVDSFSLDNTLQIAKQFNCIITQRKFDDFSSQKNHALTFATNEWVLFLDADERITNTLQIEILNTINNPKHSGYKLNFPHFYMNRFLYHHDNDVTRLVKRELCHFEGDVHEKLIVKGTIGKLKNPVLHFTYKGLSNYIGKKDSYAWFQANQLFKKNKKATCFHLAFKPFYRFFSSYIIKGGFLDGIPGLAVASVNAYGVFSRYAKLILQQKGLK

SEQ ID NO: 304 - protein, 257 aa, Acidithiobacillus sp.
MSKQLVSVVYITLNAEKYLEKSLDSVKSIAQEVLIVDCGSTDQTLSIAHKFEAKVIYRAWEGFAAQRQFAVDSACCDWVLMLDADEILTEPGVQMIDEALSDPADVAAYFLRRLSVFHDKKILHGDWGRDRVLRLFDRRQGKYTDNLVHEAWETCAPIKALPGISMLHYSYKNYAELLDKMRRYAILNAQQLHLKGRIVRAHMPMTHAIAALLRSYFLRLGMLDGVEGAAIAWTIALGAFMKYAIALEMQAQDKDAS

SEQ ID NO: 305 - protein, 256 aa, Bacteroides salyersiae
MKISVIINTYNASKHLKQVLEAVKGFDEIVICDMESTDNTIEIAKTFNCKIVTFKKGNHNIVEPARNFAIQQASHPWVLVVDADEVVPEQLKEYLYKQIASPDCPAGIYIPRKNYFMGRFMHCHYPDHILRFFKKEGTVWPPIIHVSPIVEGTLFSIPARRKELAFVHLANDSVSDIIRKTNEYTRNEVERKKNKRYGTLAFFYRPFFRFFKTYILKGGIRDGKEGFIKACLEGYYQFVMLAKLTEHHKGNHTDNK

SEQ ID NO: 306 - protein, 243 aa, Unknown
  Description of Unknown: Candidatus Shapirobacteria bacterium CG10_big_fil_rev_8_21_14_0 _10_48_15 sequence
MLSAIVLTKNEAGNITACLKSLRWCDEIIVIDDCSQDETVVLAQKLGAKVYRRALQNDFAGQRNFGLAKASGAWVLFVDADERVTPPLRDEIIQAINLPVAGYFLKRVDYLWGRPLQHGETAHVRLLRLARKTAGQWQRQVHEIWQIKGATEELKNPLFHYPHQDLSEFIDHLNFHSSLHAQALAKEHKKSSIVKVVFYPPAKFLQNYFWRQGFLDGMPGLISALMMSWHSFFSHAKQYVKNH

SEQ ID NO: 307 - protein, 459 aa, Pedobacter sp.
MSNPHFSIIILTFNEEQHLPRLLQSIETLKAKTYVLDSGSTDQTLNICQKYRLQVRQHPFHNHPKQWDTALRCFNIQTPWVIGLDADHIVGDELCTMLKNFKDEEYTNVNGIYFNRKNYFKGKWIRFGGYYPKYLLKMFRYQVGYSDLQENMDHRFQVPSRTIIWKKGYLIEENLKENEISFWLDKHNRYSDLVAEEEIQRLTKTRTQVIKPNFWGSPNERNALLKKIWWQLPRYLRPFLYFTYRMIFQLGILDGRTGIIFHFLQGFWFRLIVDIKIDEKIGKTRRKPLNFIFSFLSLFLLFYCFNLMYIGITSPGQYYSSFLDKHFNYISSWRNFYISSAAYVLKILGYHVSTNENHLINHGFSGFKLVYSCLGYGVMSCFAAFVIAFPKSKRSKILFLAIGLTGIQLLNTLRLILISIYYKPQTAASNIDHHDIFNFMLYLILGTAVYFWIDISSKT

SEQ ID NO: 308 - protein, 286 aa, Rhodobacter maris
MTTHESNRAPALPVTVAVPVKNEEGNLAKCLDRLGRFSEIVVIDSGSTDRTCDIARKFGARVVNFKWNGQYPKKRNWFLMNEELNTPWVLFVDADEYLDDAFCDELEQAVRREDVDGYYLGYDNYFLGKALHHGLEQRKLALFRVGRALFEKIDEDHWSTLDMEIHEHPIVEGKIGQISTRIDHRDYKGFAHFIDKHLAYAKWEAYRYNRLRQTPEAWEHFTGRQKFKYTNLERWWYPWFYFLFTYVVKRGFLDGGAGFQYSAYKAWYFQTIRLLIQELKSADTKP

SEQ ID NO: 309 - protein, 254 aa, Unknown
  Description of Unknown: Microgenomates group bacterium GW2011_GWC1_38_12 sequence
MEDKLSVTIITLNEEKNITRCLDSIKEIADEIIVVDSGSKDKTVEIAKKYRAKVFYRKFGNYASQKNFAARLAQSEWILSLDADEEISPELASEIRSRIADNRSPFVAYSIPRKNVIFGKFIKYTRWQPELDRHVWLWRKDEGKWKGDVHEEVIVDGKIGRLKYAKIHHQYETVSEFMDMMNRYSELDAQEHVQKGGRFSFPKLFLQPIYNFLVRYFYRLGFLDGWRGFVLSYLMTVYHFELWIKVWEKERGIR

SEQ ID NO: 310 - protein, 254 aa, Thalassospira xiamenensis
MSTNIPKLSVVITAHNEEARLPSCLSHVAFADEIIVLCDKCTDRTEEIAASAGAKTLVGSWQMEGERRNFALAEATGDWVLEVDADEHVSEELAKEIREVISLSNFGFHGLPVDNYIGNRLVRNGWGSSFGKSSYRGLFRRGIKHWGPQRVHPAVKFDGDEGPSLKYPVRHYVDRNISDMIKRLDSYSTARAADLRDSGEIGGFANNLRRLVSRFIRCYVGRKGYKEGGLGFLIALFAGLFPVISYLKARYEDN

SEQ ID NO: 311 - protein, 255 aa, Acidiferrobacter thiooxydans
MSLSVIVITHNEEDMIERCLASVAWADEIIVLDSGSTDRTVAFCRQRGARVVETDWPGFGPQKNRALDHATGAWVLSLDADEYLTQEAQAEIQAVLASGPQADAFRMPRLSSYCGRFMRHGGWYPDYVTRLFRRGRARFSDDLVHERLLVSGPVATLREPLRHETYRDLEEVLRKVDHYSAAGAAMAAQGGQRGGVMLALAHGLWSFVRTYFVRRGLLDGPEGLMLAISNAETTYYKYMKLWLLRKQRGRADESS

SEQ ID NO: 312 - protein, 281 aa, Unknown
  Description of Unknown: Bacteroidetes bacterium sequence
MSEKLSVVIITLNEEQNISLCLDSVWQVADEVVVVDSFSTDNTKQICLDRGVIFIEHKFEGYIEQKNYAVTKCTNDLLLSIDADEVLSNELISSILKVKQNPTYCSYSINRMSHYVNRFIKHGHWFPDRKIRLFKKGVGKWTGRNPHDNFSLLNGGETVNLKGVLYHYTFSSVYEHVAQVNKFSEIGSQELDEQPLLYLVAKAIFSPTWGFLYGYIGRLGFLDKWQGLTIAIVSSTETFLKYAKALSRRYELRNDIEQEKVTPGISLIISTYNWPEALEQC

SEQ ID NO: 313 - protein, 249 aa, Unknown
  Description of Unknown: Ignavibacterium album JCM 16511 sequence
MNKISVIIITKNEAENISECLNSVKWADEIIVVDSGSNDETISIAKQFTDKVIFNEWKGFAAQKTFALNLAQNDWVLSLDADERVTEELKDEILNSNLEKFDGYRIKRDNYFLGKLIRGCGWGNDYQLRLFKKSETKLTDRLVHEGFEVEGNVGQLKNSMLHFSYRNFSDAFTKINHYSTLEAIEKQNKKRVNAFTIVLTPLAAFLQHFIFRKGFIDGIYGLFVSVMHAITKLQVQLKIWELKKKKQIS

SEQ ID NO: 314 - protein, 313 aa, Anabaenopsis circularis
MLSKIPVSVLIPAKNEEANLPACLTSLQRADEIFIVDSQSTDKSIEIANNYGANVVQFHFNGRWPKKKNWSLDNLPFRNEWVLIVDCDERITPELWDEIAQAIQNAEFNGYYLNRRVFFLGKWIRHGGKYPDWNLRLFKHKIGRYENLNTEDIPNTGDNEVHEHVILQGKVGYLQNDMLHEDFRDLFHWLERHNRYSNWEARVYYNLLSGQDEQGTIGADLFGDAVQRKRFLKRVWVHLPFKPILRFILFYIIQRGFLDGKAGYIYGRLLSQYEYQIGVKLYELRNCGGKLNTANTAKPVPPSLPQKIEQTAV

SEQ ID NO: 315 - protein, 271 aa, Leptospirillum ferrodiazotrophum
MAKDLPSDSRRPPLSVYVLGYNQEHKIKPALESVLWADDVVLVDSYSTDRTVQIAEELGVRVCQVPFEGFGHLRNAAVNFCRHEWIFSLDSDERMTPEAQTEIEGILADRDSADAYLVPRKNYFLGRWVRHSDWYPDFRQPQLFRKGAMVYSADVVHESYRLNPGKTLGKMSSAIIQIPFSDQEEMIRKMNRYSSLGSDKVLARGQRASVLIALGHAVWSFFRHFILKKGFLDGSAGFVIAFYNFESAFYKYAKAYEKQRERLPPHSREGP

SEQ ID NO: 316 - protein, 250 aa, Unknown
  Description of Unknown: Candidatus Beckwithbacteria bacterium CG_4_10_14_0_2_um_filter _47_25 sequence
MKLSAVVLTHNSGAVISDCLQSLRFCDEIIVVDSGSIDNTLKLAASARIYKRKLVSFSGQRNFGLKQATYPWVLMIDSDERVPIELAKEIKAAIITDSYSAYRVKRLNYFFGRAMKHGGYWPDWQTRLFRVKDFLKYSGSVHESPHFTGLLGSFANYLTHYSHNNLSECLAKSIIWTKKEAVEFVKAGHPPVSWWRLMKVMVWEFCHRYFKKLGFLDGYVGLVEALIQAMNRFYVYQQVWELQRHEDRPL

SEQ ID NO: 317 - protein, 691 aa, Dehalobacter sp.
MKLSIGMMVKNEEKNLKRCLESLKPLLNAVSSELIIVDTGSMDQTVEIAKKYTNKVYFHPWENDYSKMRNITVQYTRGDWFMFVDADEELRGYEAIVQFITSKVSKNINAAAIQIDNIFQTNNTSKVGTGVVTRLFRKTAKFGFQGVIHEEPIFEPPLAVLDAQLLHYGYPADDPELRERKLKLYEPILLQAIEKDPDNVGLLFYLSNTIATFKNHKDALDPAVRAYETAKRKNMDPVEYFYVYSTLAMLYNDNGEYKKTVELAQEGLKYREWAIDLWFCLAKAQGMLKQYQEAIASYQKYLYYVENYDQFRGKDPRIISNSFSHKDDVYYDLAVMYKEIDQKEDALEALEKLETIEMIEKAVPHQISLYLSLEKYQEIKCFYNKISKFAKKDLEKSFCLALETLLFSEDEIKREEVARLFHNEDSEYGLLNTIRLWGQKNVTNQLLSGIKSLSLSELGFYYGDIFYFVTKMKLPLNSVNLEIQEQELELLFKYLTEKYPDFDEVCDVYLQSRDQDAPLEEQRVHKILRRIMLQAENLDEEKYDQVLDRYIHEGIGYIRRIYRPELFENDKPYLLANKEEIFFYCLDKAHFVENSDQAQYVRYLKKALLEYPDMKKGIEVLLDRLTKKIDVQTQPAVSTEMQEYARIVKANLKQFIQNGMFKEAREIIQAYEEIIPNDPEIAEFKADMEDN

SEQ ID NO: 318 - protein, 248 aa, Unknown
  Description of Unknown: Ichthyenterobacterium magnum sequence
MISALAITYNEEENIESFIKSLSFADEIIIVDSGSTDKTLELARQYEVKIVNRSFDNFSAQKNFALQQAKHDWIVFFDLDEVISKELAEEIKQKTLFASNTKAYKVKRNFHFMGKRIKYSGFQNDSVVRLFKKEACSYNTNLVHETLDVNGTTETLKCRSDHFTYKSFDLYNQKLTQYSKLQAKMLYQKNLRPSLYHFLVRPWFRFFHQYVIKLGILDGKEGFILAYLSAFSVFKRYLYLWTMYRKIE

SEQ ID NO: 319 - protein, 304 aa, Parabacteroides sp.
MLDVSVIILTYNEEIHIRRCLDNIKDLARDIYIIDSFSTDRTLDIVKEYKEYNVMILQNKWENNYAKQFNWALEHAPIRTAWVLRLDADEYLLPALQDELIKKIPFLLDSVSGIVFKRRHYFLGKWMKRGIYPVYLLRMFRYGKAVCEQRLMDEHIQLLDGTSVNCEGDFVDHNLNNLSWFCNKHVNYAVREAADLLDIEFDLYGVSQSDDQKKLTAQAIEKRRIKHRYVRMPLFWRSFFYFCYRYFFKGGFLEGKEGFLWNFLQGWWYRTLVDAKVFEIKRACGTDKEKIKRYLSEVYNCRQV

SEQ ID NO: 320 - protein, 348 aa, Unknown
  Description of Unknown: Candidatus Altiarchaeales archaeon HGW-Altiarchaeales-1 sequence
MALALCMIVKNEEKMLPKAIESVKSIVDEIVVVDTGSTDNTKDIAKSYGAKVIPLEWNDNFGEARNVSIRNAKSDWILVIDADETIAKEDLSTIKELMKDKRYMAYAFIQRNYTNIENVSGFIHSDNDTYAESKNYPGWVESTVTRLFKNLPEIFYEDYVHEDVASAIMKKKGTGKICLADMPIHHFGRVVRSYEERLKWSDMYIRIGLKKLNDKIKANGSKRELAIACFEIGNSYGFKREMDKATDYYKKAEEYDSSFRPCISNLGMIYMDGGDYGKAEIYLKKATSIRDWDTPMVVRDYIALAKLYVFTKRITDAKHTLKACLKIDPRNAEVIKMMDILEFLRFSL

SEQ ID NO: 321 - protein, 259 aa, Psychromonas ossibalaenae
MSENKISAIIITKNEQNNLPACLDSLTWVDEIIIVDSGSIDQTENIAAKYGAKFYSHTNWQGFGKQKQLAQNYATSKWILAIDADEVVSPELQQSIQQQISAADADTVFKIQRKTWVFGRFLEHSGWVDKIIRVYPKEIARYNDALVHEKIITDENAKIAQLDGDLFHYSYGDMENYLVKSASYGKAWADGRQARGKKSSLTQGFTHALGCFLKMYLLKRGFLDGKQGLLIAVLSAHSTFIKYADLWIRNNDSRADRNN

SEQ ID NO: 322 - protein, 283 aa, Lysinimicrobium rhizosphaerae
MNKVPVTVLVQTKNEERAIAACLSGLADFDEVIVVDSFSDDATRQIALECGVKVIDFKWNGRYPKKKQWQLENVETRHDWVLFIDADESPNARLVTALRELMNSANLGEVAAGTLALDYHFAGRSLRFGHRVYKTVLLHRERARFEPVDDIGIPGMGELEGHYQPVCDGRVVSLAGRLAHDDPDPVRTWFDRHNRYSCWEAGLESRRRESGGRDVNRSLQGRVFGRLPFKPVVFFGYSYVLRFGFLDGRAGFDYAVALSMYYWQIGLKSRELEREKRGQFAEA

SEQ ID NO: 323 - protein, 257 aa, Unknown
  Description of Unknown: Candidatus Woesebacteria bacterium GW2011_GWB1_43_14 sequence
MAKLSAIVITKNEELMIEDCLKSLAWADEIVLVDDHSEDKTVKIAKKFGARVVLPLKNNSMDYSLPRNLGLAKANNDWVLYVDADERVTSDLSKEIQKVISDPGYNYYAVPRKNIVLGRELKHGGMYPDYVKRLFKKKHLKGWKGKLHEEPNIIGEIGHLGSALVHIKHETLSEMVEKTNKWSVIEARLMYDAKHPQMNIPRFVTAMAREFWKRMVRHVAFLDGTIGIIYAMYQVFSRFVSYSKLWEMQVKNESGNL

SEQ ID NO: 324 - protein, 292 aa, Unknown
  Description of Unknown: Acidobacteria bacterium sequence
MEAGEARTHERPRISAVVTTFNEEHNVGECIASLEWCDEIVVVDSFSTDRTPDIARSCEKVRFFQRPYRGSASQKNWAMDQTRFEWILIFDADERCTPALQAEITSLLAASPPALAYVIKRRAYFMDRVIRYSGWQHDRVVRLVKRGAGRYPNKRVHADMQTMGPAPVLKSPMLHYMVESFDQYLPRIVKYGFWGAAQGWKTDRGSGFKEVFGRPLWRFARMYILQFGFLDGMAGLVFCMLQAFGTYLKWAILWEWRANAARGRTPKLPEFDDDESVWAWEERRDGGATDKA

SEQ ID NO: 325 - protein, 663 aa, Marinobacter vulgaris
MNIRHRITHGLAVAGLGGALASSSILAGVALLLAVLGGYAIWKKEMPRRNWDTPKELRLLHFAFWFFVLVSLLSWAFEGFEYEGGKTLGTHARLILFWPIAIALIAARVRATTVFSAFVVGGLVVIGLFALHVIDLSGNLNVLWRLRFGAGINPIQFGNLAMLTSLLCLIGGFYFKAARRGKLAIFAVIVGLATLAIALMSQTRSNLIALPAALALLLFLIPRKLIIPGIIVLAMVGTLSVMNSERFTNSLDALVEGNLDKSLELRLQAWKVAGSAFVANPLLGAGLSGYHEIAEAQESKAFRDCCTDHAHNDTMQQAATKGLPGILSWIFLMFIPLVTALRLVRSGNLEIACLAGGGAMIPASYLIFGLTEATLDRSLFLTFYLLSVSATFAALFNALSASYTRQRAVKVSATVITKDEEDHIVDCLKSARLIADEIIVLDSGSSDRTVELARQYADVVEQTDWPGFGIQKQRALERATGDWVLSIDADERITPELAREINHTLADARADAYKLPWAVTIYGKRLDFGRSGRAPLRLFRKEGVRFSDALVHEKILLPRGRVVKTMRGRLTHYTHRNFGHALEKSAKYAWLGSQQKYRRGKRTRSLIYPTIRGIMTFVQVYFIRFGFLDGAVGYLVAVTYAQGSFNKYAGLWTLTRTERRMRG

SEQ ID NO: 326 - protein, 254 aa, Nonlabens sp.
MTKYNITAIIPAFNEEHNIVDVLKSVDFCDEVILVDSNSTDNTVELAKPYFTKLLTRNYEHSASQKNWAIPQAKHEWILLVDADERVTPALKEEILNLYPTLDTADYVGYWIGRRNFFMGKQVRYSGWKNDKVIRLFKKSKCKYKDKHVHSEIIADGPVGKLENRFLHYKYVSMDHHVKKLQRYADLQAKDFDKKVGKITAYHIVIKPMWGFFKHFFVQKGFLDGFVGFTIAYLRSYMIFMRYVKLWLLRRGIK

SEQ ID NO: 327 - protein, 253 aa, Tenacibaculum jejuense
MHKHKISAALITFNEEENIARTLEKLVWCDEIVVIDSYSSDATLEICESFGAKVFQKKFNGYGEQKRYLVSKCTYDWVLSIDADEVLTNDLIDEIKLEFNQDTVPHKAYFLNRKHVYLGKVFEYGYLKNTPVLRLFNKNHAEFSNKKVHETVEYNGSKGRFKNFFYHYTATSVEQINLKKNRYASLVSEEYFKKNKRVNLLFLVFKYPFTFFKEYVIRGNMFNGYEGYVWSTYIAEYSVLKYLKLMERKKMKK

SEQ ID NO: 328 - protein, 263 aa, Unknown
  Description of Unknown: Microgenomates bacterium UTCPR1 sequence
MKISGIVITKNEEKNIVRCLKSLSFCDEVIIVDDFSYDDTIRNAELFLQENSVSKFNVKIFKHRVSGNFAKQRNYALGKSGNDWNIFIDADEELSQDLINEIKDLDKGGNLNRIGSYRLKRRDFFWKKEIRYGEVLLSRVYGISRLVKKGSGEWVGNVHEVFRSYEGYHEKKLKGYINHYPHQTLREFISDINQYSSLRAKQLAAQGKKSGIFQIVLYPLVKFFISYFFLLGILDGAAGFVYSFLMSFHSFLVRAKLWQHYSI

SEQ ID NO: 329 - protein, 258 aa, Vibrio superstes
MATIGILLITKNAEKTLDKCLSSVQEWAHEIVILDSGSTDNTLNIARMYTQKVYSKTNWEGFGAQRQVAQSYLTTDWILALDSDEVVTSELKTSILQSVNSANLQTCFSLNRLTKAFGKFIQHSGWYPDRIVRLYPRNYTSYNNAKVHESVIIPENTTVKRLNGDLLHFTMDSLSQYTSKTNLYIKSWADQREGKKKSSLGKAISHAFFRFFKMYIIKLGFLDGKHGLLLAILSANTVFTRYADLWVRDMTKNEDTNL

SEQ ID NO: 330 - protein, 250 aa, Serratia marcescens
MAKIAVCILTFNSSRLLHEVLSPLMGIADEWIVVDSGSTDKTLSICQSFGISPIYHRFETHGRQMNFAISQAHHDWVLCLDSDEILDAETIASILTFKAQENPPPQQAFRIKRNWFVLGQPVRTIYPISSPDYPVRLFNRTQVRFNDAPVDDAAEGYIQTSVIPGNVKHDTFYSLHEIFNKLNSYTTRVVKYRNIRPSIFRGVVSAIGAFFKWYVLSGAWKEGKVGAVTGFYAVAYSFLKYFKSWYGKDR

SEQ ID NO: 331 - protein, 260 aa, Unknown
  Description of Unknown: Nitrospirae bacterium sequence
MSKLSVYVIAYNDEPNMKACLESVAGWGDELIVVDSHSTDRTAVISREYTDKVYQVNFTGFGDLRNQAVALTAHEWVFSLDSDERMTPELREEIHGLLALGADADAYFVPRKNYFLGRWIKHCGWYPDYRQPQLFRKSRFRYREELVHESFDCDGPVGFLKNPALQYPFRDIDHYVAKQGRYSDLMARRMVEQGRKFSFHQMITHPFGALFKMYVLRGGFLDGMPGLILSGLYAYYTFMKYAKFWESSLAAKVSGGAVRS

SEQ ID NO: 332 - protein, 271 aa, Leeuwenhoekiella nanhaiensis
MSNIPVSVLVPIKNEERNLQLSLPLLSDFDELILLDSQSTDASLKLAEQYGARVAQFYWNGQFPKKRNWALRNIELRNEWVLFLDADEYVTPEFLNELREAINRPGYVGYWIPFRNYFMGQQLKHGDVFKKLPLFKKSAGEYERIAEDSWSHLDMEVHEHPILEGQVGTFKTHIDHNDYKGLEHYIAKHNSYSSWEARRFIKLQETGFAALNSRQRLKYQLISWGIMPMAYFIGNYFLKLGFLDGSKGYYFSKYKAQYFFQIQTKIKELQS

SEQ ID NO: 333 - protein, 250 aa, Unknown
  Description of Unknown: Crocinitomicaceae bacterium TMED135 sequence
MKISAIIPTFNEEEHISEAIKSVSWADEIIVVDSFSEDKTIEIAKKFGVKIIQREYKYSASQKNWAIPQSEHNWIFLLDADERVSNSLKEEILNWKKTKPKKQSYWIYRTNHFMGKKIKFSGWQGDKVIRLFHRDCRYEDKKVHAEIQNSSKAGKLKSPILHFTFKSMSHYLLKWDQYSSWSAKDHLKKVKNPNFFHFFVKPSFRFLRDFIFRGGFLDGKTGYIVCKLSSMGVFMRYIKLKELRDKSSTN

SEQ ID NO: 334 - protein, 261 aa, Shewanella fodinae
MRQHKISCFLIVCNEADRIAQCLAPLQGWVDELIILDSGSTDGTVEIAKKYTSKVHCTDWPGYGPQRNRALAMCQYDWVLTIDADEVVTDALKAEIDAVLSVAKPDANMIKIPWKTYFFGKFLNHGRYTAPQGKLFYKVGAKFKERQVHETLLQPNQRIKVLKSALLHYSWRNYQHVQEKHLKYACLMAQEKANKGKTSTIGFAVLRFFTDFFQQYVLSLGFLDGWRGLLMAIILGEYAFHKYAALAELSLSKDATTVERR

SEQ ID NO: 335 - protein, 259 aa, Sulfurirhabdus autotrophica
MMQNTNKNTRQPLSVTIVALNAAHQITACLESVAFADEIVVVDSGSTDATLEIARKHGARVIHQDWLGFGPQKQFAVTQASYDWVLCLDCDERISEGLRQSIEAALVNPEYQAYQMPRCNRFMGRWLRHGEGYPDWSLRLFNRHVAGWSEDAVHEKVITATTVCRLKGDLLHESAESLDTYLEKQNRYTTLQAQKMADLGKLASLVQLIFSPVLRFIKFYFVRLGFLDGLPGLVHISIGCFNSFIKYAKLKALSRKDEG

SEQ ID NO: 336 - protein, 245 aa, Unknown
  Description of Unknown: unclassified Mesoflavibacter sequence
MKQLSVIIPTFNEEAYIEKAIRSVSFADEIIVVDSYSSDKTVQIAKQFNCTVVQRKFDNFSNQKNYALQFVSGEWILFVDADERITYALKQEILDTISNPKHAGYKLKFPHFYMNRFLYHHYDSVLRLVKRANCKFEGLVHEKLIIDGSIGQLKNPVLHFTYKGLEHYISKKDSYAWFQAEQMLKKGKKVTYFHLAFKPFYRFFSSYILRRGFMDGIPGLAVASINAYGVFSRYAKLMLLKKGIK

SEQ ID NO: 337 - protein, 250 aa, Unknown
  Description of Unknown: Chromobacterium piscinae sequence
MRYAISVVLITKNAGQQLEQCLQSVGFADEIVLVDSGSTDNTLAIAAAYRAKVIHQEWLGFGPQKQFAVEQASHDWVLCLDADEYLSPELALSINQILDNPQAAAYRFARCNRFMGRFLKHGEGYPDWSLRLFDRRRARWSDDVVHEYVICEGPVEKLDGDLMHESGEDIARYLSKQNRYTTLQAEQLFARGKKAGAAKLVLSPLLRFFKFYLVRRGFLDGLAGLVHICIGCFNSYIKYAKLIELHRLNK

SEQ ID NO: 338 - protein, 252 aa, Unknown
  Description of Unknown: Chryseobacterium soli sequence
MKLSVAIITFNEERILEKTLSSIEDLADEIIIVDSYSTDRTETICKRFSKLKFIQQKFPGFGRQKNYAISLCTSEWILFLDADEIPDETAKDSIRKIISDEHQKCFVYDIRFNNIFLGKALKYGGWGNTRRERFFKKGYGKYSEDIVHEEFITTEKKCRLDGRINHYTYKDIHHHIEKSNKYTSMMAEKMYRNGKKATVAKILFKPLYQFIKSYFLRLGFLDGLVGYYAAFTAAFYTFLKYKKLHEITNLNK

SEQ ID NO: 339 - protein, 633 aa, Unknown
  Description of Unknown: endosymbiont of Riftia pachyptila (vent Ph05) sequence
MRQMSARPQWQQQSDELARGMAVAAAFAIPLPTAWVGITMGLFLLFWIASGDFANKWQRVRQNPVALMALGLFALLGLGVSYSSVGLSEALEGWGAYHKLIYIALLVSVLNEPKWQQRALMAFVLAMLLVLLLSYAQLLGFWPEGKPEQEFAPFKGRIAHNFFMAFAAYLVFDLFMRQPARRLLWAGILLLMLYNILVMVPGRTGQLVLFVMVVLATWHHWRWRGLLVGALLTLALGAAAMQFSDGFRPRMQALLDNASSYFEGGAAESSTGLRLSYYENSIELILKHPLIGTGTGSFIHEYQQHANAKGVPLTDNPHNEYLNLGVQLGLLGMGALLLFFLLQWRFAGLMRPEQRRLAQALVLAMALGCLFNSFLMDHGEGKFYVILAGILFARTREATAQALREGTPASLSVIVITRNEAARIRACLESVSWADEILVLDSGSSDETLAICREYTDKVFVNRDWQGFGVQKNRVLDKARGDWVLSIDADEQVPEALQAEIHQLLVLADEAPAVYKIPRLSSYCGRQMRHGGWWPDHVARLFRRGKARFSDDLVHERLLFVPPAGRLENPLTHQSFDNLEQVLEKVNRYSSASAERMLQQGKRGGVGKALLRGLWSFLRGYILRAGFLDGARG

SEQ ID NO: 340 - protein, 267 aa, Aureicoccus marinus
MKDSYQTTPSISALVITYNEIGYIEKCLESIAFADEIIVIDSYSTDGTYEYLLQQENVRVIQHPFKNFTAQKSYALEQARNDWILFVDADEVVTEQLRDEIQETLAGPQTHDAYWFYRQFMFENNRLRFSGWQTDKNHRLFKKSKVKFTDRKLVHETLEVNGTSGKMRSKLMHYCYKDFEDYKGKMLHYGRLKAREAFYKEKHFNYLSLYVKPFWKFFNNYILRLGIMDGKKGITICYLNALSVYERFRELKRLEKKNELAYYLVMP

SEQ ID NO: 341 - protein, 280 aa, Runella sp.
MSQFSVIILTFNEEDNIESCLNKILKVSNDVFVVDSFSTDNTIKILEKYPIKSVQNKFVNYSQQRNWAQENCPFNHEWVLHIDAGEFLTPELIHWLQHVFPTQMEKFDGFIFSRRVYFLNKWIKRGGMYPNSHLRLFKKEKGFCENKSYDQHFVVEGKINKVPLGADVIDNNGSNVNDFILKHLRWANKEAEDIISNQNTQGNVKESILGNDIERKRFLKNNLYYKFPVLWRAFFLFLYRYVFMLGFLDGKVGFIYHFLQCFWFRVTIDSIFIQFNENNK

SEQ ID NO: 342 - protein, 266 aa, Prevotella copri
MDKTSVEQEQGNGISVVINTYNASCHLQQVLDTVKGFDEVVVCDMESTDDTLDIAKRNGCKIVVFPRGSYQICEPARQTAIDAASCKWVLVVDADELVTPALKQYLYSLIGKEDAPLGLYVPRKSRFMGRFMHCFYPDYQLRFFIRKDTVWPAVIHADPIIKGRIEKIPATHADMALVHLADDSIASRMGKINQYTANEIEKKKDRNYGMAALFYRPLVRFFRAYIQKGGFRDGKEGFVCACYEGIYQFVAVSKIIEDRLKHKKGK

SEQ ID NO: 343 - protein, 249 aa, Polaribacter sp.
MTKITAIIPTLNEEIHIADAIKSVSFADEIIVIDSFSTDKTLEIAEKLNVKIIKRKFDDFSSQKNFAINQAENDWIYLLDADERVTPKVEKEIIEALKDPKDFVGFYVRRTFYFCGKRVDYSGFQRDKVIRLFLKEYCKYSGLVHEKIVTKGKLGFFKNKIDHFSYRNYDHYISKMNHYAAIKASELHEKGKKVNIYHVMVKPTARFFIHYIIRLGFLDGFTGFLVAKTQAYGVLTRYIKLWLLNRGIR

SEQ ID NO: 344 - protein, 255 aa, Unknown
  Description of Unknown: Chryseobacterium sp. CF314 sequence
MPELTEKVSGLIITYNEEQNIREVLGCFDFCDEIIVIDSFSTDHTVEIANTYPNVKVIQHKFEDFTKQRNLALDAANNDWVLFLDGDERITPLLRKEIIDELNKPVSQQKDAYYFYRKFFFANKPINYSGTQSDKNFRLFRKSKARYISGKKVHETLEVNGSIGILKNKLFHYSVSSYESYKQKMIHYGVLKGQELALKGKKFSRITQYSKTAFKFFKAYILRLGIADGKEGYQLSYLQSLSVYETYESLKKEQI

SEQ ID NO: 345 - protein, 235 aa, Campylobacter pinnipediorum
MKISIVMLTFNSEKYLKKALKSIEFADEVVIIDNGSTDNTKQICSEFKNTKFIFQKWLGFGKQKSFGVNQSKNDWIFVLDSDEIFTKELEAEIKDILQNPKFFAYKVARLNYFFGKPIKQMGLYPDNSVRFFNKNHANFNDKEVHESVVLFDDANKFGVLKNHFLHYAYESIEQFINKQNRYSTLGAKKNRLKAIINPTWTFFKLFVLKGGFMAGWRGYVVAKLYSQYTFWKYIK

SEQ ID NO: 346 - protein, 261 aa, Unknown
  Description of Unknown: Chryseobacterium taichungense sequence
MALSLAVITYNEEDNIVRLLDSISEIVDEIIIVDSLSTDKTKEICTEKYAKVKFFEKKFNGYGEQKNYAMELCSGEWILFLDADEVPDEDLKKEIQRITSEQNPKFSVYKAKYNNHLGIHLIKFGGWGNICRERLFRKDSARYSDDKVHEFLITNEKAGLLDGKIDHYTYKSIHHHISKINKYSDMMAEKMFERGKRYQNFKIIVSPAFEFIKVFIFKLGFLDGFAGFYVAKTMSYYTFLKYIKLREKIRIREFRKKCGDL

SEQ ID NO: 347 - protein, 282 aa, Rubrobacter xylanophilus
MSQKISVLVNTLNEEANIRNCLECVKWADEIVVVDMYSEDRTLDIAREYTDKVFLHERVDYVEPARRYALEQATNEWVLVVDADELVTRELRDRILQIAEEDRYDVVYVPRINYFFGRAMRGTGWAPLQDMHVRFFKKWCVRYSDEIHSPVGVDPSARVYELLDESCAFVHFNYIDAEHFIDKLNRYTTIEAKNSAAAGRSFSGLGVLYAVLKEVGWRFFLKNGFKDGFQGLALSLLMGFYRLSAGLKLYLMERYSTENVRDTVLKQYARIAEREIRRYEQS

SEQ ID NO: 348 - protein, 253 aa, Siansivirga zeaxanthinifaciens
MNNPSKISVLLITYNEINHIAEVIKNVDFADEIIVVDSFSTDGTLEKLAKFKHVKTICRAFTNFTEQRNFAIKQANFNWILFIDADERIPLELKNEIFEVINSNKNVAAYMFKRLYFFKKKRIRFSGFQTDTTYRLFKNGKVKYIENKLVHEMPEINGESAILKNTMLHYCFDSTAHYKSKMEHYAKLKALELHKKGKKTSVFQLLFRPFYKFVVNYFFRLGILDGKEGFQICYLSAYGVYFRYKELERLNNI

SEQ ID NO: 349 - protein, 252 aa, Alistipes sp.
MKISVVINTFNSDRFLDQCLRSVEKFDEIVLCDMHSTDGTIAIAEKYGCRIVYHERTGIVEPARNYAIAQAENEWVLVLDSDEVVPDALREYLYRFAETAEQRGYAALKMARKNYFLGRFMHGDYPDYIIRLIRKSKTYWPETIHARPVIDGGIFAIPSRRRELAVEHLANESVSSRIAKIDLYSDKELLRRADQRFSVWKAFSKCSWRFLRFYVVKGGFRDGKAGFTYAVLNACYKFATIAKIWERQSSED

SEQ ID NO: 350 - protein, 254 aa, Unknown
  Description of Unknown: Fastidiosibacteraceae bacterium SYSU SYW-6 sequence
MTEKKNTLGVVIITKNEEKNIARCLASVKWADEIIVVDSGSTDKTLEIAKTYRAKIIERHWPGDGPQKHFGISQLTTDWGLVLDADEEVTPELSNSMKTTLKNPQCSFYKMHRRSFFLSKIIYHGDWGKDWIVRLFDCSKHQWTQDIVHAKLNVSKKQAGMLKGKLIHHSQDSIASSLKKMNDYSDGTSTILWQKGKRTSLLKANFHKHWTFLRGFIMRLGFLDGKRGYLIAKLSAYGSYFKYIKLWEKQQNEQ

SEQ ID NO: 351 - protein, 259 aa, Unknown
  Description of Unknown: Candidatus Roizmanbacteria bacterium GW2011_GWC1_37_12 sequence
MKLSAVVLIRNEEKNIERCLESLTFCNEVIIVDDFSTDGTLEKIRNSKFEIRNKSKIKIFKRKLNGDFAGQRNFGMSKASNEWVLFVDADEEVSGELRKEIVKLLNGQIVNEVGFYIRRLDWFWGKELRYGELKKARDIGIIRMVKKNSGQWLGNVHEMFYTAKNIERLKGFLNHYPHQTLKEFINDINYYSSLRAEELYRQGKKTNVLEIIFVPSLKFISNYLLNLGFLDGVPGFTYSFLMSFHSFLVRAKLWQYYFI

SEQ ID NO: 352 - protein, 256 aa, Campylobacter sp.
MDTQKISVCILVKNAQDTILECLNSLSEFGEIILLDNESSDDTLKIAENFNQTYQKLHIYSNKFIGFGKLKNLALSYAKNEWILSIDSDEVLEKEALEELKALELTSNSIIALPRKNLYRGEWIKACGWYPDFVWRVFNKNFTRFNDNFVHESVLMPVNSQKIKFKNGFKHYAFKDMQGIIHKMNTYTSYSAQEKFKNGKKTSFFAAFCRFHLVFFKDYFLRSGFKYGYKGFIVALLNALGAFFRYAKLYELQKDK

SEQ ID NO: 353 - protein, 307 aa, Unknown
  Description of Unknown: Candidatus Pacebacteria bacterium GW2011_GWF1_36_5 sequence
MSISVVVIAKNAENIITRSLKSVQFADEVILVDIKSTDETRQIAEKYCTKIYDYKEDSRFVEPVRNFAFSKATKDWILVLDADEEIKEALALKLQEIDQKDLGDVYHLSRKNIVSNYWMQNTGWWPDYQLRFFKNGLVSWGTKIHAKPEIKAGSRVVILEAKEDLAILHHNYKDTKDYLARFDRYTDIEAEQKAEELKDNFSISQSGMLKAFSDDWFRRFFDKQGYKDGVRGFYLSLMQAAYQMTTQMKTFDLLGNKNSLEKDSRQLLIKDLRHFQKELNYWINDMEIKEKNGLTKLVIVLKRKLGL

SEQ ID NO: 354 - protein, 252 aa, Unknown
  Description of Unknown: Chryseobacterium soli sequence
MEDIKLSALMIVFNEEKNIEGALKSLEFADEIIVLDSFSTDKTIEIIRKKFPQVKIFQNKFEDFTKQRNLCLTYANHDWILFLDADERIPRALRDEIKKEIKNPDAKDAYFFKRKFFFMKKPVNFSGTRNDKNIRLFKKEVGHYDDTKRVHEGLSNIQSSGTLHNYLLHFSFDTYEAYYRKILHYANLKAKDLHEKHVQYGFFKQIGKSAFNFFKMYILKLGILDGKKGFILSYFSALTSFKTFEYLKEQYS

SEQ ID NO: 355 - protein, 260 aa, Unknown
  Description of Unknown: Candidatus Kryptobacter tengchongensis sequence
MKGGREKLSVVVITGNEEKNIAECLESVAWADEIIVVDSESKDKTVEIAKKYTDKIFIKKWEGYANQKQFAIEQATGDWVLSLDADERVSTELKSEIENILKGETEYDGFYVPRKNFFLDKWIKSCGWYPNYQLRLFRNGKGRITPRKVHEKFVVDGKVGYLKGHLIHLTHIDLFDTFEKINHYSSLSAEEKSGRKVRWYHILFVPVFAFLSHFILKRGFSDGIYGLMVSLNHAMTKLQTYMKIWEIQNVKSKGKEKIRW

SEQ ID NO: 356 - protein, 251 aa, Unknown
  Description of Unknown: Flavobacterium ummariense sequence
MSTKISALIITLNEAKNIKQLIHNLDFADEIVVVDSFSTDDTLAILKEFSNIKVYQHTFQDFSSQRNIALKYAAHNWILFIDADERISENLRNEILKTVSLNETKQGYYFKRKFYFLDRPMGFSGLRTDKNLRLFKKEGAQYRGLVHEKLNIANTGTLQNYLTHYSYSSYGHFKDKVVYYNKLKALEKIKKGVKPSVFMSIFHPVYTFLNRYFFRLGILDGKKGYIISKIYAQAINERYKEMFRLMKEQAK

SEQ ID NO: 357 - protein, 654 aa, Methylomusa anaerophila
MAKISACVIVKNEADNISRCLQSVKDIAAEMIVVDTGSTDDTVKIARQMGAKVFQYQWNNDFAAARNYALTQAKGDWIIFLDADEYILPGKIQNVRPFIDKIHGNRMIESVVCRMENTEGVDGPLKSTNPTVRIFRNSRVIRYQGKVHEQIYKHGKPTRSIGDAKQFIVICHTGYTKEAIPEKIKRNTIMLEEDLNNGNVRNLTYYYLSDAYWRLGQYEKAIEFAQKAIDHGGVFHTLYAYKPYVTLIASMVRLNTYSNEAMEAIRDQAIQKFPHHPEVLLHQALYYRKTGRYRQALESFFQSIAANERYGDINLNNDFYGLVSVVYLNIAKLYDMMNENVPAFDYYVKTLQQDRYNQEAFNGLMLLIRTQNAADVVCLMNRLYNMDDEADVDFLVVELSRLKMKKVLDYYCKIRFERFGRREPAGILLLTNGRFEQAFQGFAAFFRETGDQGAELLAVVSLLLGGSPSWVDLLGPQLRPAFQRIITAFFAPEEGCVLAAEDFSSYLELTNDFIHLIHLGNENQLIAFLHVGKRFLLAEAPVQIGDILARKKLFHHALDMYLYKIDAVFSEAGPSESIYCKAGFCCYKLKDFAAAANFFSHALECGYVMYDIFEYLEWSYQQCNDGVIKGKFKALKDFYGNETEAMAEIKQHAG

SEQ ID NO: 358 - protein, 260 aa, Rhodococcus sp.
MALSAVLITLNADKQIAEALESLQFCADLVVVDSNSTDDTIEIAQKCGARVVQQDWLGFGPQKQFAVTQATHDWVLCLDADERVTPELERSIRAVIQQAEQGLLPVDVAGFDMPRCNFFLGRYLRHGEGYPDYSRRLFNRKMANWSNDAVHEKVECTIPDTRFEKLEGDLLHESAESLESYLTKQNRYTSIQAQHLAAHGRWPGLGKLMLSPVVRFIKFYLVRKGFLDGWPGLVHIAIGCFNSFMKYAKTRELMQQKRER

SEQ ID NO: 359 - protein, 254 aa, Rhodoferax sp.
MGLSVVIITKNEALNLAPCLESVAFADELVVVDSGSTDGTLQIAQSFGAKILQTPDWPGFGRQKNRAVDMATQDWILSIDADERIGPVLRDEIMATMASPTHKVYALNRRSSYCGQTMNHSGWYPDPVVRLFQRGAARFSDDLVHESLRTSLPIGALQGPMAHLSFRNLESVLDKVNRYSTAGAQALANKGKSASLGKALLHGFWAFFRTYVVRRGFLDGRMGLVLAISNAEGTYYRYLKLWLLQRPVDEKEPA

SEQ ID NO: 360 - protein, 253 aa, Dialister invisus
MAKISALILAKNEERNIKACIETLSFADEILVIDDFSTDKTKEIAESLGARVIQHGMNGDWGKQQTFAIKNARYEWVLFVDADERISKPLAKEVCSVAEKGDKKAYWIRRENKFYHHHATHGVLRPDYVNRLFPAEGSYVEGYVHPRIVTPYPNEKLHEIMYHYTYDSWSHQLNKLNNYTTLAAAKYKKNHKKCNFFFDIMLRPFWAFFKVYVLNLGFLDGKMGWILSTNHYFYTMNKYIKLYFLYQDKDGRL

SEQ ID NO: 361 - protein, 444 aa, Desulfotomaculum guttoideum
MKIVTRLSQCMIVKNEEKNIRRALSWGKGIVFEQIVVDTGSSDNTVEIAKEMGAKVFHFDWNDDFSAAKNFALEQAKGNWIAFLDADEYFSDEETKKLLPLLRRLDKTLSPTLRAVALNCTMANLDDSGGVINLFSQCRIFRNIPELRFKNRVHERLSLSADIKLTSLDASEELTIYHTGYAESVYEETGKIDRNITLLKRELEENISNGDTWSYLADSFYAANRLDEAEEACLKAIEREESSFDKNRKREDITKLIKIKYRKNSGQEEDIVSIYQVAKDYAGSTPDLEYWTGLWFYQRGERQKARHYLEQALNLLDQQKGDGKVAMVGNLAEIYQILFGICKAYGTPSDVIRYGVLALRMNPYLFPVLLDMLLLLKQEPGEEETAGATFGFLSKLYDLSSFKNKTFLIKVAEKVPFPALEKQIYPLMSKEEQEVFAGVGEIFG

SEQ ID NO: 362 - protein, 269 aa, Unknown
  Description of Unknown: Candidatus Protochlamydia sp. R18 sequence
MTSSFPISVTILTKNSQKYLREVLQALKGFDEVVICDTGSQDETVSLAKQFTNVAIYHEPFKGFGPTHNTASNLAKNDWILSIDSDEVVTRELAIEISQLQLKSKHVYSFPRRNEYRGKWIKGCGWSPDRQIRLYNKQETHFTNVQVHEAIIATELTHVHLQSPLKHYSYDQISDFLSKMQSYSTLFAEQYKGRKSSSFVKALSHGLFSFFKSYIIKRGFLDGQEGFEISFYNGSTAFYKYLKLAEINRYLKKEGSEKCDGDLKKKLSA

SEQ ID NO: 363 - protein, 270 aa, Desulfotalea psychrophila
MKTISAFVTTFNNEKTLANCLKSVQWADEIVVLDSYSTDSTVSIAESYGAKIFQHEFLGYGPQKQSALEKISCEWALLLDADEEVTPALAKEIQGMLTTESGHDGYKLPRQEQLFWVMSSPYSGFNYQLRLFRRLAGALSDDAVHADPEVHGTVGQMRHPFYHYGEVNIHAKEARINAYSSGMVEEKVAKGKKHPLLMCLFYPAWTFLQSYVFKRGFLNGSAGFIGSVIMAHYAFLKYAKLHEYYQVEKYGTSLLPADAPDNLAPPKVPK

SEQ ID NO: 364 - protein, 318 aa, Nostoc punctiforme
MSSKIPVSVLIPAKNEQANLPACLASVSRADEIFVVDSQSTDNSIEIAKSHGVNVVQFNFNGRWPKKKNWSLDNLPFRNEWVLIVDCDERITPELWEEIDQAIQNEEYTGYYLNRRVFFLGKWIRYGGKYPDWNLRLFQHKKGRYENLHTEDIPNTGDNEVHEHVILQGKVGYLKNDMLHEDFRDLYHWLERHNRYSNWEASVYFNTLTGKDDSGTIGANLFGDAVQRKRFLKKVWVHLPFKPFLRFVLFYIIQRGFLDGKAGYIYARLLSQYEYQIGVKLYELRSCGGHLNTATTPKEEAGEQGNRGTDVKLLTIDS

SEQ ID NO: 365 - protein, 253 aa, Unknown
  Description of Unknown: Bradyrhizobiaceae bacterium PARB1 sequence
MTATPRLSLIVITKNEEAAIARCLGSVSLADEIIVIDSGSTDATVEIAKSFGAEVIVTTDWPGFGPQKARALERARGGWVLSLDADEWLDAEAIEPLKAAIAAGDAPAAYRMSRRSRFCGSVIRHSGWSPDYVTRLFRRGQARFSDDLVHERLIVDGDVRTASFRIEHDSITSRADAEDKIVRYSTAAAQQMFTRGRRAGALQAPLHGWAAFLKTFILRAGFLDGAAGWDVADYNRRYAYEKWRRLAELSRNA

SEQ ID NO: 366 - protein, 410 aa, Conexibacter sp.
MSRRRLSACLITQDEEERLPAALASLAFCDEIVVVDSGSTDRTVELARAAGATVVHNPWPGFARQRNVALRHATGDWVVEIDADERVTPELAAELRAFLDHPTLPDRFPLLSLPRRNRFLGGWLRDSMKYPSYCRRMFALGVYEHDETRTVHEEVVPTTPAWAARGDITHELAGTWREALRDTWAYAKLDAAQFRPQLSVTALVRGVVLRPLVKAAYRLTLDGGWRDGWRGAARIALDTGTDAAVWLLAARAARRTGPDGAADATAGHYSERFPAVSAVRVVGVATSAGGAQRVTAWLAQAAAAGADATLLVPPSVAPVDLDAAAPPWVRDAVRVQALAGRGPVAIGRALDREEQVRPVELVVAADDARRATRLALRLVARGPAAGDLDAPAAPQVMSARPAADIQTTWR

SEQ ID NO: 367 - protein, 358 aa, Kineothrix alysoides
MLPISVCLISKNEEKYIGECLSRLIKYDWEIIVVDTGSTDRTIEIALSYTPNIFHFDWIDDFSAARNYSIAQAHNDYVLIVDCDEYLENSSLTEETVRNLPNLISPKQVGMICLRNISSHTTGNLAESSSDIIHEHIARFFHRGYTYYQGSIHEQLVSREGNVLSFTSLPLCFYHVGYSTDEIRAAKADRNITMLKQSLSNQGGNPYLYFQLGQSYFGISDYENALPYFEKALSMDVDEREEYVQTLVESYGYCLLYLKKYKAALQLDGLYPIFSKRSDFAFLMGLIYMNNAMFEQAIAAFDHAVSIQRYAIEGVNSYKAFYNIGVIHECMGHISEAMKYYQKCGSYPPALHRLDILK

SEQ ID NO: 368 - protein, 252 aa, Unknown
  Description of Unknown: Chryseobacterium sp. Leaf394 sequence
MKLSVAIITFNEDRIIEKTLSSVYDIADEIVVIDSFSTDRTVEICQKFSKVKLIQQKFPGFGKQKNFAISQCSGEWILFLDADEIPDETAKKSIQKIANQNHSDFSVFNIAFNNIFLGKSLKYGGWGNLKRERLFRKNAGKYSEDIVHEMFLTEEKIGLLEGKLNHYTYKDIHHHIEKSNKYTTMMAEKMYSRGKKSSVLKIIFSPIYQFIKSYFIRLGFLDGLVGYYAAKTAGFYTFLKYQKLYELHKVKK

SEQ ID NO: 369 - protein, 253 aa, Unknown
  Description of Unknown: Chryseobacterium hominis sequence
MTHLKEKISGLIITYNEEKNIREVLECFDFCHEIIVVDSYSTDKTTDIARSFSNVTVVQNKFEDYTKQRNLALNLANNDWVFFLDGDERISEKGKQEIIETVNNPNACDAYYIYRIFFLGQQKIRFSGTQNDKNFRLFRKSKAHYDDLKKVHETLLVNGKIGFLKHKLLHYSFENYHRFKDKMIYYGQLKGLELSQKGKKYSSFMKWSKTTFKFIKTYILKLGVLDGINGLKISYLQSLYVYETYESLRKATS

SEQ ID NO: 370 - protein, 252 aa, Unknown
  Description of Unknown: Candidatus Abyssubacteria bacterium SURF_5 sequence
MTKLPISAYVITLNEEKNIRRCLESLRDFEEIVVVDSFSKDATVDICREYTDKVYQHEWPGHTNQYVYAVSLTSHEWVFWIDADEVVSPELAEDIRRVFANSAPQDYDGYYVSRMTFYLGRWIRHGAWYPDYKLRLFRKSSGKYVNDDPHMSVIVEGRTARLNGKLLHYSMASFSDHLRRLDSYTDIYAHNQIKSEASFPLFSMLTRPPLRFLKSYVLKAGFLDGMPGLIVAAMSGFTVFARYVKFWERKHS

SEQ ID NO: 371 - protein, 255 aa, Unknown
  Description of Unknown: Candidatus Gottesmanbacteria bacterium GW2011_GWA2_47_9 sequence
MISSVVLTHNDEATIAKTLGSLTWCEEILIIDDGSTDNTLSITRKFTSKIFKHPLDNDFAAQRNFGLSKAKNEWVLFIDSDEIVSPALAKEIREIAAPRQLAGTRNDNTVGYFIKRRDIMWGRELRHGEQGRMKLLRLAKRDTGKWIRPVHEVWDIKGATLELQHPVLHFPHSSVAQYLGEINRYSTLNARYLYAQKIHVTWWQIVAYPLAKFFLNYFLRLGFLDGTAGAQVAIMMSMHSFLTRAKLWQLWDKRV

SEQ ID NO: 372 - protein, 252 aa, Unknown
  Description of Unknown: Candidatus Shapirobacteria bacterium CG10_big_fil_rev_8_21_14 _0_10_40_9 sequence
MISVVVLTKNEEKNIEACLKTLKWCDEIVVIDDNSSDKTVEIAKKLGAKVFIRDLNNDFSAQRNFALRQAQGDWILFIDADEQVSPQLRAEIKSATSNKQQAISGYYLRREDRIWGRVLKHGETTNVRLLRLAKKTAGTWKRRVDEYWGIAGQTDILKNPLIHYPHQTISEFLESINFFSSLNAQAFYDEGKRTTLLDWFKPPVKFIQNWIFRLGFLDGMPGFTVALMMSFHSFLVRAKLYLLWKREGGWRR

SEQ ID NO: 373 - protein, 258 aa, Hydrogenivirga sp.
MGKLPLSVAIITYNEEDRIGRTLEAVKDIASEIVVVDSHSTDRTREIAESYGAKVYVEDWKSYAGQKNYALEKCTQEWVLFLDADEVVSEELKRSIVKAVNSGRADAFYLNRKTYYLGKFLEHIWQPDWVLRLAKRSSDPKWVGGSVHERLEVKGRAEKLEGYLYHYTYRDLSDHFQKSLRYARLSAGDMFRGGKRFKLHKLVLNPVWAFLKQYFIKGGFRDGIRGLSVSMSYFFSTFLKYMFLWELEQEERRKGGRG

SEQ ID NO: 374 - protein, 594 aa, Desulfosporosinus acidiphilus
MKPKISLTMIVRDEAAFLAECLEHVRHEVDEIIIVDTGSTDQTLTIAQRFTDQIYTFSWTGDFSAARNFALQQAAGDWILSLDADEIIQGEPGSLRMLIRDAGDKEAFLLPLHNPISNSTGEFNTFYVIRIFKNNDLYRYVGKIHEQVSIPDPEKVGLAQSPLIEHKPLPLRVQHKKRNRNLRLLLQASKENPLNPFLQYYLGVEWLMLGKGSYALPLLQKAYRSLGDENLLFRAPALKYLILCLRELGKPDEAFCLCLEASLSYPIYTDIFYFGGILLEEMGEYLAALKWFNHALLCGSPPALFSHLTGSESFLAHYHLGFCYEKLDKKAEAFNAYVTALDTNPKYPYPLYPLILILLSEKGPANCYQILAQKGYLANPILCLTAANLFYLSGHVEEAFLCLDSNRECFLEDKRFLLDLGKYCIYSGRLNMGLNLLRQIPKNSSYFSSAQTLSIIALIFLGNYPEAKLSAIHLWRNPLNRGEAFILLSIIRNIVQDNKGTIQPDLPNIRERETIPMATELYQDYLRYLNHPSSRKSPNHFVQRWGEALETLLKSSENGLSFLLRGYDQRLENLKQNFIKIFGSEWRVNEYVNC

SEQ ID NO: 375 - protein, 259 aa, Thioploca ingrica
MSRLSVIIITHNEEHQIGECLASVSWCDEIIVVDSGSTDNTVTQCRQFTHNIFIQDDWQGFGVQKNRALAKATGEWVLSIDADERISTALQQEIKQAITHPTTSAFRIPRQSYYCGRWIKHSGWSSDYVIRLFRRQCAHFTNDLIHEKVQVLSGKVNTLTTPLLHYSFTSVEEVLEKINRYSSLNAQLHYEQGKRATLTQAIGHGLWAFVRTYLLQAGFLDGAEGFMLAVSNAEGTYYRYLKLMYLQKYVKNQRYSDNL

SEQ ID NO: 376 - protein, 279 aa, Unknown
  Description of Unknown: Acidobacteria bacterium sequence
MSVSVLIPTLNEERNISECLASVAWSDDVVVVDSNSVDRTGGIARAAGARVVEFKWDGNLPKKKNWALANVDWRHPWVLVLDADERVTPELAEELLARVANTDCRGFLLNRRLIFLGRWIKHCGYYPSWNVRLFLHRRGRFESLVDGDTGSGDNEVHEHVIVDGLVGRLRGELVHHAYPDIATWVEKHNRYSNWEAAVEVWGVQSGRLPSGTAAAARRHARILTRKLPCRPTLRFLYSYVLHGGFLDGYPGYVLSRLMATYELLSLLKAREARQRRTTP

SEQ ID NO: 377 - protein, 269 aa, Unknown
  Description of Unknown: candidate division Zixibacteria bacterium SM23_73_3 sequence
MSKISCIIITYNESRNIRRCLKSISWTDEIVVVDAHSTDDTKKIVSEFTDKIYDLKWEGFGPAKEFARSQASGEWILSVDADEVVSKELREEIQRMIESCNSLDGYYIPRRSNFLGRWIRYGGWYPDFVMRLFRKDRGNFSHRLVHEEVRVDGKSGCLKNDLLHYTDPNFDHYLEKLNRYTSLDALQLYTRGRKAKLLDILFRPPITFVKMYIFKKGFLDGTPGLILSISSAFHVFSKYVKLWHLKQSGNKSGSKKNSGVPKDPMFPDG

SEQ ID NO: 378 - protein, 259 aa, Geobacter sp.
MSTKTKISAVVRTFNEELNIRDCLESLKWADEVLVVDALSTDRTVEIAREYADQVILQEWLGHVGQSQFVTDRASHLWVFSLDADERVSPELRDEILALDLENSPHDAYDMPRRHFFLQRWINHSGWYPDRNIRLFRKDRCRWGGYEPHDKIQVPGSLASLKGDLHHYIYRDMNHFAETKNRYATRTARDHFKTGRKSTVMHFTLRPLFTFFDRYLIRRGILDGLAGYVISVMEAYGVFLKYIKLYEMQRKLMRFPDER

SEQ ID NO: 379 - protein, 357 aa, Clostridium sp.
MKTIGLVMIVKNESRSLEKCLSHAQKLVDGIYITDTGSTDNTVEIAEKFHAHISRFEWNNDFSAARNYALEQSPCDWNLILDADEYLISGSKKDLLTFIEKGDHIGAVQLNNSYKEANGEISQSCLCITRVIPKGTRFEGRMHEQVVSDLPIALLPLVFEHDGYMLEGKGERNLQVLLEELKDKPKDPYILYQAARTLWIMKDYTRADQYFERFYQTVPFSGTGYRANGVISYIYNLIELKKYETGFKIIENEQKRLAPYADYHFACGTFYTQAIFSDVQRYINYLPEIERSYRRCLEIGEVPEHEGVIGSGSFKAAYNLGVWFEVNGKNKEARFYYKMALDWGYQPAGERMKALRG

SEQ ID NO: 380 - protein, 251 aa, Unknown
  Description of Unknown: Ignavibacteriae bacterium sequence
MQKLSVIIITYNEEHNITDCIESVKWADEIIVVDSNSNDNTIALAKKYTDKIFFVTNSSYSQSKNAGLDNAVNDWILSIDADERVTEELKNEICTAINNADNIKAYFLNRKSFFISKFIKHCGWYPDYILRLFRISAGIRFNDSKVHEKAEYSGKTGKLNANLLHYTDLSFEHYWNKMNRYTSISAEELFAKKRKASFFDIIFRPAFAFFKMYFLKLGILDGFTGLVLCTLSSVHVFVKYSKLYYLNNSGD

SEQ ID NO: 381 - protein, 259 aa, Unknown
  Description of Unknown: Aquimarina sequence
MEKKASHREKVTAIVPCYNEEHNIRKVLESVSFADEIMVVDSFSTDKTIEIAKEYTDFIIQREYEYSASQKNWAIPQANHEWIILVDADECVTPELKDEILKTLENPGVDNITGYWIKRMNHFMGERINYSGWRNDKVIRLFHRDRCSYQDKQVHAEIKTDGKIAFLKNKFYHNTYTTLDAYYTKMNRYAAWQANDYDKKTGKLTPYHFVIKPFWGFFKHYIIQSGFRDGLPGLVIGYIQGYTVFMRYVKLWLLRRDRK

SEQ ID NO: 382 - protein, 251 aa, Polaribacter glomeratus
MTKITAIIPTLNEEIHIEEAIKSVSFADEIIVIDSFSTDKTIVLAEKYNVKIIKRKFDDFSSQKNFAIDQAKHPWIYILDADERVTIEVRGEILEAVKDPEDCVGFYVRRTYYFSKKRVNYSGFQRDKVIRLFLKEYCCYSGLVHEKITTKGKLGFFKNKIDHFSYRNYDHYISKLNHYAAIRAKELHKRGDKVNIYHVMIKPPARFFIHYIIRLGFLDGFTGFLVAKTQAYGVLTRYIKLWILNKGIKEN

SEQ ID NO: 383 - protein, 256 aa, Conchiformibius steedae
MTSSVLPISATVLTKNSERHLVRVLNALRGFDEVVVLDNGSQDNTLAIAGEYANVSIHHHVFEGFGKLKNRAAAQARNGWIMNIDSDEIVSDELMQSLQRIDFSEINKIYTVSRLNHYRGRPIRGCGWYPDMVPRLYHRSHTAFSDVPVHERIEIQNDSQLTALSGELLHYSYNGAGELLAKMQFYSDLYAERYRGKKSATTAQAVAHGAFAFLKSYVFKKGFLYGGDGWVISASVAANSYYKYVKLKEANEQPKP

SEQ ID NO: 384 - protein, 300 aa, Stanieria sp.
MFSIYILTYNEEIDIAACIESAAVTDDVIVVDSFSKDRTVEIASSYPVRVVQHKFESHGKQRTWMLKNIPTKYEWVYILEADERMTPELFKECLAAIKSQQAIGYYVAERVMFMGKWIRHSTQYPRYQMRLFEKTKVWFDDYGHTEREVCLGNTGFLIETYPHYTSGKGLSRWLDKHNRYSTDEAAETIQQLNQGKVNWQQLFFGKSEIERRRALKDLSLRLPFRPLIRWIYMYFILGGIWDGKAGFAWCTLQAFYEYLIVLKVEEMQASFSPQVEANHQQNVDIKNETIVDSLLPSSVS

SEQ ID NO: 385 - protein, 291 aa, Unknown
  Description of Unknown: Verrucomicrobia bacterium TMED60 sequence
  MOD_RES (185)..(185): Any amino acid
MTQGFKVPLSLFVPCKNEETNLARCLQSVSWIDEIFVVDSQSTDRTTNIADEYGAKVMQFEYKGGWPKKKNWGLENLPFSNEWVLILDADECLPPEAEDEIKKILSDPNKKHAGYWINRRYFFLGQPLKHAYFPNWNLRLFKHKLGRYEKITDLTTESGDHEIHEHVVVKGTTGKLNSIMDHHAXPTIDSFVEKHNRYSNWEAVVESSAQDDDSALQHEGVKGKRKLRKVFRKLPFRPTLRFLYVYLWQGGIFDGWPGYVFARLHAQYEFLSLAKAKAVLRERKEAGKTTR

SEQ ID NO: 386 - protein, 261 aa, Unknown
  Description of Unknown: Pectobacterium carotovorum subsp. carotovorum ICMP 5702 sequence
MRKTLSVLIITKNEEELIQECLESISWADEIIIVDSGSSDNTIEIAQKYGAKIYHYDNWLGYGKQRQRAQTHASGDYIFFIDADERMTKELRSSVETILKKPDIITDTVYACARRNLFLGRFMKHSGWYPDKVLRFYANHHYHYNDNQVHESLIYGNAAVKSLMGDLLHLTCRDFSEFQKKQLRYASDWAKERHAKGKHCSYVSIFSHTMFSFIKTLILKAGFLDGKQGLLLAIVNAQYTFNKYAELWSYKEVNDDVKTPK

SEQ ID NO: 387 - protein, 317 aa, Emticicia sp.
MVAVGHPDLFYACIKGSSEHGISVFFKLFVVNMCVGFYHYESFFCKITMLALQTILLLELKTQPMPLSVVILTFNNTRTIRQVLEAVAGWANEIVIVDSGSTDETLSIAQEFGCKIYHHTFAGFGKQKHFAVEQATNNWVFVVDSDEVVTEALKQEIDAKVVEGTEYRGFMVPRILIFLGKKLKYGRESKLPTLRIFNRKFGNYNDKDVHEDVVLDGKTLILENEMLHYSFSDMAEFFQKMNDYSSRSAIELYKKGKRTSVLKVVTKFPVTFFVEYFIRLNFLNGYPGFVWAFTQAVYASLKYIKLRELQRKAMLQS

SEQ ID NO: 388 - protein, 251 aa, Magnetofaba australis
MVITLNAESVITECLHSLQFCNEVVVVDSGSTDETLAIAGQFTNVRIVHQQWLGYGPQKQFAVKQATHDWVLCLDADERVSHPLKQEIEQLLATPERANHAYEFPRCNRFMGRWLRHGEGYPDPNLRLYDRRHGRWSSDPVHEHVIADGPVGRLRGDLLHLSEQGLEDYLAKQNRYTTIQAQRLAAQGKNIRAHKLWLSPGLRFLKFFFLRAGFLDGVPGLVHIAIGCFNTLIKYAKARAIQRRQTPDKTS

SEQ ID NO: 389 - protein, 277 aa, Gramella gaetbulicola
MVSVVILTKNEERDLARCLESLKWSNDVHVLDSGSVDQTIKIALDYNAKVSKHKFESFGQQRNFALEHIDFKNEWILFLDADEVVTKEFKEDLISSILEADDETVGFYCCWKMMLEDRWLKYCDNFPKWQFRVLKKGKAEFTDFGHGQKEGRVDGKLEYIKEPYLHYSFSKGWTQWIERHNKYSSQEAEARLDNCPPFRNIFNKHSSTRNPALKSWLIKVPGWPLLRFLHAYFFNLGFLEGSPGFIYCTNMAYHEFLISIKMRELKRKKRQVELKTI

SEQ ID NO: 390 - protein, 261 aa, Legionella worsleiensis
MLTVIIITKNEETNIRRCLESVRFADEVIVVDSGSTDKTVAIAQEYTDKVFQTDWQGYGVQKQRALAKANGDWVLNLDADESVSVELQKEIINVIASDSADAFRVPIQMFFYNQLLKYSASPKRHIRLFKRENANYSTDIVHEKILVAPNSRISRLKNAIQHHSFRDLSHALYKLNKYSSYSAKIRIASNKKPGFLGVLLNTGWMFSRCFILQRGFLDGKLGFLFAVYSAQGTFYRGLKQIYKDNDLHQLPQIINETKDGL

SEQ ID NO: 391 - protein, 248 aa, Unknown
  Description of Unknown: Candidatus Rokubacteria bacterium sequence
MSVSAVVITFNEEERLRACLESVAWADELVVVDAESSDKTVQIAREFTDRVWVRPWPGFPDQKNFALEQATGDWVLSVDADEEVSSELREQIEAVLGSGSASADGYLVPRQNIFWGRWVRHGGLYPDWQLRLFRRGRGRFVDHAVHESVAVTGTVGRLGTPLVHRSYRGVTDFLARADRYSTLAAEAWIRSGRPARLSDLVWRPAGRFLGMYVVRAGFLDGWRGFLLASLYAYYVFIRSAKAWERARG

SEQ ID NO: 392 - protein, 250 aa, Unknown
  Description of Unknown: Flavobacteriaceae bacterium JJC sequence
MMLKEKISGLIITFNEEKNIQEVLDCFRFCDEIIIVDSFSTDQTLAIASKNPKVKIIQNKFEDFTKQRNLALDAAQNDWVLFLDGDERITPELEEEIVRTVNRSDAKDAYYIYRIFFVGKKKINFSGTQNDKNFRLFRKSKANYLEHKKVHETLEVNGTTGILKHPLLHYSFENFEAFKKKMLNYGYLKGAELAENGKKYWVFVHWSKVAFKFIQTYFLKLGFLDGEDGWKISCLQSLYVNETYRTLKKA

SEQ ID NO: 393 - protein, 288 aa, Gillisia limnaea
MVSVIILTKNEEQDLPKCLSSLQWTDDVLVLDSGSTDDTVKIARDFGARVSYNKFTSFGMQRNYALENLELKYDWILFLDADEVVTPPFENAILYAIENADQRVAGFYCCWKMMLDDTWLKNCDNFPKWQLRVLKKGRATFTDFGHGQKEGEVKGKIEYIKEPYLHYSFSKGWTQWIARQNRYSSLEARDRIEKRPPFKHIFHRNSSQRNPALKSRLSDVPGWPLLRFLHAYIFNGGFLEGTPGFIYCVNMGYHEFLIKIKMRELRLKRKKNTVAISNATKESEITIS

SEQ ID NO: 394 - protein, 262 aa, Unknown
  Description of Unknown: Candidatus Vecturithrix granuli sequence
MKKKQALSVTIITYNEEQYIREALESVSWADEIVVVDSQSTDRTVEICREYTEHIYQIPWHGYVEQKNIATDKASHLWILNIDADERVSPELAREIQNALSQESQYVGFLMPRKTYYLDGWIAHCGWYPDYKLRLYRKDCGVWVGQALHEQVQVNGPVNYFQHDLYHYTYQDIADHLEKMNSFTSLAASQKQGAVSGAGILGRTVLTFFKKYLLQQGFRDGTRGMIVSLLAAFTVTLKYSKLWERQQAISQKKPSFFKKLGF

SEQ ID NO: 395 - protein, 244 aa, Pedobacter sp.
MYISAVIITKNSEKTIKRCLDSIAGIADEVLIVDSGSTDRTLKIAESFGCVIIKTPWLGYGATKNLGHQAARFPYILSLDSDEALSYALVKEMEPEKLKLQGLYEFRRLNNYCGKWIKHGAWYPDKKIRLFPKEILWNHAASHEKLVLTEDPFLYTFKSPILHYAYSSEEELKSKVELYARLGAEDRKHLSKIAAVGKMIFSPALSFVKSYLIKRGFLDGIAGLKISYYIALGTFLKYKYLLQG

SEQ ID NO: 396 - protein, 259 aa, Psychroflexus sp.
MTQPKPKITGLIITLNEEKNISEVIENIDFVDEIIVLDSFSTDKTVDIAQSYKHVKVYQNKFENFTDQRNLALDYANHNWILFLDADERLTSELRKEILETVKNEDTAEAYYFFRKFMFKDKPLHFSGWQTDKNIRLFKKDAARYSKERLVHEILRVKGRTRTMKHKLIHYSYIDYDSYKQKMINYANLKAKELYMKDVKPNFFHYYIKPAYKFLYTFLIRLGILDGKRGFIICYLNALSVYYRYPFLKKLYQSKKEPI

SEQ ID NO: 397 - protein, 250 aa, Unknown
  Description of Unknown: uncultured bacterium sequence
MLSTVLITKNEEHNIKNCVDHLIDWVDEIVVFDSGSTDRTVAILQEYRSPKIKIQQIEWQGFARTKNLAIEAAVGDWILSVDADEVITPELKNEILDKMRSAGANGFLVPRLLYFCGRPVRYGGSYPDYQLRLFKKVSGRFVETPVHEYVRLDGEPGRLKNHMLHYSYRTMFDYWARLNRYTELDAEKKFQQGKKFRFYRVLVLPLEIFKRLYLKMGILDGFPGIFYHIFSAVSSLVKYAKLWEYCENKQ

SEQ ID NO: 398 - protein, 277 aa, Unknown
  Description of Unknown: Thermodesulfobacterium commune DSM 2178 sequence
MSKISCVIHTYNSEKYLRECLSSVEWCDEIVIIDMYSTDRTIEIAQEFGAKIYMHEYLGYADPARNYGLSKCSYDWILALDSDELIPKKLKIRLKEIADKDIFDVVLISRRNFFFGKELLGGAWGYDQDVIARFFKKGFLTYGSEVHNFIKINPKARVGKIIDKESSIIHFNYNSVRHFIEKLNTYTDFETFSTKYNYKGKPAIKILYHICREFFGRFIYKKGYKDGWIGLYLSLAMAFYRATAIAKSNLPNEEEVIKLYKELSKNIRDTKNDNKDK

SEQ ID NO: 399 - protein, 254 aa, Unknown
  Description of Unknown: Omnitrophica WOR_2 bacterium SM23_29 sequence
MIQDKLPVSVVVIAKNEEKKIADCLESVKWADEIVVLDDMSEDKTVEAAKRYTDKVFQRKMDIEGRHRNYAYSLAKHNWVLSLDADERATPELKDEIKEVIKSKADHYGFAIPIRNYIGNYWIKYGGWYPSPQIRLFKKDHFKYEEAEVHPRIIMPDPRGVLKSDIIHYNYKDFEDALRKLNKQTTLEAAKWVRDKRKMTLFKALWRSLDRFIRRYFGKAGHKDGIIGLVLAVFSGAYQFLSYAKYWQRRQDRR

SEQ ID NO: 400 - protein, 310 aa, Isosphaera pallida
MRASDHRITSKAPVSKAPVSVLVPVKNEAANLERCLPALAWADEVFVVDSQSQDATVEVAQRHGARVVQFYFNGVYPKKKNWALDSLPFRNEWVLIVDADEVVPPQLANEIAQRIATDEADGFLLNMKYFFLGRRIRHCGYAECWNLRLFKHRMGRYERMPVAPGSGTGDNEAHEHVILDGRIKKLTHELDHYAYPDISTWVEKHNRYAAWEAEQYERFLKEPIPKGIGAGKRFKRMLKKIYLRLPARPVIRFLYAYVARLGFLDGKPGLAFCGLLAFYDFLAWAKRYEKSLQSLDASHNEGKGGVYSES

SEQ ID NO: 401 - protein, 246 aa, Unknown
  Description of Unknown: Nitrospira bacterium SG8_35_4 sequence
MFPVSVAIITKNEENNIEDALRSVADADEIVVVDANSSDRTVEICGKYTDKIFQHEWQGFAIQKQMAVDHTRGPWVLILDADERVPPELKKEVTDVLADTDCSGFYVPRKNHFLGKWIRHSGWWPDHTLRLFRKERGHLEPREVHESVTVQGPVGYLRHPLTHYTYWSLTDFIKRMENYSTLAAKEIRKSAGHAGIFSLTVKPCATFLKMYVLRLGILDGKRGLILAILYSYYTFLKYAKTWEKEI

SEQ ID NO: 402 - protein, 353 aa, Bacillus kyonggiensis
MKISLAMIVKNAETTINKCLESVQGIVDEMVIVDTGSTDQTISVIKKYSNVLLYDFNWCDDFSKARNYAIEQTTGDYILVLDSDEYITSGTRVELESVMSQNKIGRILICSDFKKENQIYQAKEYVSRFFPRETRFIGAIHEQLDSNKPRVKLDLMVNHSGYFETNKSKRNIPILLNEVMQNPTDPYYLFQLGKVLRIEKQYERAFQLLRKSYDLVPKNAPYYEELVVEVINCGKECGKEEVLEVIMQNDEILINVSDFHFAKGLYYLDYCLVFSDKAVNYIQKIEDSFLTCLRLNNQTHIEYLQGSSTFLPAYNLGVYYEVTSNVEKALYYYQLSSKYGYCLAEKRLEKLFI

SEQ ID NO: 403 - protein, 275 aa, Segetibacter koreensis
MISVIILTKNEERDLPNCLNSLIWCDDIHVLDSNSTDQTIQIAVTYGAKVVTNPFISFGKQRNFALDNINTKHSWILFLDADEVVSNKFKDAMIYAIENAAEDTAGFYCCWKMMLEGKWLKHSDNFPKWQFRLMRKGRARFTDFGHGQKEKNIIGKMEYIKEPYLHFGFSKGWMNWIDRHNLYSTNEALARINNCPPFKNIFHRHESVRNPALKCWLSKLPMWPFFRFFYTYFIRAGFLEGLPGFIYCVNMGYYEFLIQIKMREIKNGYNFKTNI

SEQ ID NO: 404 - protein, 259 aa, Moritella sp.
  MOD_RES (86)..(86): Any amino acid
  MOD_RES (90)..(90): Any amino acid
  MOD_RES (99)..(100): Any amino acid
  MOD_RES (204)..(204): Any amino acid
  MOD_RES (257)..(257): Any amino acid
MSNKISVCIICKNEEQKIEACLQSVMWADEIVVVDSGSTDETLAIVKKYTDKVFVREDWPGFGEQKRRAEALASNDWIFSIDADEXVPEXLALEIQAAXXNANDEQVFSVNRLTHFCGEFVYHSGWYPDKLPRIYNRSRYRYNQKMVHESLECKDAPIIDLQHNLLHYTFSDLSIYLQKRTGYAEAWAQEKYDKGKKGSMLKGXLSAVFAFIRHYFLRRGFLDGRIGFLIAAIQFQYTFNKYTLLKFKHISDNKKNXTK

SEQ ID NO: 405 - protein, 245 aa, Unknown
  Description of Unknown: Flavobacterium sp. AR-3-4 sequence
MNKLSVIILTYNEEFYIADAIKSVAFADEIIVLDSLSTDATRQIAIDLGCNVITREFTNYSSQRNYAIDYVTGDWILFLDADERVTDDLRIEILKSIQTDKFAAYKIWFPHFFMGRFLFHYTDKVIRLVKNNNFIFENEVHEKMIVNGKIGVLKNYMIHLTYKGLFHFIDKKDRYAWFQSKMAYDKGKKATLFLLLFKPFYRFFHTYFVKRVFLDGVPGLAAASIDAYGVFSRYAKLLLLEKKLK

SEQ ID NO: 406 - protein, 253 aa, Bordetella sp.
MKLSVIIITKNEAAHIVACLDSVSFADEFIVVDSGSTDNTVELARDMGATVEQTADWPGFGPQKNRALALAQGEWVLSIDADERVTPELAAEIQRVIQTDAKDAYEIPRLSEFCGRFIRHSGWWPDPVLRLFRRGTGRFTDAAVHEKVVPVQTWRAGRLDAHFIHYSYPDLDALIAKSNRYSSDAAAMMYARGKRASIFSALGHGLWTFIRIYLIRRGFLDGRQGVVLAVTAAAGSFARYAKLMFLGDQDKRP

SEQ ID NO: 407 - protein, 303 aa, Unknown
  Description of Unknown: Candidatus Woesebacteria bacterium GW2011_GWF1_31_35 sequence
MAKISVVVNTYNEEKRLSRALSSLKGFANEIVVVDMMSTDQTREIAKKFKARVFKHKKIGYVEPARNFAIEKAKYEWVFILDADEEIPETLKIYLKNEIKEPQANFYRIPRRNIIFGKWMKHTGWWPDLNIRFFKKGTVSWNEIIHSVPVTSGKGMDIDCSEELAIKHKTYSSLEEYITRMNRYTTIQARELNKKGVEFSWKDLIIKPTAEFLRRYFAEEGFKDGLHGLNLSLLQAFSEIVLYSKLWQKQDFKKKKLDITEVHEIFEKSYKDFSWWIINSKILESTNFFKKLWLKITKSLKYR

SEQ ID NO: 408 - protein, 252 aa, Helicobacter sp.
MIQISAVILTKNSEHYLQKVLESLQELDEVVVLDNGSEDSTLSIATQFQNVNIHQHPFIGFGKMKQLGASLAKNDWILSIDSDEIASNALIAELRHTHLEPHIAYSYEVKNFYQGQWVRCCGWDKDRCVGIYHRKYARFDDSEVHEKIISLQGKLQTKPLQGFIEHYPFENATEFLVKIKRYGELFAKQHIHHKYSSPIKAVTRSVWCFFKNYFLQRGFLHGYVGFVISSYNAQSVFWKYIILYELQQKTKS

SEQ ID NO: 409 - protein, 249 aa, Arcobacter sp.
MNISVVVLAKNNEKTIDKTLKSLVGFDDVVVYDNGSTDKTMQIAKSFSNVNLVQGEFKGFGWTKNQASSFAKNDWILVIDSDEVVDSELLGELKNKVLDEKIVYKLNFKAFYKDIQVKYCGWNNQKIKRLYNKTITSYNSNDVHEDIIIDGLKIEELKGNVEHYSYHTISEFIIKADRYSTLFAQNNMGKKSSSPTKAFFNGMYSFIRTYIFKQGFRDGYVGLIISYSHMVTNFYKYIKLYELNKENKR

SEQ ID NO: 410 - protein, 260 aa, Psychroflexus halocasei
MSQIKPKITGLIITLNEERNIKSVIENLHFVDEIIVLDSFSTDKTIEIIKTFPNVKLYQNKFKNFTDQRNLALSYAENEWILFLDADERITQKLKDEILNEIQKPQTADAYFFKRKFKFKNKNLNFSGWQTDKNVRLFKKSKAIYTKERLVHEILSVNGSTKTLKNKLIHYSYLDYQSYKAKMISYAHLKAQELHQKGVKPNFYHFIIKPAYRFFHSYFIRLGILDGKKGIIICYLNALSVYHRYPELKRLNALPEKSTA

SEQ ID NO: 411 - protein, 254 aa, Unknown
  Description of Unknown: bacterium (Candidatus Ratteibacteria) CG_4_9_14_3_um_filter_41 _21 sequence
MEKLSVAIITKNEEKSIGRCLESLKWVDEIVVLDGYSTDRTVKICKNYTNKIYQKQFESFPVERDFVLKKTSHRWVLSVDADMYFLPEICEEIKTVLKSDIKYDAFLMRGLTVFLGKEIRHCGWFDLRYLRLFNKEKGNYDLNLKCIDPFIIKGEIGYLKNHFIHYGGDSFSEYFGKIKRYSYLTALEYKTKGLRIQPYNCLFYLFLKPLLVFIYKYIVKRGFLDGIVGFLVCVNSAITYFASYSTFWDIQRKE

SEQ ID NO: 412 - protein, 311 aa, Halomicronema hongdechloris
MFSIFILTYNEEIDIAACIESALLSDDVIVVDSCSCDRTLAIAGQYPVRIVQHPFESHGQQRTWMLEQIACKYPWAYILEADERMTPALFQECLTAIQHPERVGYYVAERVMFMGTWIRRSTQFPRYQLRLLKRGHVWFDDYGHTEREVCRGATGFLQETYPHYTCSKGLSRWIEKHNRYSTDEARETLKQLGQGQIHWQQLVWGRSEVERRRALKDLSLRLPGRPLLRWLYMMFILGGWRDGRAGLAWCTLQAFYEYLIVLKVWELRHPDQMIGMPQSTATTSGPEAASAAAKPVHDATQLSSPSLSGRS

SEQ ID NO: 413 - protein, 247 aa, Sebaldella termitidis
MKLSVGLITFNEEKNIARTLDSVLEIANEIVIVDSGSTDKTLEIARKYNAAIFSEEWKGYGRQKNSVIAKCNGEWILLIDADEEISKELKNKIKIVINDEKSGSVYKPNFTAVCFGKKIRYGGWSNHYRVRLFKKGIGKYNDREVHEKFITNEKPEILQEEIFHHTYEDLEDYFVKFNRYTTESAIQYKKQNKKKNFILFYLDSIFKFFKMYILKAGFLDGYEGYLLAKLASFYVFAKYAKLKEKNK

SEQ ID NO: 414 - protein, 246 aa, Unknown
  Description of Unknown: Ignavibacteriales bacterium CG_4_9_14_3_um_filter_34_10 sequence
MSEKLSVAIITKNEEANIEKLLNSILWVDEIVICDTGSTDRTIEICKKYNCKIFSINWEGFGKAKQSAVDKTSYNWVLSLDADEYVTEELKDEIIAVLSNPKFNCYYIKRSSFYLGKEIKHCGWNNDFPKRLFDKRKAKYNDDILHESLIVDEERGRINSRLLHYPYQSISQHIKKMNYYSDLAAQKLSDKGKKYSVLSSVFLGFAKFLNMYFIKFGFMDGKEGLLLCLNSAIGVYLKYIKTCKAN

SEQ ID NO: 415 - protein, 259 aa, Acetohalobium arabaticum
MASLGALVLTYNEEENITDCLDSIDWVEEIVVVDSYSEDDTVELAQQYTSKVYQREFDDFASQRNFGLEKLESEWVLVVDADERVTEELKEEVLDKLSNPQVEGYRVPRRNYFLGKWIKHCGWYPDYTLRLFKTAENSYSGLVHEGIELDGKVVELENDLIHYTYRNLDHYLDKMNHYTTLDAEKKYQAGVKKSLAYMLLRPVLEFIKKFFLKKGFLLGRQGLILSIFSFYYQFQKYVKLWEKYEVEPGSDSNEEDTIS

SEQ ID NO: 416 - protein, 259 aa, Beggiatoa alba
MLSVIVITKNAALHIDRCLTSVSWVDEIIIVDSGSTDDTLTRCARYTDKIFIHTDWQGFGVQKNRALQYAQSDWVLSLDADEVVTPDLQKAIKTVMQDSRYEAWQIPRLSRYCGRWMRHGGWYPDYVTRLFRRGSAHFSADLVHEKLLVTQGHIGQLTTPLLHYSFENLEEVLQKVNAYSSASAQMQFARGKQGGLSKAILHGLWAFIRTYIIRLGFLDGREGFMLAVSNAEGTYYRYLKLFYCQHHASNTAQPHRHDL

SEQ ID NO: 417 - protein, 257 aa, Thalassobacillus devorans
MGVDLTVIVLTKNEENNLNDLLDNIKSLAAKKVIVDSGSTDNTLSIAQRYNCKVLHRDLKSFADQRNYALDNSKTDWVLFLDADERLTDELLTNIPELIELGIKENISSFSFRRKTIAFGKELKRAWSDYQPRLINRNNCRYDTKILVHEDLLVTGKRKNVNSGYIRHFTYQNFEQYLTKMNLYVKMEARNIGQNDISLTKLIVEPLLVFFDRLIIKAWIMDGVSGFHASFTSFIVRFLSLSLARSLKLNGNIYSKE

SEQ ID NO: 418 - protein, 245 aa, Unknown
  Description of Unknown: Flavobacterium cyanobacteriorum sequence
MAKLSVIIPTHNEESYIEDAIRSVAFADEIIVIDSYSNDSTRQRALNMGCRVLERKFDNFSAQKNFALAEAKGDWILFIDADERVTQLLKQEITDVLKKPSYNGYTLAFPHFYMNRFLYHKVDRVVRLVKNKNIAFTGDVHEKLNFEGKAGTLENFMIHYTYKGLFHLLSKKDSYAWFQASMSVKKGKKVTYLHLIFKPLYRFFHTYIIKKGFLDGVPGLALASMNAYGVLSRYVKMMLIQKGLK

SEQ ID NO: 419 - protein, 254 aa, Desulfovibrio aminophilus
MKPTVTGLILTFNGQRLLRECLKSLDFCDEILVVDSLSTDQTRELAKQAGARVLTRKWEGPGPQFQFALGQIATDWVVSLDQDEYLTDELRDNIRRALAEAPADLAGWYVPRRSFYFDRFLKHSGWYPDHLLRVFRAGRMKVTVTGAHYHFNPQGPTAKLSGDIVHYPYANFREHMAKMNSYAQQAADEMRAKGRKGGVARAVAHAAIRFLKLYVLKLGFLDGRAGFINACAGAYYAFQKYIRVEEKGDWGPKP

SEQ ID NO: 420 - protein, 250 aa, Unknown
  Description of Unknown: Candidatus Desantisbacteria bacterium CG_4_8_14_3_um_filter_40 _12 sequence
MNISVIIITHNEEKNILACLSSVKWADEIVVVDAFSTDNTKKLAEEFGAKVFQVKWQGYGKQKNYALSLANGDWILSLDADERVTPELAEEIQTVMPHSQMDGYQISRKAYFLGKWIRHSGWYPDYCLRLFRKDKARFVEKPVHEFVELDGKMDQLKGVLLHYTDTCLEHYLHKLCCYTTLAADELAAKNKKASLGDIIIRPSFIFVKMYVLKKGWMDGMHGFILAVLSSFYVFVKYAKLWEKDNSSYFS

SEQ ID NO: 421 - protein, 369 aa, Unknown
  Description of Unknown: Candidatus Shapirobacteria bacterium sequence
MYQRMFVCLNKPSVSFSRTYSRRGDVGYENSRNLSFQHGNTKQSCIINRISNWRYCASNCHKYNHVRKSTSHIRINNGRLLAMTSIFFVFYFLIIYNQPSMTHSLSVAIATYNEQKNIKAFLNHLKWVKEIIIVDGSSTDKTRQIARKYKNVKVIKTTNKPIFHINKQKAIDRCQGDWILQLDADERIPLKLKKEIQFILKRPIDKVPYDAFWIKRKNYFLGTFLTKGGQYPDPVIRLFKKGQAWLPCKSVHEQIEVKGAISSLKHNMLHYADTSFSRYLERNNRYTTLIAQQMLDDNIKLNFYLALKYLIFKPCHWFLLTSFRHKGLVDGFPGFVFSLFSTLRFPIAFIKFWELKKTNRSIDLKKDWN

SEQ ID NO: 422 - protein, 255 aa, Neisseria sp.
MPAISVLILAKNEENNIQDCIESCNFAQEVVVIDDFSTDKTVEIAEKCGAKVIQRAMNGDWGGQQTFAIEQAESEWIFFIDADERCTQELGQEIIQTVARGEEFGFWVKRINHFQRKIVKHGPLSPDWVCRLMPRQGSRVEGFVHPKIIHQFADRKLNAPMLHFTYETWEQYLRKMNQYSTLSAEKYKKEGREYHFLIDIVLRPLFAFVKMYILKRGFLDGVLGYILAKNYANYTMNKYVKLKYLNTSAPKNRNF

SEQ ID NO: 423 - protein, 249 aa, Unknown
  Description of Unknown: Candidatus Gottesmanbacteria bacterium GW2011_GWA1_43_11 sequence
MKLSAIILTKNETATIGDCLASLKDLQCDEILVIDDESTDQTVQIARAKKAQVYTHKKDNFAEARNFAATKAKGDWLLYIDADERLSAVLVTEIKKTLEKKTNYVAYSLLRVNYYLGKRWPKTEQLVRLLQKDKLIKWQGSVHETAEVNGEISALHEPLIHLTHRSLSEMVTNTIEWSQIEAELRFKAHHPPVTWWRIPRVMLPVFFDYYITQGGWQVGTVGLIESIYQAFSIFISYARLWEMQQKQTK

SEQ ID NO: 424 - protein, 295 aa, Achromobacter xylosoxidans
MQKIPVSVVVMTKNEERNIAKCLKALVEFDEVFVVDSNSTDATCSIATAMGARVSNFQWDGKYPKKKQWCLEQLPFTHPVVLYVDADEEMTPGLAAEIREVLPRFAAGAGGAFVPFDYVFCGKKLEHGHRVYKLALLARDRSRFLDYDDLDVANMWEVEGHYQPQVQGETFALRQRMVHNDHDSLYHYFDKHNRYSDWEANLRTKGLMNDPREANVGGRALLKRIFQAMPFKAPISFLHSYVFKLGFLDGKAGYDYAVARAMYYWQIRIKTEEILKARQASEAASRRDAVAGAAK

SEQ ID NO: 425 - protein, 250 aa, Unknown
  Description of Unknown: Chryseobacterium sp. sequence
MQEAKEKVSGLIITFNEEKNIREVLGCFDFCDEIIVVDSFSTDKTVEIAGEFPNAKIIQNRFEDFTKQRNLALSYAKNDWVLFLDGDERTTPELEKEIIDTVGDSEAKDAYFFYRTFFVGKKKINFSGTQNDKNFRLFRKSKASYSENKKVHETLVVNGSIGILRNRLLHYSFENYEHFEKKMISYGKLKGEELRLQGKKYSAIVQWSKVIFKFFKTYFLKLGILDGINGLRISYLQSLYVYETYRTLKN

SEQ ID NO: 426 - protein, 289 aa, Unknown
  Description of Unknown: Thiotrichaceae bacterium sequence
MREVMSNENRPTLAAVAISQNEEVDVKGFLDNLLPWVDEIVIVDDASTDATIDIIKAAGDKVKLVKRKMDKDSGFSGQRNAGIDAAESDWLLHMDIDERVTPELAKELLIAICDNSINGLRYKRLNFFLHHPMRGGGWQYWNNPQIGRKGFHRFQNKIHEQCVVDGRDAKTGQLNAFMWHLNDEDYVERVGKNVRYMQMSGQEILDKGIVVKWYHLLFYPLYRALRSYFYDGGFREGTRGLLFCLYTFSSSFNWWAYAWEKQNHIKREGLEKELMKIWQQSDAANKSDK

SEQ ID NO: 427 - protein, 255 aa, Unknown
  Description of Unknown: Chryseobacterium hispalense sequence
MAEQVMMNVSGLIITYNEEKNIQEVLECFDFCDEIILVDSFSTDKTVEIAKKFSKVKVIQNTFEDFTKQRNIALDAAKNDWVLFLDGDERITAALREEIIEELKKTVQKDAYYFYRKFFFAGKPIYYSGTQTDKNFRLFRKSKARYISGKKVHETLHVNGTIGELKNKLLHFSVNDYESYKTKMLHYGVLKGQELAAKGKKYNLAAQYSKTAFKFFKAYILRLGILDGKEGYQLSYLQSLSVFETYESLKRSKTD

SEQ ID NO: 428 - protein, 270 aa, Larkinella arboricola
MSVSPVSSSPPVSAVMITFNSARILPAVLGALTWCDEIVVVDSGSTDQTLAIAQHFGCRVLHRDFNGFGQQKGFAVDQARNHWVLVVDADEVVTDALRSEIQLRLAEAEAGTLSFRGFEVPISLVFLGRLMRYGGEYKMPHLRLFDKRFGNYNSARVHEDVVLQGSVGKLTHHMLHDSYGSLHEYFEKFNRYTTAGAHDLQSRGRHGSIAQIVFRLPITFLKEYLLKQNFLNGYPGFIWSLFSAMYPVVKYAKLRELENSGQAHPVSRVS

SEQ ID NO: 429 - protein, 261 aa, Unknown
  Description of Unknown: Flavobacterium sp. sequence
MILTEKKLLSALLITYNEESNIREVLHNLAFADEIIVVDSFSTDQTTEIAKEFKNVKITQRVFDNFASQRNFALNLATYPWILFIDADERLTPELQKEINKVINQEKSASAYFMHREFMFENKRLKYSGWQTDKIIRLFKKEKATYNPEKIVHEKLIVQGKTKKLKNKLIHHSYSSYDDYKQKMIFYGQLKAMEELSKQTNPGFFHFYIRPLYQFLNQYLIRFGFLDGKKGIIICYLNALSVAVRFKELKKIRNKLKISKI

SEQ ID NO: 430 - protein, 251 aa, Pelosinus propionicus
MDKKIAVLILTFNEENNIRECIESVAFADEVIIIDSGSTDKTCEIAETLGAKFLYHAMDEGFAGQRNFALKQTLAEWVLFLDADERITPELAMEIEEIVQRNEQFAYDILRSNVVFGERVSYGGHSPDYSLRLYPRNAIQWQGVVHEQAQVSLPILKTKNGMLHYTYTSWDRYFFKFNQYTTLMAQQMEAKGKKAHFIDIILHPLAGFFRFYITKSGWRDGKIGFILAGFHGFYTMAKYVKLYYLQKERKE

SEQ ID NO: 431 - protein, 263 aa, Enterobacter aerogenes
MFKLSVCLLTCNSARLLREVLPPLLRVADEFIVVDSGSTDETLQICQQFGLTVHHHPYAAHGMQMNYATSLATHDWVLCMDSDEILDDEVVAAILALKAGEEPDPSCAWRLPRYWFVLGEQVRTIYPISSPDYPVRLFNRQRASFNQRPVDDQVVGHLTSTRLPGFVRHDTFYSLHEVFNKLNSYTTRLVKMQKVRPSLSRGIISAIGAFFKWYLFSGAWRSGKVGAVTGLYATLYSFMKYFKAWYAYNGKQQGTVTEKRTDP

SEQ ID NO: 432 - protein, 290 aa, Unknown
  Description of Unknown: Candidatus Omnitrophica bacterium sequence
MFDGYSAGNSGRSVSGTAGNREIGGLTPSNRRGAEVDKPPVSVVVITKNEEENIAECLKSAGWADEIIVVDDESADATREIAAGYTDKVFIRKMANEGRHRNWAYAQASNDWVLSLDADERITKGLADEITDLLKGAPENKVYTIPRRNYIGDHWLRYGGEYPAPQTKFFLKNEFRYEEVEVHPRAFSDGSCGHLKGDIVHYSHKDIADYLHSLNSQTTLEARKWYRTGRRMSLGHAVWRALDRCFYRRLLRKKAYKDGIYGLAVAVFSGLYQIVSYLKYREMFRQDKGS

SEQ ID NO: 433 - protein, 245 aa, Unknown
  Description of Unknown: uncultured bacterium sequence
MISVIIITKNEEEVIEECILSVKAVADEIIVVDDSTDKTPGIAKNLGAKVIKNPFKNFSDQRNRALENVKNEWIFYIDSDERATPEFLKELKEKIKNDNGASAFFVRRKIFYFGKNWGLTDKVERVFKRDKLVNWEGVVHETPKFIGEIGIIEEPILHYTHRNLSQMLGKTNDWSVYEAKLRFNANHPRMNGWRFVRVIATGFFKSYLKEKGYKNGTAGLVEGMYQAFSMFITYSKLWEMQKKSS

SEQ ID NO: 434 - protein, 299 aa, Unknown
  Description of Unknown: Bacteroidetes bacterium 38_7 sequence
MKDISVIILTYNEEMHIERCIENVQSFAREIFVVDSFSSDDTINIAQKLNARVYQNKWENNYAKQFNWALENLPIQTTWVLRLDADEYLYPELIKEINTKLDTLPKDVSGVVFKRRHIFMGKWMKRGTYPVKLLRLFRYKKAICEQRWMDEHILLLEGRAVEFEHDFADHNINNLSWWTQKHNGYAIREAIDLIDIELGLQITQQEAGKLSEQASTKRNRKRNYAKQPLFWRSFAYFIYRYIFKGGFLEGKEGFLWHFLQGWWYRTLVDAKILEIKKACGTDKKKIKAYLKKEHNIELE

SEQ ID NO: 435 - protein, 251 aa, Bacteroides salyersiae
MKISVVINTYNASKHLKQVLEAVKNFDEIVVCDMESTDDTIDIAKIFNCKIVTFKKGNCNIVEPARDFAIQQASHPWILVVDADEIVPDQLREYLYKQISNPNCPAGIYIPRKNYFMGRFMHCHYPDHVLRFFKKEGTVWPPIIHITPTVQGKLYSIPSKQKNLAFIHLANDSVADIVKKTNEYTENEIEKKKNKKYGIGAFFYRPFFRFFKTYILKGGILDGKEGFIKACLEGYYQFIMLSKIVEYRKSK

SEQ ID NO: 436 - protein, 251 aa, Serratia sp.
MDFCNRISVCLLTFNSSRLLRDVLQPVAAFADEIIVVDSGSTDGTLAICDDFNIKPLYHPFETHGRQMNYAISRARHDWVLCLDSDEIMDDEAVDAMRLFKRTPGPDKNNAYRIRRDWFVLGQAVRTLYPVSSPDFPIRFFHRQVVKFNDAPVDDAAEGGASTLILAGHVKHDTFFSIEEVFAKLNSYTARVVKYKAIRPSILRGVISAIGAFFKWYIFSGAWKAGRVGAVTGVYAVSYSFLKYFKAWYHR

SEQ ID NO: 437 - protein, 250 aa, Sulfuricurvum sp.
MNVSAVMIVKNGARTIRRSLESLREFDDVVVYDNGSSDGTQNIANEFPNVRLIEGEFDGFGTTKNRAASYAEHEWILIIDSDEVVDAELLHALKTKLLDPRTIYIVNFLAYYKEIQIRHCGWNNQKIRRLYNKSVTRFNDNAVHENIIDEGMNKAPIEGNMKHYSYMSVSDFIVKVDRYSTLFAADNAGKKFPTPSKAFFNGLYSFFRTYVLKRGFLDGYAGLIIAFSHMATNFYKYIKLYEVNREQRRG

SEQ ID NO: 438 - protein, 255 aa, Unknown
  Description of Unknown: Chryseobacterium koreense CCUG 49689 sequence
MLGLKEKVSGAIITFNEEKNIQEVLGCFDFCDEIIVVDSFSTDKTVELALQNPKVKVIQNKFEDFTKQRNLAIDAANNDWILFLDGDERITPELRDEIISELGQSDKKDAYYFYRKFFFAGKPIHYSGTQTDKNFRLFRKSKCRYVGDKKVHETLEVHGNVGVLKHKLLHYSVSSYDSYRKKMLHYGELKGKELYDKGKKFSRLTQILKTAFKFLKTYILRLGILDGKEGFQLAFLQTLSVFETYNSLKKAEKKQ

SEQ ID NO: 439 - protein, 258 aa, Unknown
  Description of Unknown: Nitrospirae bacterium sequence
MSKVSAYVIAYNNETTIRACLESVRWADELIVVDSHSTDATEKISREFTDKVYQHEFHGFGRLRNEAVAHASHEWVFSLDTDEVATPEIRDEIRRLLDRGPEADAYFVPRKNYFLGRWIRHCGWYPDYRQPQLFRKDRMKYCDQLVHETFELHGTVGHLKEHVLQYPFQDIDQYLAKMDRYSDLMARRMVEQGRRFRTHQLVSHPVFTFLKMYLGRLGFLDGRPGLILSGLYAYYTFIKYAKLWELQRGPAAVGEGLR

SEQ ID NO: 440 - protein, 319 aa, Alkalinema sp.
MTHAKTPSNSSKIPVSVLIPARNEEANLPACLQSVARADEVFVVDSQSSDRSVEIAESYGAQVVQFQFNGRYPKKKNWSLENLPFRNHWVLIVDCDERITPELWEEIAEAIQNPAFQGYYLNRKVFFLGKWIRYGGKYPDWNLRLFQHAQGRYENLGTEGMRNTGDNEVHEHVVLQGEVGYLKNDMLHIDFRDIYHWLERHNRYSNWEAQVYYNLRNGKDHAGTIGANLFGGAVQRKRFLKKIWVRLPFRPLLRFILFYILRLGFLDGKAGYTYARLLSQYEYQISVKLFELEQLGGVLNQTDTLTDQMTLSPVPQPEA

SEQ ID NO: 441 - protein, 270 aa, Unknown
  Description of Unknown: Flavobacterium rivuli WB 3.3-2 = DSM 21788 sequence
MISVIILTKNEEQDLPMCLDALHWTDDIHILDSGSEDTTLDIAAKYNAKISYNAFKSFGDQRNFALDNIDAKYDWILFLDADEVATPPFVAAISKAIETAPQEVAGFYCCWKMMLEDTWLKRSDSFPKWQFRMLRKGRARFTDFGHGQKEGEIDGVLEYIKEPYLHYSFSKGWTQWIARHNKYSSDEAVARFNDAPPFKNIFSSNTSVRNPALKSWLTKTPGWPLLRFTYAYFIKLGFLEGTPGFIISANMAYYEFLIQIKIRELKRKKI

SEQ ID NO: 442 - protein, 253 aa, Nicoletella semolina
MPTLSVAMIVKNEAQDLAACLDTVADWVDEIIILDSGSTDETKQIALSYGVKFFENTDWQGFGKQRQFAQQYVTSDYVLWLDADERVTPELKDAIQQAVRRDEKNAVYQLPRLSEVFGRQIRHSGWYPDYVTRLYRTDFAQYGDELVHEKVHYPKHANVVKLKGDLLHYTYKDLHHYLVKSASYAKAWAIQRANKGKKGSLLQGITHAIACFVKMYFLKAGFLDGKQGLLLAILSSHSTFIKYADLWNRTRNE

SEQ ID NO: 443 - protein, 248 aa, Unknown
  Description of Unknown: Chryseobacterium sp. Leaf201 sequence
MNISGLIITYNEEKNIQQVLECFGLCDEIIVIDSFSTDKTVEIAKTFPNVKVVQNKFEDFTKQRNLALDEAKNDWVLFLDADERITPPLKQEIIDEFKKPEQKDAYYFYRKFYFAQKPIHYSGTQTDKNFRLFRKSKARYTPDKKVHETLNVKGSVGELTNKLLHYSVSDYESYKQKMIHYGVLKGQELSLKGKKFNIFVQYSKTAFKFFKAYILRLGILDGKEGCQLSYLQSLSVFETYESLKKEQN

SEQ ID NO: 444 - protein, 246 aa, Tenacibaculum sp.
MIKLTVIIPTLNEESNVQRALDSAFFADEIIVIDSFSSDTTVDIVSQSDAILFQRKFDDFSSQKNYALRKASNEWIFLLDADEEITEELRDSIIFNLKSNALHSGFLLKRDTFMNERKLHFGGFRNNIVRLFKKEGSFYEGLVHEQIQIDGSIGKLKGNLNHYTFTNFKQFKRKIDHYAQLRASELYSKQKKVTLYHEWIKPFARFVIHYIIKLGCLDGKRGFQFSYLISYGVWKRFQLLKKLNNT

SEQ ID NO: 445 - protein, 254 aa, Unknown
  Description of Unknown: candidate division Zixibacteria bacterium sequence
MKISAVIITKNEEKNIIRCLESLKWVDEIVVVDSESTDKTVEIAKRYNAKIVSPIWEGYGKAKNSGVDAACGEWILSVDADEELSEKLKVEIKEIIDNSDACGGYYLKRKTKFMGQWILHCGWYPDYILRLFKKSKGRFDDKVIHERVLVQGATGKTNGELLHYSYDNLEQYFEKFNRYTTISAKEEFSKGTKVGIVKLFVKPVAAFVKHYIIKLGFLDGTAGFVLSVLSAKAVFVKYSKLMELIEKEKYGNKN

SEQ ID NO: 446 - protein, 286 aa, Pedobacter oryzae
MPDFSFIILTFNEELHIPRLLESIKSLGAPTFVLDSGSTDSTLQICRNYGVSVETNPFENHPRQWDKALKTFPVQTPWIIGLDADHIVSPELLQQLSQFRDADFTDVSGIYFNRKNFFKGKWIRHGGYYPRYLLKMFRFGTGYSDLNENMDHRFIVSGKSIIWKQGHLIEENLKENRISFWISKHNHYSDLLANEEIERMNKLRFQTIKPNFWGSPDERIASLKNLWWKLPLFLRPFLYFTYRMIFQLGILDGRTGILFHFLQGFWFRIIVDVKISEILKEKKNEQ

SEQ ID NO: 447 - protein, 250 aa, Unknown
  Description of Unknown: Uliginosibacterium sp. TH139 sequence
MSARLPLSAVLITRDCVGPLRATLESLAFCAEIIAVDSGSTDGTIELLESFGARVIREEWRGFGPQKQFAIEQAAHDWVLCIDSDEIVSEALRVSIERALVQPAYQCYEFPRCNRFLGRYLKHGEGYPDLSLRLFDRRHARWSDDIVHERVITLGGVGLLRGDLLHHSEDTIESYLAKQNRYTTLAAKALVEEGRQVSAGKLLLSPLFRFIKFYVMRAGFLDGLPGLIHILIGCFNSFAKYAKMIEFSRR

SEQ ID NO: 448 - protein, 218 aa, Unknown
  Description of Unknown: Flavobacterium sp. sequence
MSIAFSFIVLTFNEEQHLPRLLHSIAGLGAPLFVLDSGSTDQTLKIASDFGAVVKHNTFENHPKQWDFALKNFEVETPWIIGLDADQIVTPELFDQLSKFKDEDYQGINGIYFNRKNFFRGKWIKYGGYYPKYLLKMFRKEIGFSDINENMDHRFVVTGNTAIWKKGHLLEENLKENEISFWIAKHNRYSDLVAEEEVERMYELRMQTVKPDFFGDPY

SEQ ID NO: 449 - protein, 285 aa, Unknown
  Description of Unknown: Acidobacteria bacterium sequence
MNQVTNLSIIVLTLNEEENIAQCLGSVADISDDIFVVDSGSTDRTLELARRWTSNIVIHDFHGYSAQRNWALRNLPFRYEWVLFLDADEFVSPELKNELHSTLGGRTTVAGFYLPRKLIFQEKWIRFGGYYPTWILRLVKHRQATCEDRKVNEHLIVTGATGKLRGDLIHNDKKGITAWISRHNAYATLEALELIESMERSPSNRNAVQPSFWSTQVERRRWLRERVWNRFPPLVRPCLYFIYRYFVLGGLLDGRAGFTYHFMQALWFPLLIDVKFLEMRRSGRR

SEQ ID NO: 450 - protein, 256 aa, Prevotella bivia
MAQDNKISVVINTYNAEKHLQEVLDSVKDFDEIVICDMESKDNTLAIAREYGCKIVTFEKKNYTIVEPARNFAVQSATHSWVLVTDADELVTPELRQYLYQYIATPNCPEGLFIPRRNRDMNVLDMGRLRDFQLRFFRRDKVYWPPLIHSIPEIEGKTTKLVDNDKAVFNHLDENYLHDRMEKLNRYSDEELDKRANKQYGLGALIWRPTWRFFKAYVMDQQYKKGLPGLISSYLSGFYQFLIVAKTIEKQKYKTK

SEQ ID NO: 451 - protein, 251 aa, Aliiglaciecola lipolytica
MIVCNEADRIDASLAPLAGWVDQLIVLDSGSTDGTVELAKKYTDSVHQTDWPGFGAQRNRALTYCEHEWVLNIDADEVITEELKNEIDAVLSEPDLEATFIKFPWHTFLFGKTLKHGRYASPQGKLFIKTGANFKHRSVHETLEMPVQNIRILKSPLLHYSWRDYYHVQEKHLKYAVLGAGDKAKKNKKSSLSFAVLRFFVDFLQQYILRLGFLDGKRGFLMAIILGQYAFHKYAALWALQQESSQTEPKR

SEQ ID NO: 452 - protein, 256 aa, Raineya orbicola
MKLSVVIITFNEEQNIQRCLESVQAVADEIVVVDSFSTDKTAEICQKYQVQFIQQAFLGYVEQKNFANAQASYDWILSLDADEALSERLKNEILQLKKQENPNADAFSMPRLTNYLGKWIRHTDWYPDRRIRLFNKTKAHWTGINPHDCIQMQNANSLVSKLKGDILHYSYYSIHQHIAQLNHFTSIMAETLVKSGKKAPLYKLFINPIWKFLYSYVLRLGFLDGYYGFVVCAVSAFATFTKYLKIRELSKKSKKN

SEQ ID NO: 453 - protein, 252 aa, Unknown
  Description of Unknown: Crocinitomicaceae bacterium TMED16 sequence
MPNLSVVIITFNEEKNIARCLASIETIADDIVVVDSFSTDRTEQICLQFKVRFIQHRFEGHIQQKNWALQQAKYPHVLSLDADEALDEKLKSQVNSIKENWTADGYTMNRLTNYCGQWIKHCGWYPDKKLRLWDTRLGDWGGTNPHDKVIMQKGTRITHLNHDILHYSFYTIDQHLKQIDFFTDISAKAAFDAGERSSSFKIIYKSAFKFFRDYILKLGFLDGYYGFIVCKNSAFAKRMKYRKLQELNKSGA

SEQ ID NO: 454 - protein, 248 aa, Sulfurospirillum sp.
MVNKISVVILTKNSQKYIYECLKSLVKFDEVVILDNGSTDNTLEIANEFSNVKIHLHEFIGFGPLKNLAISYTKYDWILSIDSDEIFSESLVDEILSKPLIPTCVYAIQRDNYYKNKLIKCCGWQNDYVYRLFNKNITSFNNKPVHESVILENMKTEKLKNRFKHYSFGNPSELLQKMDKYSSLYAQEYSLVKKSSPLKAFIRAFVAFLKNYFFQRGFLCGYEGLLISISNANGVFYKYIKLYEENKK

SEQ ID NO: 455 - protein, 303 aa, Unknown
  Description of Unknown: Candidatus Gottesmanbacteria bacterium GW2011_GWC2_39_8 sequence
MKISAVINTYNEEKNLERALRSLVWAEEIIVVDMESTDKTLEIAAKFNAKVYSHPYVGYVEPARNLGLEKANGDWIFILDADEEATLLLGKKLRQLSENIEGKTYFRLPRKNILFDKWIQHTGWWPDYQIRFFRKGSVTWGDEIHSIPETRGKGEDIPASEENALIHHNYQTVEQFVTRMNRYTTIEARLLYNQKQPFEWKKLIERSIGEFLGRYFAGEGYKDGVHGLGLSLLQSFYQVLVQLKLWQAYKFEEKQVGLADSEKVITSSLGELKYWIDNKKIEEEKGQLKKNILKLKSRLPLNL

SEQ ID NO: 456 - protein, 256 aa, Unknown
  Description of Unknown: Candidatus Microgenomates bacterium sequence
MEINNKLTAIIITKNEEKMIEDALKSLKFADEILVVDTGSFDKTIYIAKKYKAKIVKYTSGESFSDWRNKGLAEAKGNWVLYVDADERIPNALAGEISNILKTKSEGAFAIPRKNIVLGRELLHGGWYPDYVKRLFSVNVLTQWTGDLHEEPVFSGKLLHLENSMLHIKHETFSEMLIKTNKWSQIEAKLMFDANHPPMNTVRFVSAMWREFWSRMVLRNAYLDGKVGVIFSIYQVFSRFVSYAKLWEMQNESSNI

SEQ ID NO: 457 - protein, 250 aa, Unknown
  Description of Unknown: uncultured bacterium sequence
MKPSLSVILITKNNEKTIEKCLESVKWADEIVVLDSGSTDRTLSLCTKYTTKIIQTDWPGFGPQKNRAIDKATGDWIFSIDSDEWLSDASRDEIIATINNPTATVFQMPRLNQYCGQWIRHGDVGKDKVIRLFKRGAARFNDNLVHEKLQTDIHIGILKNSLLHNSYDSLDALLQRINYYTTLSAQSRFKQNKKTNFAKAIFSAWWAFTKSYFFRAGFLDGKMGFIVSLSSAESSFYRHVKLMELQKHAR

SEQ ID NO: 458 - protein, 257 aa, Unknown
  Description of Unknown: Gammaproteobacteria bacterium sequence
MSQQTKISATIITLNEERCIRECIESLEFADEVIVIDSGSKDKTIDICLELGAKVIQQEWLGFGAQKQLAVDQTQNDWVFCIDADERVSRQLNAEITELKQQAEISPKAFNMSRCNRFLGRWLRHGEGYPDHNLRLFHKQYARWSEHTVHEHVITDEKVGLFKSDLMHESEDGIFDYLQKQNRYTTLQAEALLAKGKKGSIARMLISPVTRFIKFYFIRRGFQDGVPGLIHVLIGCVNSMTKYAKLIELNIKAEKDS

SEQ ID NO: 459 - protein, 261 aa, Legionella fallonii
MLTVIIISKNEEANIGQCLKSVSFADEIIVLDSGSTDNTVAIAKQYTDNVFSTDWPGYGIQKQRALSRAKGDWVLNLDADESVSPELQEEIKEAIASGDADGYRIPIQMIFYNQPLKYSASPKRHIRLFKRANASYSKDIVHEKILLLPNAKVEKLKNGIMHHSYRDVTHVLYKLNKYSSYSAKIRIESGKETGFIRIFIGTGWMFFRCFILQRGFLDGKLGFLFALFSAQGTFYRGIKQLYRDKNIDKLPKLAKESEDIL

SEQ ID NO: 460 - protein, 249 aa, Marinobacter aromaticivorans
MKLSAVLITKNAGPDFAECLKSLAFADEIVVLDSGSTDDTLATAQQFGARIFQSEDWPGFGRQRQRAQSYARGEWLFWVDTDEVVTEELATSVQQVIEGASKNRVFQVVRLSWFFGRFIRHSGWYPDKVVRLYRREEYGYDDALVHEKVHCPGADVGTLKGDLLHYTATDFADYMAKSVRYADDWAEERVRRGKAASLVSACTHSLGAFLKKYFLKFGILDGKHGFLLAVMTAYYVFNKYAALWIKTRR

SEQ ID NO: 461 - protein, 252 aa, Polynucleobacter cosmopolitanus
MSLSVILITKNEEANLKDCLESVSFADEIIVVDSQSSDKTQEIARSFGAKLEITSDWPGFGPQKNRALNLATQDWVLSIDADERVTPELKQEILTAIASPNAADCYAIPRSSWYCGRFMKHSGWYPDYVDRLFKRGSAKFSDHLVHERLLPTGSSGKLNNHFLHYSYRDFSQVLKKVDVYSSAAAQQAFKQGKKGGLGEALIHGFWAFFRTYVLRRGFLDGKHGLALAISNAATSYYKYLKLWQLQNKKDIY

SEQ ID NO: 462 - protein, 236 aa, Chlorobium ferrooxidans
MLAECLGALEMFAEVVIVDNGSTDDTIAVASRFRNVRLFEHPFTGFGPMKNIAIDKAANDWILSVDSDEIVTPELSAEILSLKLDSSRIYAVGRDNHYRRRLICGCGWQNDQVQRLFNRKRTRYDDKLVHEGLRMDETLQTELLEGRLNHYPYDNAAQLIHKMQHYSTLWAEEHRGRKKASPFKALFYGVLTFFKSYLFKKGWLYGYEGLLISISNANGVFYKYIKLYEADRSHSL

SEQ ID NO: 463 - protein, 255 aa, Pedosphaera parvula
MTPVSVVVNTLNEEANLPGCLESLRWADEVVVVDMHSIDRTAEIATAFGCRVFQHERTGYVEPARNFAIAQAKNSWVLVVDADERVSPGLATWIKDHLGSISAVAFRIPRRNFYSDRWITCCGWFPDEQLRLFQRDYVRYSDRIHRAPTVEGSVITLPLHGEAFFAHYGFNTLEARVEKDNKYSSITAQSMFQEGRRIGAFGLLTRTVWAFVTAYLFQGGIRFGTLGVSLAWERAFATFLKYAKLWELQQKHKSS

SEQ ID NO: 464 - protein, 256 aa, Geminocystis sp.
MDLNTITPLILTYNEEPNIDRTLHKLTWAKEVIVIDSFSTDKTIEILKSYSNVKVFFRKFESFAKQCNYGLSLIKNTWVLSLDGDYILSDDLINKLTILNVNSEINGYLIPLSYCIFGKPLKKTILPPRICLYKKNTAHYRDDGHAHKVIIEGKVSYLKSYIYHDDRKSLSRWLWAQDRYMVLEVEKILNTPFYELSLSDRIRKQIILAPFIVFIYCLFLKGGIFDGWGGWYYAFQRMFAEILLSLRLIENKYFNS

SEQ ID NO: 465 - protein, 253 aa, Unknown
  Description of Unknown: Bacteroidetes bacterium sequence
MSKIKLSITIITFNEERNIARCLDSVKDIADEIVVVDSFSSDRTEEICKRYNVRFIRNAFVGHIEQKNFALDQVSFKHVLSLDADEALSPELLRSIEVLKENWNDEAYSISRLTNYCGKWVRHGSWYPDRKVRLFIKGKGKWAGENPHDAYIPDENSIIRKLKGDLLHYSYYSTEGHIAQVNKFTSVGAQSAFKAGQKANSFMLLYKPFYKFIRDYFFKLGFMDGYAGFVIARISAHATFLKYVKLIELQKKK

SEQ ID NO: 466 - protein, 245 aa, Unknown
  Description of Unknown: Flavobacterium kingsejongi sequence
MTKLSVIIPTYNEDSYIEDALKSVAFADQIIVVDSFSTDTTKAKALAAGCTVLERKFDNFSSQKNYAIAAATGDWVLFIDADERVTEKLKFEIQQTINAPKHAGYKIKFPHFYMNRFLYHKVDKVVRLVKNDGIVFQGDVHEKLLVKGSIGQLQNFMIHYTYKGLFHFLQKKDSYAWFQANTAFQKRKKVTFFHLAFKPFYRFFSSYILKRGFLDGVPGLAVAAVNAYGVFSRYAKLLLLQKGLK

SEQ ID NO: 467 - protein, 262 aa, Vibrio sp.
MTQLSQPNRATIAAVIITKNEEDSLKDCLESLTWVDEIVIVDSGSTDKTEAIAVQYTDKFLINADWPGFGKQKQLAQSYTECDWILAVDADERIDETLKSNILDMLENAPDNTVFNLNELTWVFGRFLKHSGWYYRHVRLYPNKLTTYNDNLVHESVVIPDGCKVAELDGDILHYSYKNLNHYLVKSAGYGKAWADQRQAKGKKASLSQGVVHALACFMKMYVLKRGFLDGKQGFLIALLSAHSTFIKYADLWARDNDPHYK

SEQ ID NO: 468 - protein, 297 aa, Bordetella genomosp.
MTRVPVSVIVMTKNEERNIEKCLRALADFDEVFVVDSHSTDRTVELATGLGAHVVQFQWNKRYPKKKQWCLDNLPFTHDVVLYVDADEVMSPELAREINACLPRFAQGAGGAFVGFNYVFCGKQLNYGHRVYKLILLSRTRSRFLDYNDLDVANMWEVEGHYQPQVTGPVFLLKGRMAHHDHDGLYHYFDKHNKYSDWEANLRVKGLLNDPREANVGMRSLMKRIFAAMPFKAVAAFVHCYILRLGFLDGKAGLDYAVARSMYYWQIGIKSRELRAAMATASPAATAEADALRGGTH

SEQ ID NO: 469 - protein, 301 aa, Unknown
  Description of Unknown: cyanobacterium PCC 7702 sequence
MSLSKIPVSVLVPAKNEEANLPDCLASLHSADEIFVVDSQSTDKSVEIALTYGAKVVQFYFNGHWPKKKNWSLENLPFQNEWVLIVDCDERISPQLWEEIAQAIQNPEYNGYYLNRRVFFLGKWIRHGGKYPDWNLRLFKHKKGRYENLKTEDIPNTGDNEVHEHVVLEGKVGYLKNDIIHQDFRDLYHWLERHNRYSNWEARVYLNLLTNQDDGGTIGANLFGDAVQRKRFFKKIWVRLPFKPFLRFVLFYIIQGGFLDGRAGYIYARLLSQYEYQIGVKLYELRQCGGKLNPKSTLSVS

SEQ ID NO: 470 - protein, 247 aa, Arcobacter thereius
MNISVVIIAKNSEKTIEKTLKSLVDFNDVVVYDNGSTDNTIKHSKEFENVNLVEGEFKGFGWTKNKAISYAKNDWILILDSDEVVDSKLLNTLQNKKLEDDTVYLLNFNAYYKEKQVKYCGWSGQKIKRMFNKKVTKINDNMVHEDIIIEGLKLEVLEGNVEHYSYSSISDFLQKTDKYSSIFANDYKNKKKSTPLKAFFRATYFFIKNYIFRRGFLDGYIGLLVCVSGANGVFYKYLKLYEENHDL

SEQ ID NO: 471 - protein, 251 aa, Anaeromusa acidaminophila
MQPRLAILILTYNEEKNIGSCMDSAAFADEIVVVDSGSADQTTAIAAEKGGNVVVHPMTEGFAGQRNFALTQTQAEWVLFLDADERLAPEVAAEVRRIMERGDAFAYEILRKNIVFGQPVFHGGHAPDWSLRFYPRAAIRWEGIVHEAAKVTLPVKRLQACMFHHTYQEWERYFFKFNQYTTLLAKKMRDEGKKVSFFDLLLRPLAGFFKFYILKAGWRDGRMGLVLALLHFFYTMTKYLKVYYNAPEERK

SEQ ID NO: 472 - protein, 245 aa, Unknown
  Description of Unknown: Flavobacterium aciduliphilum sequence
MQTITVIIPTYNEENYIEDCLHAVSFAHQIIIIDSFSADNTLTLAKKFDCQIIQRAFDNFSNQKNEAIKQATGDWILFVDADERVTEKLKHEIFETLKNPKYDAYKLRFPHFYMNRFLYHTENKVVRLVKNDSVYFEGDVHEKLIHKGEAGILKNFMIHYTYKGLFHYIKKKDSYAWFQAKMSKEKNKSARYFHLVFKPFYRFFHTYIIRKGFLDGVPGLAVATIDAYGVFSRYVKMILLDKNLK

SEQ ID NO: 473 - protein, 268 aa, Unknown
  Description of Unknown: Enterobacterales sequence
MFKLSVCLLTCNSARLLRDVLPPLLKIADDFVVLDSGSTDETLDICREYDLHVHYHPYAMHGAQMNHATSLAAHDWVLCMDSDEILDEQTVNFILQLKAGEEPGADQAWRLPRYWYVLGEQTRTIYPVSSPDFPVRLYNRRTARFNNRAVDDQVEGYSASTKIPGHVRHDTFYSLHEVFSKLNSYTTRLVKYQKVRPSIGRGIISAIGAFFKWYLFSGAWRNGKVGAVTGLYATLYSFLKYFKAWYAHNGHNDEKNAVAEEKKNTRTV

SEQ ID NO: 474 - protein, 246 aa, Unknown
  Description of Unknown: candidate division KSB1 bacterium sequence
MRKPSLSVIIITHNEEKNIAACLKSVCWVDEIILVDSNSKDQTVAIAQQFGAKVFQKNFASYGHQKQYALEQATGEWILSLDADERITPELQAEILEKIAQSDEVVGYEIPFKNFVFGKWVKYAGLFPDYHLRLFRRDAGCFTPSTIHEGIEVNGKVQKCQNPILHFSYPTIASYVEKMNRYTEILARQGYSFRFSHLVFSPLSKFFRLYLARQGFRDGLPGLIYCILAAFYNFAKDAKAWEQTRV

SEQ ID NO: 475 - protein, 253 aa, Phorcysia thermohydrogeniphila
MKLSVGILTFNSEKRIGEVLNSIKDVADEIVILDSGSEDRTLEIAERFGARVFYRKFDNFVNQKNHLLSLCRGDWVLFLDDDEIVSEELAAQISKIKKENPPVDGYYVSRLTNYLGRWIKHAWYPDWQLRLAKREKCRWVGDWVHERLLVNGKTGYLKGDLLHYSYPSVSFHLKKIDLYTSLYAEGAFKKGKKFSLLKLLLSPAGAFLRRYLLKRGFLDGFEGFVLSVMASHYTFLKYLKLWELEKNEKARRS

SEQ ID NO: 476 - protein, 253 aa, Formosa sp.
MIKISGVIITFNEERNVEDCILSLNNVVDEIVVVDSFSTDTTKAICEKYDVKFIEQQFLGYIEQKNFALQQASYDYIVSLDGDEALSPELQKSILNLKSTWAFDGYYCNRYNNFCGQWIKHSDWYPNKKLRVFDRRQGQWTGLNPHDHVELHNKSSKTGHLKGDILHKTYQTYSEFNQKTEYFSTIAAQAYYDLGKTAPIWRIIFNPLWAFFKAYVLRLGFLDGFNGLIICYQTGNITFLKYAKLRELYNSKD

SEQ ID NO: 477 - protein, 257 aa, Unknown
  Description of Unknown: Candidatus Levybacteria bacterium GW2011_GWB1_37_8 sequence
MIKISGIVITKNAENLIAGCLDSLSFCSEIVVVDNVSSDRTRDIAEKMGAKVIEYSSDDFADMRNMGMKKAMGEWLLYVDADERVTSALREEIIKSTNNPTNKNVGFRIKRKNFYFGSAKQNEWPYVERLERLFKKDSLKEWYGQLHESPNVKGEIGELDGYLFHYTHRDLSSMVKKTIEWSKIEAELRYKNGHPKMTWWRFPRVMVTAFLDSYIRQGGWKVGTVGLIESMYQSFSIFVTYARLWEMQEKLKMKNEK

SEQ ID NO: 478 - protein, 265 aa, Klebsiella michiganensis
MLKLSVCLLTCNSSRLLREVLPPLLRVADEFIVVDSGSTDATLQICQQFGLSVHHHPYTAHGTQMNYATSLARHDWVLCVDSDEILDDEVVAAILALKAGDEPDPACAWRLPRYWFVLGEEVRTIYPVSSPDFPVRLFNRSVARFNDRPVDDQVVGFTHSARLPGFVRHDTFYSLHEVFSKLNSYTTRLVKHQKIRPSLARGAISAIGAFFKWYLFSGAWRKGKVGVVTGLYATFYSFLKYFKAWYAHQDKPESAADKHTDSRMI

SEQ ID NO: 479 - protein, 256 aa, Unknown
  Description of Unknown: Flavobacterium soli sequence
MELSPNKNISVLIITLNEEAHMYELLSDLDFADEVIVVDSYSTDKTKEICLSFPNVKFLEHKFENYTSQRNFAIDQAKHNWVLFIDADERLTPDLKKEIIQTINSDTDVSAFLFYRKFFFKRKVLHFSGWQTDRIFRLFKKDKSRYTYKRLVHEKLDVEGKIGFLKHKLIHYSYSDYQSYKNKMVTYGRLKAREKFLSGFKPTLVYEYGHPIYNFLYQYLIRLGILDGKKGIIICYLNALSVKVRYQELNKLYNKK

SEQ ID NO: 480 - protein, 250 aa, Unknown
  Description of Unknown: Zetaproteobacteria bacterium sequence
MPVSAVVITLNEQAHIAECLRSLCWADERLVVDSGSTDETCAIARSLGARVIHHPWEGFGAQKQFATEQARFDWVLNVDADERVSPALARSIGEAMQSPTQPAAYRCNFRHRMLGCWLRHGEAWPDPHVRFYDRRRAHWVPRAIHEYVLVDGPIGRLDGCIEHCTAESIAELFAKINRYTDVQARLLVEQRRRIGLLQILGNPAWRFLRNYLLRLGVLDGVPGLVHATQAALTSFLKYAKAYEMARRERS

SEQ ID NO: 481 - protein, 254 aa, Nonlabens sp.
MLKYKISAIVPCFNEAHNIVEVLKTVEFCDEVILVDSNSTDNTVELAQPYIDKLLVREYIHSASQKNWAIPQAKNEWILLVDSDERVTPALKEEIITLFENIDNQPHVGYWIGRLNFFMGKQVRYSGWRNDKVIRFFKKSKCRYADKHVHSEIVADGTVGFLKNKLTHYKYVGMDAHIKKLQRYASHQAKDYDEKTGKITGFHIIIKPLWSFTKHYFIQLGFLDGFVGLTIAYLRGYMVFMRYVKLWLLRRGID

SEQ ID NO: 482 - protein, 314 aa, Scytonema hofmannii
MSSKIPVSVLIPAKNEQANLPACLTSVQRADEVFVVDSQSSDKSVEISQDYGANVVQFHFNGRWPKKKNWSLENIPFRNEWVLIVDCDERIPDELWGEIAQAIQNPEFNGYYLNRKVYFLGTWIRHGGKYPDWNLRLFKHKNGRYENLNTEDIPNTGDNEVHEHVILDGKIGYLKHDMIHEDFRDLFHWIERHNRYSNWEARVYHNLLTGKDDNGTIGASLFGDAVQRKRFLKKVWVRLPFKPLLRFVLFYIIQRGFLDGRAGYIYGRLLSQYEYQIGVKLYELRQHNGRLNTSSQPIVQSPSLPKEIGQTVTQ

SEQ ID NO: 483 - protein, 252 aa, Unknown
  Description of Unknown: Elusimicrobia bacterium sequence
MSKLSVIIITYNEEENIKHCLESVKWSDEIVIVDSFSNDKTVEIAREYTSQVFQNKWTNFSQQKNLALEKASSEWVLNIDADERVTPELKKEILAVLNSQFQSFDGYYIPRRNHYLGRWIRHCGWYPDYKLRLFRRRKGRFNERMVHESVVVEGRKGHLKSCLNHYSYKNLSDHLSKIDKFTSLAAEEMFTNGKRARVFDLLLRPLVKFVKMYLIKRGYLDGIYGFIVSIIGSFYVFTKYLKLWELSKREIH

SEQ ID NO: 484 - protein, 351 aa, Paenibacillus sp.
MKLSICMIVKNEEKHIAECLNSIPDNCEVIVIDTGSTDNTVEIAKSFPKVKLFQVPWEQNFASVRNISLSHATGTHILVLDADERLSTNAYERIKQYVKKYPGIPAAVLIENIDEGDSTIHRMVRLFPKQNKFSFRGVVHEQLFEHDVPAKFLLSDIIIHHYGYQKENYENQKYEFYLELYKQVIKKQPRNGYIWYQIGKLHAVVDNYEPACEAFLNACEYMEAPSLSHASMILHFAKLLHAAHLNEDAIVLLENHKGMYADYPDIYFQLGILNMEIGNLAEIRSCFESALELGETTKYTTTSGVGSYLAAYNLGVYYEVTGDMVLAKKYYLLAAPNSNLAAKRLELMVKR

SEQ ID NO: 485 - protein, 264 aa, Unknown
  Description of Unknown: Flavobacterium gillisiae sequence
MTINRSRDEISSNKTFLSALIITYNEEHNIKNVLNDLDFADEIIVVDSFSTDKTVAIAADHKNVKVVQHPFENYPSQRNYAISLATHSWILFLDADERLTAELKEEIIETIHDKNSFSAYYCCRTFMFKNIKLHFSGWQTDKIIRLFKKEKAQYDLGKIVHEKLTVTGKIGKLKNELIHYSFRSYNEYRQKMSVYGKLKAIEELNKGTKPTFFHFYVRPVYQFLYQYVIRMGILDGKKGIVICYLNAYSVYVRFQELKRLRLND

SEQ ID NO: 486 - protein, 254 aa, Bdellovibrio sp.
MIKISVAIITFNEEDNILRCLNSVAPIADEIVVVDSFSTDRTPQICQEFGVKFVQNHFKGHIEQKNFALDQCQYDHVLSLDADEALSSELTQSIDSVKKNWRGPGYSFNRLTNYVGHWVRHCGWYPDTKLRLVEKKRASWVGVNPHDILKLQQGSEQFIAGDLLHYSYKSITAHINQTNRFTTIAAKEAHARGVRSSQFKIASRPVLKFLRDYIWKRGFLDGRYGLIICTINALSAFLKYSKIKELEAQKSIEA

SEQ ID NO: 487 - protein, 250 aa, Unknown
  Description of Unknown: Chryseobacterium camelliae sequence
MMKISGLIITYNEEKNIKEVLECFDFCNEIIVVDSFSTDKTVEIAGRFPNVKIIQHQFEDFTKQRNIAVDAAQNDWVLFLDGDERITPKLKKEIIREMNASKPKDAYYFYRKFFFEGKPIHYSGTQSDKNFRLFRKSRARYISGKKVHETLEVSGSVGTLKHKLLHYSVTDYESYRQKMIHYGMLKGKELALKGKRFNMVIQYAKTIFRFFKAYILRLGILDGKAGYQLCYLQSLSVFETYESLRKEQNN

SEQ ID NO: 488 - protein, 326 aa, Unknown
  Description of Unknown: uncultured bacterium sequence
MKLKLSVVISAYNEEEKIDKCLSSVKWADEIVVMDNSSTDRTREVARKYTDKVYSQPNDPFKIDLQKNTGFEKATGDFILSLDADELVSDELKIEITDLLEKVSLKDGYFIPRKNIIFGRIFEYAGWYPDHQLRLFRKGKGRFKTENVHEGIKVDGETEYLKEHLVHHNYENISQFIHKNMIIYAKNQANALIRENYALKPGDLIKTPSKEFLSRFFARKGYQDGIHGLFLSLLMAASHLVMLAYVWEEQGFKEASSKRTLEEAESELKALNKELKFWFLSIKMDDIKNPLGKLSLKLKNKSSTFFELSIKLNNLRGFRKVLDKLK

SEQ ID NO: 489 - protein, 256 aa, Unknown
  Description of Unknown: Pectobacterium aquaticum sequence
MNKNLSILIITKNESELIEECLQSVSWADEVIVVDSGSTDSTVEIAHRYGAKVYQHNDWPGYGKQRQRAQSYASGDYIFFIDADERITPELRQSIESTLLKSNLDDKVVYSCPRRNLFLGRFMKHSGWYPDRVLRLYANKHYQYNGNSVHESLDCGDASVQYLSGDLKHLTCRDFSVFQEKQLRYAITWARERHEKGISCRYSEIFTHSIFSFLKTWLFRAGFLDGKQGLLLALVNAQYTFNKYTELWSLSNKNNK

SEQ ID NO: 490 - protein, 320 aa, Pseudomonas psychrophila
MTDLSRHKEKIGLSTIILTFNEELHLERALRSVADFSKEVFVIDSFSTDRTLDIARAHGATVLQNKFVNQAKQFQWALDNAQISGNWILRLDADEIIESDLAIEIAEKIPDLPSDVVGINLKRKHIFMGRWVKHGGRYPLVMLRIWRKGYGRMENRWMDEHIVIFGGKSVTFEGGFADHNLNNLTFFTDKHNKYATREAIEILNQRMNFFPRDHSVTKESTSLQTAAKFFIKEHIYNHIPFTVSAPLYFLWRYIFQLGFLDGRSGLVYHFLQGYWYRFLVGSKVLELERALSHLNDKDMISEELSLLTGYTLKPTPDQPK

SEQ ID NO: 491 - protein, 256 aa, Unknown
  Description of Unknown: Flavobacterium denitrificans sequence
MILPQKQFLTALVITYNEEQNIKPVLDDLAFADEIIVVDSFSSDKTFEIASSFKNVKIVQRIFDNFASQRNYALSLASHSWILFLDADERLTPELQKEISFIIHQSNSASAYFVRRNFMFEDKKLRFSGWQTDKIIRLFKKENAFYNHEKIVHEKLIVTGKTSKLKNRLIHYSYSNFEDYKQKMIFYGQLKAKEEFLKNTKPNFFHFYIRPAYQFLNQYLIRFGFLDGKKGVIICYLNALSVAARFQELKKIHSGN

SEQ ID NO: 492 - protein, 260 aa, Vibrio crassostreae
MITGVVITLNESRNVVECIQSLQKVCSEVIVVDSNSTDRTVELAEAEGARVISQDYLGDGIQKNVGLDYANNDWILSLDADERLTDEMVSAIKGLDLSTTKNDAFAFRRRNYIGSRWIKQCGWYPDFCIRLYDKSKTRFAAVKQHAAVQAKNPERINADIIHYSFENLGQLFAKPGRNFSGRAAKIMYQKGKRANSFSPFTHGLNAFIRKYIFQKGFLGGVDGMTVALSSAVNSYLKYAKLLEFQRDPKVLEKEDFDKVW

SEQ ID NO: 493 - protein, 255 aa, Unknown
  Description of Unknown: Candidatus Aenigmarchaeota archaeon sequence
MTISICIISFNEEQNIRRCLESATWADEIIVVDSMSQDKTVEIVREYTDNVYQKAWPGYVEQKNFALSKAKGEWILSVDADEEITESLRNEILDEIKKDGAKDGYRIPRRSFYQGRWINHSGYYPDRQLRLFRRKRGHWTGGRVHERVDVQGSIGELKGDLLHYPYKGIISGQLQTVNSFSSLMAEDMYERGKRYHTSLLLLRPTFKFFEVYLLKLGFLDGVAGFIIAVTSAYAMFVRYVKLRELWNGLGNKSAL

SEQ ID NO: 494 - protein, 247 aa, Campylobacter sputorum
MIKASVYVICQDEEKHIERMLKSVADFDEIIVVDSGSKDKTLEIAAKFTDKIYHHDWQGEGLQKNYAFSLCKNEWVLNLDADEEITAELKTEIENFMKQSEYDGLDIKFHEYSLGRICSPFVRKNTHIRFFKKSCGEYRNLGVHAQISINGKVTKSKHSIHHFSDKFIKELVMKNNNYSSLRAQRDFEKGKKPNFLKLIFIFPLVFFKSYILRRSFFDGKKGFITSMINAFYAFLKEAKLYELNLKK

SEQ ID NO: 495 - protein, 286 aa, Pedobacter sp.
MNKNFSFIILTYNEEIHLSRLLNSIKGLQAPTYILDSGSTDTTVKIAENFKAEVKVNKFENHPKQWDYALKNFHIQTPWTIGLDADQIVTPELFELLAKFEAENHQDINGIYFNRKNFFQGSWIRYGGYYPIYLLKMFRTGIGFSDLNENMDHRFIVPGKTVIWKNGHLLEENLKENDLNFWFDKHERYSDLIAQEEIERMKKLRVQSLKPNLLGSPDERKAWLKHLWWKLPLGIRPYLYYYFRMLFQLGILDNKTGRRFHYLQALWFRKLVDRKIMKLKRELSRV

SEQ ID NO: 496 - protein, 250 aa, Unknown
  Description of Unknown: Candidatus Levybacteria bacterium GW2011_GWB1_36_18 sequence
MISAVVLTKNEENNIVDCLESISFCDEIIIVDDNSNDRTLELLSNFKVKLYKRSLNDNFSIQRNFGLEKATGDWVLFIDADERVTPLLKKEILYKTEANGEVSGFYFRRKDYFIGKPLNHGETASIKLLRLVKKRKGIWQGRVHEVINVLGKTESMENPIIHYPHKTLSEFLSEISSYSTLRAKELFESGKKTNFLSIILYPKAKFLLNFFIKKGFMDGIYGFVFAILMSFHSFLVRAKLWLLWQKKYIS

SEQ ID NO: 497 - protein, 253 aa, Polaribacter tangerinus
MTKISAIIPTLNEEIHIADAIKSVGFADEIIVIDSFSTDKTLEIAKKYNVKIIKRKFDDFSSQKNFAISQANYPWIYLLDADERVTTEVEKEILEAVKSPNDFVGFYVRRTFYFCGKKVNYSGFQRDKVVRLFLKEHCKYVGVVHETIKTSGYLGFFKSKIEHYSYRNYDHYISKLNHYASIRAKELHGKGKKVNAYHVLIKPPARFVIHYFIRLGFLDGFTGFLVAKTQAYGVLTRYIKLWLLNKKYSKNAE

SEQ ID NO: 498 - protein, 239 aa, Halarsenatibacter silvermanii
MSLGALVLTYNEEDMIESCLESIKWVDEIVIVDSFSDDSTISICRKYTDKIFQKEMNNFSSQRNFGINKITAEWILIVDADERIPKELKQEISTVISSDPEKKVFKFPRKNFFMGKWMKHCGWYPDYTVRLFYNISEHRYSGQVHETLSFKGEAGKLKTPLIHKTYKDINDFVDKINYYTDLAKENSSCPNLFVLFIRPILEFIKRYLFQLGFLSGKEGLILSMLLSYYSFLKYAKRCE

SEQ ID NO: 499 - protein, 269 aa, Unknown
  Description of Unknown: Deltaproteobacteria bacterium 13_1_40CM_4_54_4 sequence
MSVPGSTVGPRPTVSAIVVCFNEEQNIGDCLESLSWCDEIVVVDSFSTDRTVEICRQYTDRIIRRPWAGYRDQKAFAHSQATKDWVLLVDSDERVTPKLRDEIRQTLGHETSECAGFAVPRLVFYLGRWWWRGGWYPDYDVRLFKRDRATWGGSDPHEKILVDGKVRHLQHPLHHFSYRNIEDHVQRIDRFTSISSRELRKEGKHWHLADALFRPAFRFFHSYVLKRGFMEGFAGFYVAVTAAIYVFLKYAKLWELELEEKDDIDRKRS

SEQ ID NO: 500 - protein, 252 aa, Capnocytophaga stomatis
MKISVVINTYNAEKHLQTVLETVKDFDEIVICDMYSTDRTIEIAGKYNCKIIYHERFTYVEPARNFAIHQAENEWVLVIDADETVPPKLKEYLYDIIKTPNLGGVYIPFKNFFINKWMRSAYPDFKLRFFRKEGAYWPNEIHSTVKVKGDVIKIPRGRTDLASDHLANDSVSTILRKTDTYSDAEIERKKNKKITTFGLIFSPFFWFIKYYFIKKGFLDGKKGFIFACLKAQSKLVILAKVYEYQEQNKVTK

SEQ ID NO: 501 - protein, 254 aa, Unknown
  Description of Unknown: Candidatus Omnitrophica bacterium sequence
MIDLSVVVITRNEEKNIEDCLASVAGWAGEILIVDDLSTDKTLDLASKFTERIISRKMDLEGRHRNYAYSQAKNLWVLSLDADERATPELKNEIEEVLKNGTEFNGFTIPRKNYIGNYWVKHGGWYPSPQLKLFRKDKFRYEETGVHPRAFMDDPCGHLKSDIVHFSYKNFEDFFHKLNNQTSREAQKWFKQDKPMRLGRFIWRAIDRFMRTYLGKRGYKDGFIGFVVAFNAGLYQFLSYLKYCELTRERGKAK

SEQ ID NO: 502 - protein, 258 aa, Arenibacter algicola
MPDLREKISALIITYNEIGYIKQCIDSTSFADEIIVVDSYSTDGTFEYLKNHPKVKVIQNPFENFTTQKSFALKQANHDWILFLDADEVVPISLKEEIKTKTNSNSEVVAYWFYRKFMFQDKPLHFSGWQTDKNYRLFRKSKAKFSDQKIVHETLVVEGESGILSERLIHYCYKNYDHYKAKMTKYGKLKALEEFQKGKKWHIMPQVLRPAWKFFYHYIIRLGFLDGKKGVTICYLNALGVWTRYIELRKLNNQEKSS

SEQ ID NO: 503 - protein, 251 aa, Unknown
  Description of Unknown: Marinilabiliales bacterium sequence
MAELSVVIITRDEEKNIARCIKSVASLASEVVVVDSHSQDNTQQICLSLGARVITHDFEGFGKQKQFADAQAKYEWILSLDADEELSTELRDSIGNIISNPQADAYSMNRLTNFCGKWIKHGGWYPDKKVRLYKKSIAKWNDYPVHELLNVNKNAAVMHLRGNLLHYSINTINHHIKQINRYSEIAAGNLVEKGRRTTCFHLALKPVFRFVKIYFLKAGFLDGYFGFVIARNSAFSVYLRYAKAKALKKKR

SEQ ID NO: 504 - protein, 299 aa, Synechococcus sp.
MNIVAIVLTFNSEASIAQVIESCQELVARILVVDSYSSDRSLDIVRSYRCELVQHEFKNYSKQRNWAQDYANLAPEDWVLHLDSDEVISPELAASIRQLKASDSEPDVDGYLIRRLSYFLGKPIRYGNINPSWHLRLFRAKCGQCEERLYDQHYIVPGATRKLAGTMLDLQLTSLETWTASHNRWSTAEAAEVNRRISQAKEEAQTLPATLRGDIRMKKRWLKNNIWYKSPPLLRPFLFFFYSYFLRLGFLDGRAGLIFHVLQSFWFRFLVDAKLVELHMQQDRQDPLESTSQPQQESA

SEQ ID NO: 505 - protein, 308 aa, Unknown
  Description of Unknown: Cyanobacteria bacterium J069 sequence
MTQPLAKIPVSVLIPAKDEELNLPACLKSLAPADEIFVVDSQSGDRTAAIAQEYGAKVVQFHFTGHWPKKKNWALDHLPFRNEWVLIVDCDERIPPALWDEIAQAIQNPAINGYYLNRRVYFLGKWIRHGGKYPDWNLRLFRHAKGRYENLHTDTAPNTGDNEVHEHVVLEGAVGYLATDMLHIDYRDLYHWLERHNRYSNWEARVYYNLLKGMQPDGTIGDRTSGWWSNAVQRKRFLKLLWVRLPFRPTLRFILFYILRLGFLDGRAGYTYARLLSQYEYQIGVKLYELQQLDGRLNPQLDLDDGTR

SEQ ID NO: 506 - protein, 257 aa, Unknown
  Description of Unknown: Candidatus Erwinia haradaeae sequence
MQQTQKLSVVIITHNSEEVLDKCLASVNWADEIILLDFKSSDKTLDIAVKYGAIVYHSNIWYGYGKQRQIAQNYANYEMILMIDSDERVTPELQKSINRILQKPPENIVYSIARRNLFLGKAMRYGGWYPDRVIRLYPSFCIYNDNLVHESLDVPKIPIRSLYGDLLHVTSRDFCDFQFKQCTYAKAWARQHYQQGKHYGIIKIIYHSFWSFIRTLLIRRSFLDGTQGWLLAIVIFQYTFNKYTALWALNYISRDKN

SEQ ID NO: 507 - protein, 237 aa, Arcobacter nitrofigilis
MNTSINKLSIVIITKNEEKFIGDAIKSSLFADEVLILDSGSNDTTCKIASELGAKVFEEEWRGFGAQKNRAVELASYDWVFVLDSDERITEELKKEIIKTLENPSANGYFVARLNNFFGKDIKTCGLYPDYSIRLFNKKFGKFNEVPVHESVQLETKARYLKNHMIHLAYENIDEFISKQNRYSTLNHKKKSILKAIINPYWTFFKLYILKQGFKDGWHGFVISKLYAQYTFWKYIK

SEQ ID NO: 508 - protein, 319 aa, Leptolyngbya sp.
MATTPKVPISVLIPAKNEEQNLPACLASLERAAEIFVVDSHSSDRSVDIATAAGAKVVQFEFNGHWPKKKNWALDNLPFSHEWVLIVDCDERIPPDLWDEIAVAIQQTDFDGYYLNRRVFFLGTWIRHGGKYPDWNLRLFRHRAGRYENLQTADIPNTGDNEVHEHVMVEGAVGYLKHDMLHEDFRDLYHWLARHNRYSNWEAQVYYNLLTGMGDGGTIGANLFGDAVQRKRFLKKIWVRLPFKPLLRFVLFYVLRLGFLDGRAGYIYGRLLSQYEYQIGVKLFELRQFGGQLNVTPQGSPAQPQPAVQPAVVPVESAP

SEQ ID NO: 509 - protein, 222 aa, Unknown
  Description of Unknown: Candidatus Rokubacteria bacterium sequence
MTARLTVAVITWNEEARLRRCLESVAWADEIVVVDAASTDKTATIAREFTDHVFVHPWEGFARQKNRAVERATGDWVLSLDADEEVGDELRESIRRVLASDAGPNGYTVARRNIFWGRFIRHGRLYPDWQLRLFRRGAGRFVDRDVHESVEVTGTVTRLDGALVHESYRDVADFLERTNRYTSLAADEWVRSGRPIRARELCLRPLARFCSMYVLHAGFLDG

SEQ ID NO: 510 - protein, 255 aa, Unknown
  Description of Unknown: Betaproteobacteria bacterium sequence
MPATLSVIVITHNERDNILGCLQSVAFADEWVVVDSSSTDGTREIAQGFGARVVNTTDWPGFGPQKNRALAEATGRWVLSIDADERVDDELAAQIRAAIARDADGPMGYEVSRLSRFCGQWMRHGDWYPDRVLRLFRRERGRFSNDLVHERLIVDGATARLSGHLLHDSMPTLDDALDKLNRYSAGRARDRVRAGRRGGLAPALGHGLWAFVRCYLIKRGFLDGRLGLVLALYQAEGTYYRYLKMWLQEPAAVSE

SEQ ID NO: 511 - protein, 249 aa, Unknown
  Description of Unknown: Nitrospirae bacterium HCH-1 sequence
MKGVSVVIVTKNEEDRIEAALQSAAAASEIVVVDAMSEDRTVEICKAYTDKVYIRQWQGFAAQKQTASDLAAGPWIFILDSDERFTPELAEEISSTLKDTALDGFYVPRKNFFLGRWIKYGGWRPDYTLRLFKKECGRLEPREVHEKVVVNGRTGYLKNPVEHYTYRSVAEFLAKLDNYSTLSAKDKGARRIGIASLTVRPIATFIKMYFLRLGFLDGVHGFILAVLYGYYTFVKYTKLWEVNQGGKGL

SEQ ID NO: 512 - protein, 253 aa, Unknown
  Description of Unknown: Microgenomates group bacterium GW2011_GWA2_37_6 sequence
MNISAVLIVKDEEKNIVDCLDSLSFVDEIVVVDDNSTDRTIELAERLAKEKAIKIFKRELDNDFSAQRSFGVEKTTNDWVLFVDADERVTKELATEINESLTPNTEYGGFLIPRIDFMWGKQLKHGETGNIKLLRLFDKQKGSLKGKVHEIWETKNKVGVLSSPIKHYPHPTVGDFLQEINFYSDLRSRELFEKGEKSNLFSIIIYTKAKFLQNYFLKRGFLDGTPGFIHAILMSLHSFLVRGKLWLLWQKYQ

SEQ ID NO: 513 - protein, 257 aa, Beggiatoa sp.
MQLSIIIITKNAATHIEACLTSVAWCDEIIVVDCGSTDNTVALCRPFTNKVYITDDWPGFGPQKNRALAKATGKWVLSIDADERITPALQQEIKQAITQTSVTAFRIPRQSRYCGRWIKHSGWTPDYVIRLFRRDCGRFSDDLVHEKVQVLQRGGDIGTLKSPLLHYSFNSLEEVLEKVNSYSTANAQMAYAKGKKSSLKKAIFHGLWAFVRTYVLRAGFLDGRVGFMLAVSNAEGTYYRYLKLMYLQENMRIKNEK

SEQ ID NO: 514 - protein, 269 aa, Unknown
  Description of Unknown: Candidatus Omnitrophica bacterium sequence
MRKAISVVILTKNEEERIADCIKSVLSWADEVIVVDDESADRTPEIAKNLGAKVLFRKMDIEGKHRNWAYTQAKNEWVFSLDADERLTPELKKEIIEVLSSSPSHSAYTVPRKNFIGNYWIRWGGLYPAPQIKLFRKDKFKWEEVEVHPKAFLEGSCGHLKNPLIHYTYRNWGDFLNKVNKQTTLEAIKWYKLSLVNPKKAHYKMNLIHVLWRMLDRFIRTFLVKKGYRDGFVGFMVAYFSSLYQIVSYAKYKELIKHHKTPPNETKQV

SEQ ID NO: 515 - protein, 271 aa, Unknown
  Description of Unknown: Desulfobacteraceae bacterium sequence
MIQGTTLSASIITYNEENNIEDCLNSVTDFVDEIIVLDSFSTDKTESICRNNPKVKFSQHPFDGHIQQKNRALEMCSSEWILSIDADERVSPELRQSIIRFLSGNPKPKIAGVKFPRLTYHMHRYIRHGGWYPNRRYRLVRKGMAYWGGENPHDRIILKGKGKTIKGDLIHYTAKDLSDQVTTINNFSSIAALVRYNKGKKYRLWRLLLKPVSKFIETYLYRRGFLDGTQGFIIAVSSSYASFIKEAKQYEMDVLGSDKPSNLSRLYRKER

SEQ ID NO: 516 - protein, 261 aa, Vibrio sp.
MNVSKPTLAVALIVKNEAQHLQACLETVHQWVDEIVVLDSGSSDNTEEIARRYTDKFFVNSQWPGFGPQRRLAQSYVESDYVLWLDADERVTKELKDSIQQAVAANKPNTLYQFARLSWVFGRYIRHCGWYPDRVLRLYPTQLTQYNEALVHEKVEVADGMKVENLAGDAIHYTYNDIHHYLVKSAGYAKAWAEQREKRGKKSSISQGILHAFGCFLKMYVLKAGFLDGKQGFLLSLLSAHSTFVKYSDLWVRTSTKPPKG

SEQ ID NO: 517 - protein, 250 aa, Aureispira sp.
MPLTVIIPTYNEEEHIADLLKQVTWADEVIVVDSFSTDATVELVQQTTAKLVQRTYIGPADQKNWAIDQASHNWVLILDADERLTTPLMNELKEIVTQPVLEHAGYWIYRQNYFMGKKIKYCGLQRDKVIRLIQRDLCAYNNKQVHEEIESSGSIGFLNHKLEHHTYKNLAHFLAKNERYALWSAQDHLPNVKRVTSWHLFVKPVGRFFSQYILKRGFWDGQAGFIFCVIMAWGVFLRYAKIKELLEERR

SEQ ID NO: 518 - protein, 313 aa, Fischerella muscicola
MSSSKIPVSVLIPAKNEEANLPACLASVQSADEVFIVDSQSSDQSAEIAKSYGASVVQFHFNGRWPKKKNWSLENLNFRNEWVLIVDCDERITPELWEEIAQAIQNPEYNGYYLNRRVFFLGKWIRHGGKYPDWNLRLFKHKKGRYENLNTEDIPNTGDNEVHEHVILDGKVGYLKNDMIHEDFRDLFHWLERHNRYSNWEARVYYNLLTGNHDNGTIGAKLFGDAVQRKRFLKTIWVRLPFKPFLRFVLFYLIQRGFLDGRAGYIYGKLLSQYEYQIGVKLYELRHCGGKLNTKSTSVTTTAFPQKVRQTVV

SEQ ID NO: 519 - protein, 407 aa, Conexibacter sp.
MTAPPRPTITACLIVRDEERLLPRALRSVAFCDEVVVVDSGSTDRTVEIARAAGAVVVQRGWPGFAAQRNVAIDHAHGDWILEVDADEQITPALAREIRAFLDAHDPRHDIVALPMRHEYLGGWLEPAIKYPCYRYRLFRRGAYRHDERRTVHEGLWATTPAWAMRHDMEHELAPTLRAALADLRAYTRLEASQFTPSRTPRAVLVGVLARPLAKTAYRLLVDRAWRDGWRGVLKVALDAVADAGVWVLALRREAGHPDGSGAHFSLEPPPRGPLRLVGVATDAASTRAICAWLHEAADRGADTALLTPCPETVVVGHAPGDGPAVTAAGVRVRPLSSAGALALTRGLDAERQVRQVDALVVPARLTPLARRAVARVGHHAPVPVTTPVADALHTVRAHRTRGGAGA

SEQ ID NO: 520 - protein, 305 aa, Unknown
  Description of Unknown: Candidatus Aerophobetes bacterium sequence
MHSEVKVPISVIIPTRNEEMNMRQCLESVKWADEIFVVDSKSTDHTIEIANEYTDNVVMFHWNGKWPKKKNWALEKLSLSHEWVLFLDADEQVTPGLAGEIRQLVSNGTEFSGFLVKYDFYFLGKLLKHGVLLLKCVFFKHKLGRFEKIDIPEVTDCDVEIDEHPVIKGKVGKLKNKMIHHDFKDLHHFFHRHNIFSDWETGLRSCKTKRDKEKELKASLFGSQVERRRFLKELFFKLPGRPVIYFLYSYVIRGGFLDGKAGYIYNVLKAFYYFSVDIKLYEERLRLEKVGRQLHEKTRNAGDWI

SEQ ID NO: 521 - protein, 1063 aa, Unknown
  Description of Unknown: Candidatus Melainabacteria bacterium HGW-Melainabacteria-1 sequence
MFAFNLVERTENHIVALTIPANGKNCLPVPHASRQVFTASEAVSLSACLIVRNEAHCLARCLDSLVGVADEIILVDTGSTDQTVEIARQYTDKIFYHAWNDHFSEARNVALAQATGDWVLIIDADEVVPAETARLIPTYLNRPDFQNRPLVLNWRVCSDHHPDLYSRGLFPNHHGIRFAGRVHEIPVLPGQQLPTYHCQDLVLRHDSPGTQDVAKQMYYQSLMLRGLAEACDAAEINHLQKHLGLSHLAMKQWQVAWDMLSACYHGMQDLGIAPQDGFYGEVLRGLVLAGSKLGLPKTHGYALEMQRHYPLEPIAWPVRSGARHPWRKGAIALTMSVLAACQPASTLPHSTSPKPAEHQSMGANPNNLLLPRQTNGADFRIQAAYFCPSQSNKVFNCYASGGDPVIGESSLDANGKSCYIFDHCDIPCELTNTCSCEHTGACETPPPPNEEECIEEPGGEPCVILPPGGGGDDGETDDCEDAPLLLPEDIAPLMQDIQQIQPVQPQVLNRHEKLLEQMKALEAQLAAEGVQVSPPEPLILPAPLPPQGFQTQSTTQSGTLSKKAQKWLAKYEELQTEHAQHRAAIEQTMQGINAPLESLLQRITDTFEIDYTQPETEPNFSLEDYKSSLDIAIGNIQAWLAEENTYSQAAAAANYGNLVLLYHQLYRDILAGKQLAASQPLPESEPFAYFYEEVAQIQDQRALANFMARKLESLQARIQTKQQKLSAATEALIAEAESISQQLDAFELELTQLEADLAEGEGGFSTQAAADGPFVRDGASGTNGALAGYNFPAQGVGSRSTRTPSSRAQGVKQTSNSNVSRSVQQLQRAETAWRASISQRQMAQKNRNQAVKQVDVYRGKPNYNPDVLANLQARADAALADLNAALANEGAANAVRQQAKANAKNASSNVSKVESSCRDENCFKRKDYRGHQLKYDIKEGLDQDWRDRDFLNEDQALSTALDAAFKEIHDRTGLVRSQFKPTAWVRDQRTGKTHPTIFEGPGGANVNIDRPHVDKSWSPGKEWQSGPDAPHVGWQTSGKKTQIKGHIILRDLPYFRPLRGERD

SEQ ID NO: 522 - protein, 256 aa, Unknown
  Description of Unknown: Chryseobacterium hispanicum sequence
MKETTKLSLKISGLIITYNEEKNIGEVLKSFDFCDEIIIIDSFSTDKTLEIAKTFPNVKIIQNQFEDFTKQRNFALDAANNDWVLFLDGDERITPELREEIIVELNKADKKDAYYFYRKFYFAGKPINYSGTQTDKNFRLFKKSKARYIAEKKVHETLNVDGNIGELRNKLLHYSVTDYESYRKKMIHYGILKGQELAQKGKKYNVLTQYAKTGFRFFKSYVLRLGFLDGKDGFILNKLQALSVWETYESLKRENK

SEQ ID NO: 523 - protein, 255 aa, Bacteroides sp.
MAKQGISVVINTYNAEKFLPEVLESVKGFDEIVICNMESTDKTVEISESYGCKVVTFPKANHHSAEPARTFAIQSASCDWVLVIDADELVTKELKDYLYQRIQRPDCPAGIWIPRKNYFMGKFMHCHYPDYLLRFFRREGTVWPPYVHTFPIVEGKQERIDKRRMELAFIHLANDGVKDIIRKTNEYTENELEKKKDKHYGAMAFLYRPLFRFVKAYLLKGGIRDGKAGFIKACLEGYYQFIMLSKIAERKNSRK

SEQ ID NO: 524 - protein, 254 aa, Shewanella sp.
MKLPISVFIITKNEEKHIEKTLQSVASLDEVILVDSGSTDSTLDIAKRYGAKVYSHPWLGYAKQKQYAMSLCSHEWVLNLDGDEAINSSLIDALKAIMEHDKADSVRFWRNDIFIDKPLSSWTKKPNNHRFYKRSKSFFDDSRLVHESATVNGKEIFINETFDHFGYSTIAAITNKHNTYSSLKADEKFAKGKKFSNLKLITIIPLVFIKEYFFRRKIFSGKRGFILAVMKAYYAFSKEAKLYENYQTKQKTNL

SEQ ID NO: 525 - protein, 248 aa, Unknown
  Description of Unknown: Candidatus Parcubacteria bacterium sequence
MSLSIIILTKNEENTIVDSLESASFADEIIIVDDNSTDRIDEIIKKINNPKIKLTKHSLDHDFSAQRNFALKITKSDWILFLDADERISKELQKEIIEKIKDNNIDGYFIKRSDFLWGKKLRYGETGNIKLLRLGKRGSGIWKGKVHETWNIKGKTSELENDLTHLPHQTIKEFLSEINYYSDLRAKELFDKGVESNLLSIIIYTKGKFMVNYFLKLGFLDGIPGFVFAILMSFYSFMVRGKLYLLRH

SEQ ID NO: 526 - protein, 298 aa, Unknown
  Description of Unknown: Candidatus Woesebacteria bacterium GW2011_GWA1_37_8 sequence
MKLSVVLAVKNEEENIGACLDSVKQIADEMIVVDDGSSDKTVEIAKKHGAKVFSFVHKNNFHETKQFAIERAKGDWVLQLDADERVTKELADEIKEVVNFSDKENQSRVLSSSSTVHNTLSSKHLKLFLRHQKLIEQREGHLGKKTGEVVAFFITRRNFFLGRPLIHAGVYPDGVIRLIKNGKARLPAKSVHELMEIDGEVGWLFNDLEHHDSPTLKRYLDRMNRYTDLQAKEFETKKIPATNWNLFKYSFIVPSVNFLKLYFRHKGILDGRQGFLWSVFSSLHFPITYFKYYQSKLK

SEQ ID NO: 527 - protein, 252 aa, Unknown
  Description of Unknown: endosymbiont of Galathealinum brachiosum sequence
MKVKLSVVIICKNEESRIRQCLESITWVDEIIVIDSGSTDKTLDIVAEYTDKIFVNTNWSGFGLQKRLAVDKASNDWVLSLDCDEVVSEQLRDEILDCMSGLDEKTVYRINRLTHFCNKFIYYSGWQPDRVVRLFNKKYYTYNDKTVHESVDCKDAEKVDLEGKLFHYTFESLEEYIDKRNGYAKAWAESHYAKGRKVGLFEIIHHTLFAFIRHYIVRRGFLDGYQGFLISVIQMQYTFNKYNFLKFKNISK

SEQ ID NO: 528 - protein, 246 aa, Unknown
  Description of Unknown: Candidatus Woesebacteria bacterium GW2011_GWB1_38_5b sequence
MKNFLSVIVITKNEEENLSRCLSSVGGLADEVVVVDSGSTDKTLEIATRFGAKIYKRHFDNYSNQRNFAISKTTGEWVLSMDADEEISDGLALEIKQVVKSQGADGYLIPRINIIFGAEIKHSRWSPDKHIWLFRKSRGKFRNLIHEEVDVNGRVEELKGAKIHHSHKSVFEFVAMTNKYTDIEAREILKNGYNFSFMKLLYLPLRSFFGRFILKQGFRDGWRGFVLSYLRAVYQFIVWVKVWEKS

SEQ ID NO: 529 - protein, 259 aa, Geobacter sp.
MTLIERPRLSAFVITKNEGAKILECLGSLQWVDEVVVVDDYSTDDTVPKCSNFANVRVVHHPFASFRDQKSHAMSLTSNEWVLEIDADERVSNEMKSAVLALSQADFSEFDAFAFRRLTNFWGKWIRHGSFYPDYKVRLYNKRNGAWSDSTIHERFVPRGKIKRIAADIIHDQDLDLTAYFQRTTRYSELSALDYHSRGKRSKWHHYTLRPVYTFFYRYLFRLGCLDGVQGFVVSAMGAIGTFQKYMRLFELQKGRRRV

SEQ ID NO: 530 - protein, 249 aa, Unknown
  Description of Unknown: Flavobacterium frigidimaris sequence
MLIRSRKLSVIILTFNEESYIGDAIQSVAFADEIIVLDSHSTDLTAKIVLDLGAKIIFRKFDNYCNQRNHAIGSATGDWVLFLDADERVSDKLKNEILETINLNKSDAYRIWFPHFFMDRFLFHYTDKVTRLIKNDNIRFENEVHEKLVLKSKPPVLKNYMIHYTYKDLSHFISKKDKYAWFQAKISVKKGKNATLFLLFFKPLYRFFHTYFIKRVCLDGVPGLAAASIDAYGVFSRYAKMILLEKNLE

SEQ ID NO: 531 - protein, 268 aa, Mesorhizobium sp.
MQRTEKPPVSAFIICKNEVSMIGPCIESLDVCREIVIVDSGSTDGTIELIETYRDKGYPIRLFQRDWPGYAKQKQFALDQCTETWCLNLDCDERLDDALKLNLPELISTDQTVAAWELDFRLFLLGYGYTPDRVRLGHLVRLVRKGRVHYRLNQLVHEGVDVEGEIGTNNKGKILHARPISIEEHISKLNQYSGLKSTQLFNSGKNPRLFRLIFNPFIYFIRIFIFRRFYLCGWAGFIHAGTGAIYSFLTEAKLYQMHAKARGDKSQS

SEQ ID NO: 532 - protein, 248 aa, Unknown
  Description of Unknown: Chryseobacterium taeanense sequence
MKISGLIITYNEEKNIREVLECFDFCDEIIIVDSFSTDKTVEIAEQFPKVKIIQNTFEDFTKQRNLALDAATNDWVLFLDGDERITAALRKEIIEELQKPTQKDAYYFYRKFYFADKPINYSGTQTDKNFRLFRKSKARYIAGRKVHETLEVNGTIGELKNKLLHFSVSDYESYKKKMIHYGALKGQELAAKGKKYSLIIQYSKTAFKFFKAYILRLGILDGKEGYQLSYLQSLSVFETYESLKKEQK

SEQ ID NO: 533 - protein, 319 aa, Unknown
  Description of Unknown: filamentous cyanobacterium ESFC-1 sequence
MTVSPDRVPVSVLIPAKNEELNLAACLNSVAPAAEIFVVDSYSSDRTVEIAKENGAIVYQFDFQGEKERHEAALTAGKSSKLRKKKNWSLDELPFSNDWVLIVDCDERITPALWEEMAALIEQDECDGYYLNRRVYFLGKWIRHGGKYPDWNLRFFKHKQGRYENLNLDYIPNSGDNEVHEHVILQGPVGYLKNDMDHIDFRDIYQWLARHNRYSNWEAGFYNQLLDGKLNDGIEPNPFKAGPERTRFLRMVWARLWFKPLLRFTIFYILRLGFLDGQPGYVYARLLSQYEYQIWVKFYELRNFSGHLNTDPVLKSKNS

SEQ ID NO: 534 - protein, 315 aa, Oscillatoria acuminata
MASTASKIPISVLIPAKNEEANLPACLASLEPADEVFLVDSQSSDRSIEIAENWGAKVVQFHFKGGWPKKKNWSLENLPFRNEWVLIVDCDERIPLELWEEMAQAIQNPNCDGYYLNRKVFFLGKWIRFGGKYPDWNLRLFRHQKGRYENLNTEDVPNTGDNEVHEHVILDRPAAYLKADMIHEDFRDIYQWLERHNRYSNWEARVYYNLLSGKDDSGTIGANFFGDAVQRKRFLKTVWVRLPFKPLLRFIWFYIIKLGFLDGKAGYIYGRLLSQYEYQIGVKLFELRQFGGQLNQLSAKPTAESPTLPEIKESA

SEQ ID NO: 535 - protein, 321 aa, Leptolyngbya ohadii
MLPLTVLIPAKNEEANLPACLESVSRADEIFVVDSQSDDRTIEIAESYGAKVVQFHFNGRSPKKKNWSLDNLPFRHEWVLIVDCDERITPELWDEIEQAIQNPEYDGYYLNRRVFFLGKWIRHGGKYPDWNLRLFRHAKGRYETLNTEGIANTGDNEVHEHVILSGKVGYLKEDMLHIDFRDVYHWLARHNRYSNWEARVYYNLLNGMDDRGTIGANLLGDAVQRKRFLKKIWVRLPFKPLLRFVLFYILRLGFLDGRAGYIYARLLSQYEYQIGVKLYELQQFDGQLNRKASEAASHPAKDSSASITSSSGLSPNGGSYE

SEQ ID NO: 536 - protein, 262 aa, Unknown
  Description of Unknown: Candidatus Omnitrophica bacterium sequence
MDKLPVSVVILTKNEEENIANCINSVLGWADEIIVVDDESTDRTRDIAKDLGAKVFVRRMDIEGRQRNWAYQQAKNDWVLSLDADERVSKELKREIEKIVVKKNCEFTNFTVNLRNYIGNYWIRGGGWYPAPKVRLFLKDKCRYEEAEVHPRIISKGKCGRINADLLHYSYKGWEDFLNSLNKQTSLEALKWYKLSLKDPKKARYKMNVIHALWRMLDRFIRIFFVKKGYRDGFIGFIVAYFASLYQILSYAKYRNLTKSFE

SEQ ID NO: 537 - protein, 266 aa, Curvibacter sp.
MSKISVYIIAYNEAEKVAATIESARWADEVIVVDSWSTDGTPEIAAKLGAKVVQVEFKGFGDLRNQAIAACSHEWIFSIDADERCTPEVAQEVRAIADHPASLDVYRVPRRNYFMGRWIRHSGWYPNFRQPQLFRKGCMSYDLKPVHEGYILHSARAIGTLQNAIWQFPFKNMGEVLHKANRYSTLGAEKIRHKKISMGTALTHGLWSFVKHYIFKLGFLDGWAGFVIALGNFEGTFYRYVKALEIQKGSAWKAPVTPTAATPRQP

SEQ ID NO: 538 - protein, 290 aa, Pedobacter sp.
MQKDFSFIILTYNEEIHLPRLLNSIKGLNAPIFILDSGSTDRTLKIAKEFNAVVKSNSFENHPKQWDFALKNFEINTPWIIGLDADQIVSKELFQLLEKFKDEDHKGINGIYFNRKNYFQGKWIKYGGYYPFYLLKMFRAEVGYSDLNENMDHRFIVPGKTIIWKNGFLEEDNLKENDLQFWKSKHQKYSDLIAQEELDRQNKIRTQTLKPNLSGSPDERRAWFKQIWWTLPLGIRPYLYFSYRMLFKLGILDGTKGIYFHYLQGLWFRLLVDRKIKELKLKNNNTPTSI

SEQ ID NO: 539 - protein, 252 aa, Winogradskyella epiphytica
MLKLSGVIITFNEERNIENCLQSLVNVVDEIVVVDSFSTDNTKQICKKFNVKFIEQKFLGYIEQKNFALSQASYDHVVSLDGDEALSETLQKSIIELKSHWKFDGYYANRFNNFCGQWIKHSDWYPNKKLRIFDRRKAEWQGTNPHDHVQLHDSTLKTGHLKGDILHKTYQTYSEFNLKTEHFSTIAAKAYYDKGKKAPLFNIIFNPTWAFFKSYFLRLGFLDGFNGFVICVQTANITFLKYSKLRELYQEK

SEQ ID NO: 540 - protein, 285 aa, Pedobacter yonginense
MNKNFSFIILTYNEEIHLPRLLESIKNLKAPTFILDSGSTDQTLSIAAQYGAKTATNAFTNHPKQWDFALNHFDIRTPWIVGLDADQTVTPQLFQLLNDFNTDDYAEVSGIYFNRKNFFQGKWIRFGGYFPFYQLKMFRNGVGFSDLNENMDHRFVAPGKTIIWKNGYLLEENLKENDINFWIAKHQRYSDLVAEEELDRIKNIKAQSLKPSLLGNPDEQRAWLKRLWWKLPLGLRPYLYFSYRIIFKLGILDGKTGMKFHYLQGFWFRRLVDRKIKRLKTALKI

SEQ ID NO: 541 - protein, 228 aa, Unknown
  Description of Unknown: Candidatus Rokubacteria bacterium sequence
EIIVIDAESTDKTAQLAREFTDKVWVRPWPGFPVQKNFALEQATGDWILSLDADERVSPELRERVRRILMVDGPADGYSVPRKNLFWGAWVRHGGLYPDYQLRLFRHGAGRFVESAVHESVAVQGHVEALAEPLLHHSYRGLEDFVARSNRYSTLAAVELTREGHRPRWTDLTLRPFARFFSMYVTKMGFLDGWRGFVLAVLYANYVFLRMAKAWESRGAGREDAGAP

SEQ ID NO: 542 - protein, 313 aa, Unknown
  Description of Unknown: Blastopirellula sequence
MTEGVETTIRAASGARERELSPGNVTDERVLPISVVIATKNEACNIEECLESVLWADQVCLVDSQSTDGTVEIAESYNAEVHQFHYEGGWPKKRNWALEHVSIRNPWILILDADERVTEELRSEIETAIKNTEIDGYYIRWKFMFFNRWMKHSWSHGWMLRLFRHGKGGYEDLGMRGEGGWDAEVHENVVVEGQCKRLKSPLLHETRQDLEYWIRKQNEFSTWNAKRRLQQLSDHMLPLSYLWDGDPIHRRRWLKTLYIRLPFKPLLMFIYLYFVKCGFLDGVAGFYFCVLRAIHEFNIDAKVYEARRNTNGS

SEQ ID NO: 543 - protein, 256 aa, Unknown
  Description of Unknown: Flavobacterium sp. ASW18X sequence
MDRTEKITALLITLNEEKHIKEVLENLSFCDEIIVVDSFSTDNTTKIIANYPHVKLIQRAFKNYTDQKQFALDQATNNWVLFMDADERVTPKLKNEIEVTINLKSPAAAYYFLRTFMYKNKVLRFSGWQTDKNYRLFQKDKVKFVKDRIVHETLEVNGVSKTLKNKLIHYSFNSYSTYKDKMIKYGEMKAKEAFFNGKKARWYHSIFRPFWKFINHYILRFGFLDGKRGIVICYLNALGVHSRYKELKRLQKSNLK

SEQ ID NO: 544 - protein, 253 aa, Prevotella sp.
MNEKNKISVVINTYNAEQHLDRVLTAVKDFDEILICDMESTDHTLEIARKHHCRIVTFERKQYNIVEPAREYAIHEASNEWVLVVDADEVVTPALKNYLYTLVQQEHCPDGLFIPRKNYFMGRFMRCHYPDHILRFFRKDKTHWPAIIHCVPEVAGRVEKIPAKRKELAFEHLANDTIENIVYKTNQYTRNELERKQHKHYGTMAFFWRPFFRFFKTYILKGAILDGRPGFIKAVLEGYYQFIFLAKKYEQSI

SEQ ID NO: 545 - protein, 454 aa, Clostridium sp.
MIDQEGILVKIKINLSQCMIVKNEEKNIRKALNWGKNIVCEQIVVDTGSTDRTVEIAEEMGAKVFHFEWIDDFSAAKNFAIEQATGNWIAFLDADEYFSEEDTKKILPLLAQLEEERRKLKIPLMVRSSLANLDDEGRTSSIATQARLFSNVKSLRYDGRIHETLMIGGTKAPKAFEARDILTVYHTGYTDKVYKETKKMERNISILKKEVEKNKDNYEAWAYLGDSFLANKQMKEAEEAYNYVVENMSFEMFQERRDFVFCNLLKINYYRNKKDESVILDIYHKSVEFACLAPDAEYWVALWMLDWGKLQQGIEYMELALRRLEVYDRDGNLDMAGSLPNVYGRLFEACKSLNRAQEAVRYGTLYLRMEPYGESVLIEMIRLFKGGANGEEIATAILSFLSKLYDLSRSKDKLFLIRISRKLMFDELEKGVLNLLTQDEKEFLHENQSTILGM

SEQ ID NO: 546 - protein, 248 aa, Unknown
  Description of Unknown: Verrucomicrobia bacterium sequence
MSERSNTRVPLSVLVPVKNEAANLCDCLASVAFADEIVVVDSASTDGTQEIATAAGARVVQFVWNGKFPRKKNWALENIPWRHEWVLIIDADERITPELEREISLAIRHSDADGFYLNRRFWFLGGWINHCGYFPSWNLRLFRHRLGRYERIEIDDNVRSGDNEVHEHVLLNGRAEYLSVAMEHYAFPDVASFIEKHNRYSTWEAEAREQLYQGAGQNTLRATPFGTALERKRWLKKLSVGCSRGTSS

SEQ ID NO: 547 - protein, 380 aa, Unknown
  Description of Unknown: Acidobacteria bacterium sequence
MSRSRASSKFRQSRTTTSRSSTSRRCRKCRSAVAAARSRPQGRAPFRRVGRRSSDSSWAGRAGRAGGAGRAGRVRRRNHPAHLPIPPIPPILPIQPSGYTPRVPKLSVTVITKNEAAGIDDALASVAFADEIVVVDAFSTDETVRIAKRHTDRVIVRDWPGYIDQKNYAASIARYDWILSLDADERVTQELAGEIRSLMSGAPREMAYRIPRVTFHLGRWIRTTDWYPDYQLRLYDRRAAQWTGRYVHEAVTVRGEIGRLRGELQHYAYRDISDHLETIDRYTTYAARQMHEVGRKTSVLQIAGHPPLAFLRNYLAHGGIRDGVPGLIISVLNSYYVFLKFAKLWELQRTAPHSRATRSQQPVTSNQQPATSPRDVLPSR

SEQ ID NO: 548 - protein, 295 aa, Achromobacter sp.
MQKIPVSVVVMTKNEERNIAKCLKALAEFDEVFVIDSRSTDATCALAASLGAKVVDFQWNGKYPKKKQWCLEQLPFSHPVVLYVDADEEMTPALAREIRASLPRFEAGAGGAFVPFDYVFCGRKLRHGHRVYKLALLARDRSRFLDYDDLDVAHMWEVEGHYQPQVQGQTFALREPMVHNDHDSLFHYFDKHNRYSDWEASLRVKGLMNDPREANLGGRALLKRLFHALPFKAPISFLHSYVFRLGFLDGKAGFDYAVARAMYYWQIRIKTEEIRKARQACAEDGDDKVVAGAAK

SEQ ID NO: 549 - protein, 260 aa, Unknown
  Description of Unknown: Candidatus Enterovibrio escacola sequence
MKHSQQRASISAIVITKNEELILPECLASLDWVDEIIVVDSGSTDKTVMIAKNSGAKVYVTVEWFGFGKQKQLAQSYATKDWILAIDADEVVSLKLKNRLLSMLKNPPKNTLVEVNELTWVFGRFLRHSGWYYSHVRVYPRDFTQYDDALVHEKVIVPHNAKTIVIDAELLHYSYRDLTHYLVKSASYAKAWADTRQDKREKISIGQGIIHAIGCFLRMYVLKLGFLDGKQGFLIALLSAHSTFIKYAHLWVLNNDSRVH

SEQ ID NO: 550 - protein, 250 aa, Unknown
  Description of Unknown: Deltaproteobacteria bacterium CG_4_10_14_3_um_filter_60_8 sequence
MSLPISVILLTLNSSATLRPCLDSLRAFAEVVALDNGSTDDTLAILAAYDNVKVYQHPFIGFGALRNLAIGHATYDWILGVDSDEMVSSELCQEIASLALDPQVVYAVPRLNHYQNQPLRGWGWRPDRVIRLFCRRTTGYQDEQVHESVAIPRGVTIGQLKAYLLHYPFNNPGDIIDKMQRYSSLFAAQHRHTGKSATPAKAFSRLFTTFLTDYLLHGYIRDGYGGLLLSVGNAAGAFFKYCKLYEMNRP

SEQ ID NO: 551 - protein, 263 aa, Unknown
  Description of Unknown: Flavobacterium sp. LB-D12 sequence
MTNNHNTNISVLIITLNEENQMKSLLADLEFADEIVVVDSFSSDKTESICKSFQKVTFIQNKFENYSSQRNFAISQAKNDWILFLDADERLTPALKNEIITTVNTNKTYSAFMFYRTFMFEDKVLHFSGNQNDKIFRLFNKNNADYTKERLVHEKLKVNGKIGVLKNKLIHYSYSNFQAYKAKTIRYGKFKAQEKFIKKQKSSFLLRFLHPTYNFLFNYIVRLGFLDGKKGLIICYLNANSIHVRYQELEQLWKTEKKLSPKQ

SEQ ID NO: 552 - protein, 264 aa, Maribacter sp.
MMNNREKISALIITFNEIGYIEKCLESVSFADEIIVVDSFSTDGTYEYLLNHPKAKVIQNPFENFTAQKSFALKQATNDWVLFLDADEVVPAPLKREILETVSKESEIVAYWFYRQFMFQNEKLRFSGWQTDKNYRLFRKSKAKFSDRRIVHETLDVEGTSGILTEKLIHYCYKNYEDYKSKMLNYGRLKAIECFYRERKFNYAAMYLKTGWKFFNHYILRLGFLDGKKGYAICYLNALGVLERFRELKRLEQKNELAYYLVMP

SEQ ID NO: 553 - protein, 315 aa, Scytonema tolypothrichoides
MSFKLPVSVLIPAKNEQANLPACLASVQTADEVFVIDSQSTDKSVEIVQSYGANIVQFYYNGKWPKKKNWSLENLPFRNEWVLIVDCDERITPELWDEIAQAIQNPEYNGYYLNRRVFFLGTWIRHGGKYPDWNLRLFKHKKGRYENLETGDVANTGDNEVHEHVILDGKAGYLKNDMIHEDFRDLFHWIERHNRYSNWEAHVYRNLLTGKDDSNTIGANFFGNAVQRKRFLKKLWVRLPFKPFLRFVLFYIIQRGFLDGRAGYIYARLLSQYEYQIGIKLYELCQYDGRLNTTCTTTSKEPHLLVGVGESRPRR

SEQ ID NO: 554 - protein, 298 aa, Unknown
  Description of Unknown: Nostocaceae sequence
MFSIYILTYNEELDIASCIESAMLSDDVIVVDSCSSDRTVEIANRYPIRVVRHAFESHGRQRTWMLESLPPKHKWVYILEADERMTPELFAECEQAITTSEYIGYYVAERVMFMNQWIRHSTQYPRYQMRLFQHGKVWFTDYGHTEREVCEGATSFLKETYPHYTCSKGLSRWIEKHNRYSTDEAKETLYQLENGKVDWRDLLFGKSEVARRRALKDLSLRLPARPLLRFLYMYFLLGGCLDGRAGMAWCTLQAFYEYLILLKAWEMKYLPIPSLEPEIVPSSDSNQEAAKEELGSRD

SEQ ID NO: 555 - protein, 253 aa, Actinobacillus minor
MPTLSVAMIIKNEAQDLAACLDTVKGWVDEIVILDSGSTDETAQIAEQYDAKFYINADWQGFGKQRQLAQQYVTSDYVLWLDADERVTPELKHSILQAVKNDEQNTVYKIGRLSEVFGRQIRHSGWYPDYVVRLYPTTIARYNDSLVHEKVVFDSATKVEKLQGNLLHFTYKNITHYLTKSAHYGSEWATQRVKQGKKVSLFSAFSHALSSFVKMYLLKKGFLDGKQGLLLAVLSAQSVFNKYADLWVRGQGK

SEQ ID NO: 556 - protein, 272 aa, Unknown
  Description of Unknown: Candidatus Omnitrophica bacterium CG_4_10_14_0_8_um_filter_44_ 12 sequence
MAKIPLSVIILTKNEEGNINECLDSVKGWADEIIVIDDFSNDNTVAIAQGLADKVLIKKMEVEGTHRNWAHSQAKNSWILSLDADEKVTPELREEITSALPATGHACFSVPLRNFIGGYWVRYGGWYPAGKVRLFKKEKFRYEDVGVHPRAEVLGSCGHLKGDIIHKGYPDFEHFLASLNRQTTLEAQKWIITNRKMNGGWAAWRAIDRFFRRFIGKKGWKDGFIGFMVAFFDTLYQIMSYAKYRQMLLEKAENRKQRTENRERKTENEKQQ

SEQ ID NO: 557 - protein, 316 aa, Hydrocoleum sp.
MTSSKIPVSVLIPAKNEQQNLPACLESVARADEIFVVDSQSSDRSAEIVESYGANLVQFYFNGTWPKKKNWSLDNLQFRNDWVLIVDCDERIIPELWDEIAIAIQDPNYNGYYLNRRVFFLGKWIRHGGKYPDWNLRLFKHKEGRYENLKTEGVRNTGDNEVHEHVVLTGNVGYLKNDMLHEDFRDLFHWIERHNRYSNWEARVHYNLLTGQGDSGTIGASLFGDAVQRKRFLKKIWVRLPFKPFLRFILFYFIQLGFLDGKAGYIYGRLLSQYEYQIGVKLYELKDCGGQLNVTEKKAQTTNPQPVAQVDSASSS

SEQ ID NO: 558 - protein, 274 aa, Citrobacter freundii
MLDLTIAIPVKNEERNIKGCLECIGEQFVKKIVLIDSGSTDATLEIARSYGAEIIDFKWNGKYPKKRNWYLENHQPDTKWVLFLDADEYLTPAFKNSLRHAISSDDKEGFWLNYTIYFQNKILKGGYPLKKLALFRVGNIRYEKIDEESWSGLDMEIHEHPIVSGKTGQIKARIDHQDFRGIDHYIKKHDEYGTWEARRFLRLRNNNAIWNDLTWKQKMKYRLMNTPYLGPMFFIGSFFFMGGFRDGRRGFTFSLMKMSYFTQIYCKIREYKKN

SEQ ID NO: 559 - protein, 626 aa, Paenibacillus sp.
MTYTISLCMIVKNEEKVLEKCLNSVQSKVDEIIIVDTGSTDRTLEIAEKYQAKIYSFEWINDFAAARNYSLDQATSDYLLVLDADEYLEEQSDLKKDIAEFKDYYIMRIKNLLSNNRVLTHSSIRVFKNEKRLRYKNRLHEHLDIDQLENELSRGESDAIVQHTGYTDEVMEEKDKRNRNMPLMQIEVKENPTSYNLYNMAKLYMNIEEYDKAFEYFKKAFVGSENRMYQPELLTKMASCLDQLGFIEDGLKVLEDAVELYPEDTGIWNERGNLFKKAGYYRDAELAWLHCLAIGDNGITVNEGVGSYIAYFNLAVLYDMQGKLLQSYEMIVQSIQFNIAFVPSLNKYFEIVLKANIPLDDIYNNFNLLYNVASVEELQRLLDLLYTLRHPLLHQYIENKNIVAEKHVSAISYQYIKQYDLAQKYWGEVEEVAEENAIDLITLAFIKKDIELLIRAKSIINVSEKEYKIIKLLFDNQNTESQKLSANIKNILIDIFDKLIYLQEFDVLQTMANLLSETNSEFQYRFGKLLSEKGYSEAAIDVLIKAYNQNEGNIDINILLGDLCISSGYLEDAQLFYNKLIKLKPEYSSYERCYNIAEKMNDVPKMVEMQSIIKEKYPLSKWITTV

SEQ ID NO: 560 - protein, 276 aa, Unknown
  Description of Unknown: Flavobacterium saccharophilum sequence
MNKIPISVIVSVKNEALNLPSCLDKLKRFDQIIVVDSCSTDDTPIIAKAMGAEVLQFQWNGKFPKKRNWALQNADLHHEWILFLDADEFVSDEFVTEVGIKTQDPNYNGFTIRFENYFMGRKLKYGYGFQKSALFKKSKGAYEKIDEDLWSHLDMEVHEHPIIQGKVGVIKSKVIHKDFKNLEHYISKHNAYSTWEAQRYLQLKQTKNTLLSFNQKIKYSLINTGLLPAVYFFGAYFLKFGFLDGKEGFYLARFKSHYFFQIQTKIDSFKNNIELK

SEQ ID NO: 561 - protein, 406 aa, Unknown
  Description of Unknown: Candidatus Brocadia sp. BROELEC01 sequence
MFYNYMKQLSACLIVKNEALLLPYCLESITPVVDEIIVVDTGSTDETIKIAKKYCAQVYQFSWTEDFSAARNISLMHASGEWILYIDADEAIDSVNALKIREAIKRKDIMGITVRQCIPQQTNNIATAYYIEYCRVFRRHKDIRFVGKVHEQILPSIERLEGKVLRTDIVFNHWAYAITNEKKKARAERNLRYLLDELKNVQNDPFLYFNLGTTYCELGKKDAAILSLQQSLVLDNGNIKRELIGQVHLSLAKLYLELDNFAKAEYHARMVSSYDPVNPLSAYVLATVAVLNKQYKTAIFHLEKAIQITRGESGSCPSIELNLAQLYLELGSCRSASGDLLDAEKDLVRSLEYDSSRALPYVLLGNCRFLHGDINQAQKLYEHALAINPSLESASNGLALCRTHNK

SEQ ID NO: 562 - protein, 248 aa, Legionella sp.
MLSVIIITKNEEANLRRCLESICWADEIIIMDSGSTDKTLEIAKEFTDLVYSADWEGYGIQKQRALDKATGSWVLNIDADEVINDALKDSIRQAIATDNADAYRIPIRLHFYDKTLKFSWSPKNHIRLYKREGAAYTDKIVHEEILLPQSARIGKIKAAIEHHCIQDVSHALYKMNLYTTYSAKINIEKNKNPSLIKSILSSWWMFFRCYFIQGGFLEGKDGFLLAVLSAHGSFYRGVKVIYLDKELQ

SEQ ID NO: 563 - protein, 257 aa, Ilyobacter polytropus
MKLSVGIITFNEAKILPLTLKAASKVADEIVIVDSNSSDGTVEIARNLGAKVYDEEWKGFGPQKNSVIEKCNGEWILLIDADEELSEDLIKKINKIKNGIYDYQVYQINRCSICFGKELKYGGWSNQYATRLWKKGSVKVSDNLVHEDYITDCEIGKIKEKINHYSYITMKDYFDRFNRYTTLGAEEYYKRGKKSGILKIILNPMYKFFRMYFLRLGFLDGIEGFVIACTSSMYSMVKYFKLREIYRNGAYVENKNS

SEQ ID NO: 564 - protein, 247 aa, Unknown
  Description of Unknown: Candidatus Azambacteria bacterium GW2011_GWA1_44_9 sequence
MSLSIIMITRNCSEVLNETLESIEGLWKELLVSDQNSTDGTRDILEHYKASIIETESDNLGKRKQELVKKAKGDWILVLDSDERVSAELREEIKTKIHGSRLGGRDDKPEAYRIPYQNYVFGRAVYWGGERYSKVRLFRNGYGNVGKIPLHEEITVDGKIGEMKGVIHHHSYRTISQLFRKFTSYALIPARFKKKRVTFAKLFLYGPHMFWARFIEEKGYKDGLHGLVLAIAFGYMETLTYWMLLLY

SEQ ID NO: 565 - protein, 245 aa, Unknown
  Description of Unknown: Bacteroidetes bacterium sequence
MASLTVIIPTFNEEAYLEAALRSVQFADEIIVVDSFSTDDTPNIARIYATHFLQRKFDNFSDQKNYALEHATSDWVLFLDADERITYSLQIELKHAIETGKHGGYKLDFPHFYMNRFLYHHNNKVLRVVKRIGTHYTGLVHEKLHCEGSIGQLKNPVLHFTYRGLEHYIAKKESYAWIQAEQLHKKGKKTTLLLLFIKPTYRFFSSYFLKGGFRDGVPGMVVSAVNAYGVFTRYVKLILLDRATK

SEQ ID NO: 566 - protein, 283 aa, Unknown
  Description of Unknown: Acidobacteria bacterium sequence
MILDVVNPAKAPVSVLVLTRDEAANIGECLESLRWADEVFVVDSLSTDRTAEIARALQAKVHLHPFVGYADQRNWALQNLPFAHDWVLMLDADERIPKALADEISVAVSRQDTYSGFYLARRIFFMGTWLKHGGLYPTWLLRLFKRQRARVEERPVNEHVIVNGSVGYLAHPFDHADRRPLGDWVTKQNRYADLQTEEYLREKSRLGFTSSIRANLRGSQAERKRWIKLRIWNRLPLLFRPFLFFTCNYFLRGGFLDGRAGFIYHILWSFWIKFLIDVKVMER

SEQ ID NO: 567 - protein, 289 aa, Unknown
  Description of Unknown: Candidatus Protochlamydia naegleriophila sequence
MIRLPISVTILTKNSQKYLKEVLEALASFDEVLICDTGSEDNTLLIAQEFPNAVIYKRSFIGFGPTHNIASSLARNDWILSVDSDEVVTGELAKEIADLKLAAGHVYSFPRHNEYRGKWIKWCGWHPDRQIRLFNRAETRFTDAQVHESIIIEHLKHVHLQAPLRHYSYDKVADFLTKMQSYSTLFATQYQGRKHSSFGKALSHGSFSFFKSYILKRGFLGGQEGFEISFYNAATAFYKYLKLAEANRQLELEGLEKCGDGQTKKLAASKPLHQATPNQAPPSGEHKQK

SEQ ID NO: 568 - protein, 255 aa, Arcobacter lanthieri
MLIDNISVVVLTKNNENTIENTLNSLQDFSDVVIYDNGSIDNTIKIAKSFLNVNLVEGEFKGFGWTKNKAASYTKNDWVMIIDSDEVVNNNLLNCLRTQKLENNTVYRLNSNGYYKNTRVKYCGWTLTVKRVYNKKVTSFNDEDEVHEHILSDGLNENILSGNINHYSYSSISEFIIKADRYSTLFAQNNVGKKSSSPTKAFFNGLYSFIKTYIFKQGFRDGYIGLIISFSHMVTNFYKYIKLYELNLEEKKSKK

SEQ ID NO: 569 - protein, 254 aa, Unknown
  Description of Unknown: Flavobacterium sp. sequence
MEFTRTNKLSVLIITLNEEAHMHELLSDLDFADEVIVVDSYSKDRTKEISTSFGNVKFLEHTFENYTAQRNFAIDQAKNNWVLFIDADERLTPELKQEIIETVNSDTDVSAFLFYRKFFFKKKTLHFSGWQTDRIFRLFKKDKARYTYRRLVHEKLDVEGKVALFKNKLIHYSYSDYESYKGKMIAYGKLKAKEKLFIGFNPNFIHYYGHPLYTFLYQYLIRLGILDGKKGIIICYLNALSVKARYIELKKLKL

SEQ ID NO: 570 - protein, 258 aa, Simkania negevensis
MISATILTKNSEETLSTCLKALEGFNEVIVLDTGSTDLTLDIAQTFSNVKVFEAPFEGFGPLHNLAAEHATSDWILSLDSDEVLSDELSKEILALNLKPDCVYSFPFHNYFNGKHIRGCGWFPDRHIRLYNKTATQFSDDYVHEKILTKGLKEVKLTHAVKHYSYRSISDFLKKMENYSSLYAQQNRQKKSSSLLKALLKSSYTFFKSYFLQKGFLDGREGFIISNYNAQTTFYKYLKLEELNLSDATLSTLSPRRKR

SEQ ID NO: 571 - protein, 254 aa, Unknown
  Description of Unknown: Photobacterium leiognathi sequence
MILISVFIITKNEEKHIRKTLNSVKDMDEVIIVDSGSTDNTLSIAESFENVKIFHHKWQGYAKQKQYAMSLCKNEWVLNLDGDEELTPGIIEAFKKIINDNSADSVRFWRNDFFIGEGLSPLSKKPNNHRLYKKSKSFFDNSRFAHESATVDGKEIFINETFNHYGYPSISIRTDKNNTYSSLKAEEKHHKRKKHSTLKLVTIFPLTFIKEYFFQRKFFSGKRGFILSIIESYYAFLKEAKLYELYEKENKNEF

SEQ ID NO: 572 - protein, 249 aa, Unknown
  Description of Unknown: Candidatus Curtissbacteria bacterium GW2011_GWA1_40_47 sequence
MKISALILTKDEEEMIDDCLKQLSFADQIIVLDQNSRDKTVGIARKYTKDIFETKEEGFDKNRNTLAKMAKGDWLLYVDADERLNETLVKEIKTAIYEDKYAAYYFPRKNIILGKWLRHTGFWPDYVPRLFRGTNLVKWYGKVHESPQITGNFGYFKMPLSHFTAQSMSKMLNKSIKWAKIEAELSLKDKHPQVTILKVVKGMLFEFINRYFVKKGFLDGTVGLIESIYQAYHKAMVLTYLWELQTHDE

SEQ ID NO: 573 - protein, 247 aa, Arcicella aurantiaca
MQLSVVLITLNSEKTLTKVLEAVSWADEIVLVDSGSTDKTLEIAQQFKAKIVHRAFDGYGSQKNFATEQASHDWILSLDDDEILTPELQKEIQSLDLQNTNFQGFKIPRSLIFLGKLLKFSGEYKRNTLRLFNRKCGNWNAEYVHESVEVKGEIGTLKNQILHDSYRDLTDFFNKFNKYTSLGAKTLAERGKTTSTFKIISRFPTTFLKIYFLKGSFLDGYAGFMWALFTAITPVVKYAKLKEMVSK

SEQ ID NO: 574 - protein, 251 aa, Sulfurovum riftiae
MIDKISVTILTKNSEKYLKQCLDALKAFDEVLILDNGSNDKTLEIAAGYANVTRIKHPFIGFGPMKNLAAEKARNDWIFSVDSDEIASEALIAAIRELDPVQVNRVYTIDRLNHYNGKPIRCCGWYPDTVIRLFNRTYTCFNDAMVHESLVLKPDTQKTVLAGELKHYPFDDIGSLISKMQSYSTLYAQQSEKTSSPLKAFGRATFAFFRNYFLQKGFLCGYEGLVISVSNANGVFYKYMKLYEKQCGDQL

SEQ ID NO: 575 - protein, 528 aa, Selenomonas sp.
MKISVCYITKNEEKNLPSSLEGIKAIADEIIIVDTGSTDKTLAIARAYGAKAYSYAWQDDFSGPRNYAIEQAAGDWIIFLDADEILKHSNRQRLMDWLRDNGKQLVLMMWMKHIDMDTGQILMENMAPRIMRNHKELRYVGKIHEQLFFQGKTVSKVGYCPISAGWLLHTGYTQSRMKKKAERNLRMLLPELELDKPSQDVYMYLAEAYDGLEDWEHAVYYARKDIEQGRRSIIYASRSWMLLLRLYAKYPEYIQERLQVVLSAVKNFPELPVFHAELAECYVSYANFAGAYRSFERALHLCENYRHGLEPQLLTLEQMKQIEQRMRAVKKQIHYPEQWDLARQQEILELHKQNRIAISKVLPELIELIIRLQQERPTAKRDETLIRLISYLPVDYEAFWQYQLGLLDVMPINMTDTYLTMLVYVLRYGDAEQWHYYTEQSLRMTADCFYKTINLLLEQERWQIAWSLLEQIPADSDWIQAEYWYAAGVCLFYRHENLLALECFSRAKNAGMQNNEMDSYIKWAGDET

SEQ ID NO: 576 - protein, 254 aa, Anaerovibrio sp.
MSKLTILILAKNEEKNIEDCVKSALFADEVLVIDDFSTDNTVKIAEELGAKVIQHSLDGNWGQQKTFGINEAQGDWIFFLDADERITEVLQSEIIKAVSSGEKIAYYIARLNHFCGNVVKYSGWFPDYGIRLIPKEGSYVTGYVHEQVHYNCPEKYFPKSAYMLHYTYVSWEQYLRKLNNYTTLGAKKQYDAGKRAGILDIVFHTLFGVIKIFFIQRAFMDGMTGLFLTVGHGISVFMKYTKLYYLSKGIGEKS

SEQ ID NO: 577 - protein, 254 aa, Unknown
  Description of Unknown: Chryseobacterium sp. FH1 sequence
MSELLEKISGLIITFNEEKNIREVLECFDFCDEIIIVDSFSTDKTLEIANEFPNVKILQNKFEDFTKQRNLALDMAKNDWVLFLDGDERITPQLREEIIAELYKTDKKDAYYFYRKFFFEGNPINYSGTQTDKNFRLFRKSKASYIAEKKVHETLEVNGEIGELKNKLLHYSVANKDSYRKKMIHYGTLKGMELAQKGKKYSIMAQYSKTGFRFFKGYILRLGFLDGKFGYILNKLQAISVWETYESLKRENSR

SEQ ID NO: 578 - protein, 275 aa, Olivibacter sitiensis
MVSIIILTKNEEQDIDLCLKSIAWCDDIHVLDSGSVDKTIEIAEKYGAKIAFHPFESFGKQRNYALEHLNVKYDWVLFLDADERSTPAFRNALEVAISNAGGDTVGYYCCWKMILEGRWLKRCDNFPKWQFRLLKLGEANFIDFGHGQKEGSINGKLAYIKEPYLHYGFSKGWTFWIERHNRYSSQEAKARLYEKRPFKDIFNSNTSIRNPALKSWLSNLPGWPLLRFFQAYVLKLGFLEGRQGFVYCVNMAYYEFLIKIKMKEYKSNLQNHEIT

SEQ ID NO: 579 - protein, 252 aa, Unknown
  Description of Unknown: beta proteobacterium L13 sequence
MSEALSVVLITKNAETQLEKCLQSCAFADEIVVVDSGSTDRTLAIASAYKAKVIHQDWLGFGPQKQFAVAQASHDWVLCLDADEWLSDKLRNEIMQLLENPGAYAWRFARSNKFMGRFLKFGEGYPDYSLRLFHRQHARWSDDAVHEYVQTNGKVGTLAGDLMHESGEDIALYLSKQNRYTSLQAEALYQRGKQCGLAKLVFSPLTRFIKFYLVRQGFRDGLPGLVHISIGCFNSYIKYAKLIELHRLGKTR

SEQ ID NO: 580 - protein, 251 aa, Unknown
  Description of Unknown: Nitrospirae bacterium sequence
MSKLSVYVITYNDEPNMRACLESVAWADELIVVDSHSTDATEKISREFTDKVFQHEFKGFGQLRNEAVAHTTHDWVFSLDTDERATPEIRDEIRWTLERGPEADAYFVPRRNYFLGRWIRHCGWYPDYRQPQLFRKSRMRYREELVHEGFELEGRAGYLKAHILQYPFRDIDHYLTKMDRYSDLMARQMVEQGRRFRTHQLVTHPLFTFLKMYLGRAGFLDGMPGLILSGLYAYYTFVKYAKLWERCRASA

SEQ ID NO: 581 - protein, 245 aa, Unknown
  Description of Unknown: Candidatus Sulfopaludibacter sp. SbA3 sequence
MKITATIITLNEERNIARAIESLRCCDEILIVDSGSIDRTVELAEKLDVRVIEANWRGYAGQKNWAAEQATHEWILSLDADETLSEPLEAEILAMKKSGPRFDAYTMPRLARYLGRWILHSGWYPDRKVRLYDRRKARWVGDFVHESVIPDGRVGHLEGAILHFTCESLSEHVKTMDRYTTLAAQELAARKLTVPLSKMIIDPAWTFLKTYFIQRGFLDGVEGLIIAYMASYYTFLKYSKARIMS

SEQ ID NO: 582 - protein, 263 aa, Unknown
  Description of Unknown: candidate division Zixibacteria bacterium sequence
MNRISVVIITKNEEENLSRCLDSVRWADEIIVVDSKSTDRTLEIAEQYGAKIFRPEWRGFGPAKQEGVRRAGGDWILSIDADEVVAPELAQEIKAVTLTDDGIIGYYMPRRTQFLGRWINHCGWYPGWVLRLFRKDSGDFDDALVHEKVIVKGNTARLKHDLLHYSFPTIDVYLEKQWEYAELGAQQAFRGGRRSGALAVVVRPLASFVKHYVLKRGFLDGIEGFLISALAAYYVMVKYAKLRNLAQQSKPMALEETNTDADN

SEQ ID NO: 583 - protein, 261 aa, Cupriavidus plantarum
MKISAVLITKNEAHNIAECLASVSWCDRAIIVDSGSTDGTVEIARSLGADVYQTDTWPGFGPQKNLALSKVQTEWALSIDADERVTPELRDEILAAIESGNADAYEMPRLSRFCGRFIRHAGWYPDYLTRVFRVGRARFTDDLVHENVVADSPVARLRTPLLHYTYDDFSQVLRKIDQYSTLGAQQAFRRGKTATVAGALGHGFWAFLRTWIFRRGFLDGAQGLGVALMNGQASYYKYVKLWLLCQQARQQDDRSATPPRG

SEQ ID NO: 584 - protein, 250 aa, Thermodesulfovibrio yellowstonii
MKIPISIAIITKNEEKNIEDALESVKDFEEIVVVDAFSEDRTVEICKNYTDKIYKLEWKGFATQKQFAVEKTTLPWVFILDADERVTEALKMEITEKISNDDFDGYFIPRKNFFLGKWIKHSGWWPDYTLRLFRKDKGKMQIREVHEKVIVNGKVGYVKEPILHYTYQTFEDFIKKMQIYSSYGALELIKKNPSKCKIVLKIFFAPVFTFFKMFFIKLGFLDGLRGFILAFFYSFYSFLKYAKVWEKQWK

SEQ ID NO: 585 - protein, 250 aa, Unknown
  Description of Unknown: Flavobacterium beibuense sequence
MSTKITALAITYNEEENINRYVKSLSFADEIIIVDSYSTDATEKLANELNVKFIKNEFTDFSSQRNFAIEQASNDWILFFDLDEIVTPALETEIKQAVENKDGIVAYFVKRKFHFMGKHIRYGGWRTDKAVRVFNKKHCKYTGLVHEVISAKGRVCTLREKVDHYSYRSFDNYNNKLNLYSKLQAENLYGRKVRPNAYHFLFRPFYRFCWQYFYRLGILDGKEGFILAYIHSFSVFKRYIQLWMKYRKIN

SEQ ID NO: 586 - protein, 252 aa, Chitinivorax sp.
MPNKLSAILITKNAAHQLPACLSSLQFTDEIIVVDSGSTDNTVEIAIQHGAKVIHQTWLGFGKQKQLAVNHSSHDWVLCIDSDERITPTLRDSIQAILRSPLHMAYRMPRSNCFMGRFLKHGEGYPDWNIRLFNRQFAQWSDDVVHERVMHTGRVGTLAGDLLHESSEDITHYFDKQNRYTTLQAQTLFEHGKKSGVTQLLLSPIFRFVRFYLFKRGFLDGVPGLVHILIGCFNSFSKYAKLIELHRLHKRP

SEQ ID NO: 587 - protein, 249 aa, Desulfovibrio oxyclinae
MRVTGLVLTLNGERLLERCLRSLAFCDQVLVVDSESTDRTVEIAESCGARVLVNPWPGPVEQFRFAFANIETDWVVSLDQDEVITDELRGSIEAALADPGEHAGFYTSRSTWYFDRFMKHSGWYPDRLLRVFNKDRMALSASGAHYHFRPEGPTRNLDGDILHYSYRNFFDHLDKINYYAQKGAEDLRAKGRRGGVTPAITHGLGRFFKLYALKKGFLDGRAGFINACAGAFYAFQKYVRIEEKGDWDG

SEQ ID NO: 588 - protein, 851 aa, Thermotoga caldifontis
MIVKDEEHNIRRALDSIKDVVDEIVVVDTGSTDRTPQIVREYTDKLYFHPWKNDFSEARNNSLKYPTCEWVLILDADEEASEDFRKNIRSFLESLPPDVNTIYLPTLSYLDWDFKRSEIASTPRIFRNGTVYYQNIVHNQAIYKPKVVNANFLIYHYGYIWTRKLKKQKYERTGSLIRKHLQQCKNDQERLYYLVQLYKTEKTGGKPHEAASVGWEALQLIRKLTSIPAIGLEFLYLFSIDLLNAGLNELAEQLAKSALQAVPEYPDPYLSLIHASFKRKDWQALLKHYEDFRKAVEHASANVEKFGWTIMSFKDIPLADVLAMIAAIEIEDYERFNRIALERFEKDEDVREDMLQYLLNRSSGKDVEKALPGLKKFLEFARKKNLHLNAQPLYEKIVERRLPVKVEEIVLKQITPFSYYLLRRLETGEDMLLDFLCARQLEKLVRENGVGGFLFVYTVLPESEKKAFVERFLEDEDTLIRGIAKALHADHLLKESKFLEAIRSYRDSIQLVAELSRFVKPIVEDLKTRLDPTIESVYEELYRFYATQKEFMIDFKKYAGNEVSKLYLISDSDVALYVSAVHTDDAKKAVELLSKIKDPSKFPMYNYRLAKFYNEFDKEKAFVHHVKAVEENERLADIVFGRFFYSGLYPNLTMNFFDKNDPILWVGNVSEKFSTLGVIHPVRAWKKAKNGLIYAVPYPADESIKAYKDLEKEFGIKPSFRVTDSHLRKVLLETNWSNVEKTQELEDFARVFEDLGIELSQNAKRRIVLDGVETQLELKRLVSDAEEALIFHRFPNLSDENDPVWFYPAFRLLRSFAQIKKELSSLGYEIVDEFLFENGLRCVWVRRRTSR

SEQ ID NO: 589 - protein, 252 aa, Crenotalea thermophila
MQSISAIVITYNAAAHLRACLQSLLPVASDVLVVDSFSTDRTAEIAQTFPVRFVQHAWEGYGQQKNWAMEQVQHDYVLFIDADEVLSAELQQSILDARQQGLSGCYMLQRLNRYFNRWIYHGLEYPDHKIRLFDRRQATWSTDPVHETVVFHAEVQTHLLNGYLLHYTYQDMHTLWLKIDQYAQLGAKKLHQQGKKSSPWQWISHPFATFWKAYLLKSGWKEGTAGLLLAFLAAISVFLKYVRLWLKQHQLN

SEQ ID NO: 590 - protein, 253 aa, Unknown
  Description of Unknown: Deltaproteobacteria bacterium sequence
MEKLSVVVITHNEEDNIGRCLESVKWADEIIVVDSFSTDRTVQIAEKYTKKVFQKAWEGYGRHKNYALSKATNTWVLALDADERITRELADEIIGVLRAGDTQVIAYELPYKVFFGGKWVRHGGWYPEYHIRLFRKDKAAFKERAVHERVETSGPVGRLHHFVEHYTYRSVSDFCQRMDRYSTLSAEAYYKEGRRVGWFEALFRAWFTFGQMYILKRGFLDGGLGLQLAMLYSCYTFVKYAKLKELCQADKEK

SEQ ID NO: 591 - protein, 255 aa, Unknown
  Description of Unknown: Chryseobacterium sp. JAH sequence
MKLSVAIITFNEDRIIGKTLNAIHDLADEIIIVDSFSKDCTEEICAQFPNVKFITQRFLGFGKQKNFAIEQCQSEWILFLDSDEVLDDEAKKSIRKIISEDQPEFNVYDIEFNNIFLGETLKYGGWGNIKRERLFRKGFGKYSEDIVHEEFISSEKKGKLAGKINHYTYKDIYHHIEKSNKYTSMMAEKMYKNGKKSSVLKIIFKPLYQFIKSYFLRLGFLDGLVGYYAATTAAFYTFLKYKKLHEIHKFGHKEC

SEQ ID NO: 592 - protein, 271 aa, Leeuwenhoekiella sp.
MNKIPVTVLVPIKNEEINLRKSLPLLTDFDQILILDSQSTDESLSIAESYGAEIHQFHWNGKFPKKRNWALRNLEIKNDWVLFLDADEYVTPEFIEELKVAITKPDVQGYWIVFRNYFMGHQLKHGDQFKKLPLFRKGSGEYERIIEDSWSHLDMEVHEHPILEGVVGDLKAPILHNDYKGLEHYIARHNAYSSWEARRFIKLKESGFEGLNSRQRLKYKLIALGIMPFAYFWGNYILKAGFLDGMAGYYFSKYKANYFFQIQTKIKELTS

SEQ ID NO: 593 - protein, 283 aa, Leptospira sp.
MHIPLSVCIITFNEEDNLENCLSQLEFADEIILVDSGSTDKTLTIAKQYNAKISYRKFDNYIKQKNHAISLAKNDWILALDADEVISPALKEELHSLKVEDFESNSAFAIPRLTYYLKKWIRHSGWYPNYQVRLFHKKKGNFAGILVHETVEIKGNSKKLKNPLFHYSYKSISDHLAFIDRYSTLFAIEKFKSGKRSTIGKAILKSYYKFFWMYFIRCGFLDGSVGIAIAILGSYYNFLKYLKLYELGKDEKSISPLFVVVDSIHEVESNKATQENSDQVYIR

SEQ ID NO: 594 - protein, 261 aa, Unknown
  Description of Unknown: Chryseobacterium sp. HMWF028 sequence
MPLSLAVITYNEEENIVRLLSSLADTADEIIIVDSFSTDKTKEICAQYPQIKFFEKKFNGYGEQKNHALNLCTHEWVLFLDADEVPDEEMKRSIKKIISSGNMEFSVYKAKFNNHLGTHLIRHGGWGDVCRERFFRKKCARYSNDKVHEFLITDQKSGLLEGKLDHYTYKSIYHHVSKINKYSDMMAEKMLERGQKINRFKIIVSPIFEFIKVFIFKLGFLDGFPGFYIAKTMSYYTFLKYIKLREKIRLVKIEMEKDRVK

SEQ ID NO: 595 - protein, 257 aa, Capnocytophaga sp.
MSPISEKVSGLIITYNEEKNIAEALSCFDFCDEIIVVDSYSKDATVRIAESFPKVKVIQHKFEDFAKQRNLALAEATNDWVLFLDGDERITTELKAEIIQTLSCTDKKDAYYFRRLFFFAGKPIYYSGTQGDKNFRLFRKSKCHYVSERKVHETLAVEGSIGVLKNKLLHYSVSNYDSYRQKAVLYGKLRGEEMYAKGKHYSALKMYTKMCFAFFKTYILKLGVLDGKEGFLLSKVSALSVYENFKALKREEEKNGK

SEQ ID NO: 596 - protein, 246 aa, Unknown
  Description of Unknown: Epsilonproteobacteria bacterium SCGC AD-308-I21 sequence
MKITANIITLNEEKNIEEVIKSVRKVCDEVLVVDSRSSDRTCEIAESLGAKVVKQEYLGDGPQKAFGAPLAKYDWVLSIDADERLDANAIEAIKKLDLDSTIYDAFSFARKTFVGKSFIKLWYPDRVTRLYNKTTCGYTTAGGHARVDTKNVKDLDADMLHYSYDNYAQMVKTSHKFITRGAKIAHEQGKKASAFDPFLHGVGALFKALVLKGGVFHGVNGWNVAVISAFSSYMKYALMLEMQENE

SEQ ID NO: 597 - protein, 259 aa, Unknown
  Description of Unknown: Candidatus Woesebacteria bacterium GW2011_GWC1_38_13 sequence
MISVSIITLNEEKYLEKCLQSVKGIADEIVVVDSGSTDKTLDIAKKFSAKVYFRKFDNYANQKNYAVEKCTGDWILSMDGDEEIEDDLLKEVKSEILNPKSEINGYSIPRKNIIFGKFIRYTRWQPELDRHIWLWKKDLGKWMGDVHEEVVVEGRVGKLKHAKIHHQYETVRDFFEMMNRYSEIDASERVKNGRKYSHFRFLFDPIYNFLVRYFYRLGFLDGWRGFVLSYLMAVYHLIVWVKVGENKIRNSNIEIRNNN

SEQ ID NO: 598 - protein, 263 aa, Unknown
  Description of Unknown: Flavobacterium aquicola sequence
MTNSNAEKLSVLIITLNEEKHLKTLLSDLDFADEIVIIDSFSNDRTEIIAKSFPKVKFIQNKFENFSVQRNFAISQAKNDWILFLDADEVLTPELKQEIIETLQNNKTYSAYFFERIFMFESSVLKYSGNQTDKIFRLFDKKSARYDEKRLVHEKLIVDGKIGSLKNKLIHHSYSSYHDYKEKIIFYGKFKAQEKFIKKVKPSFILKLLHPSYNFLYNYFIRLGFLDGKKGIFICYLNAYCIVIRYRELKKLWKQDQDLISKT

SEQ ID NO: 599 - protein, 670 aa, Marinobacter sp.
MLSPRLSFHALLMIGLGGALLSSSILAGATLLLAIAGIALSVRKSLDKTGWDKPKELRLLHFAFWFFVLVSFLSWALEGFDYEGGKTFGTHARFILFWPLIVAMSYARIGARTTFVAIGLIAVSIIGVFLVTVAARQGTFEQVLNSRFGGGINPISFGNLALLGGMLTIVAALFFTRDNRRGVATLLFLAGTAAIVISMLSETRSNLVALPFLLAALVPLFGKRLRIAGLVAIPLLVTGAIVISDRMSHSLEGLLHDGGLDTGMEIRLEVWAQAWNMFRESPWTGAGLGGFTHRIESEVEAGNLPKHFIDCCTGHAHNDLLNVAATSGIPGILSWALLIFIPLAIFARHLFSRHIPTAHLATAGTMVCAGYFFFGLTEATFNRSLFVTFYLLAVASLASAMFTELSGSYVRNRARKVSATVITKNEEDHIADCLTSARLVADEIIVLDSGSTDRTVEIARGLADVVEVTDWPGFGVQKQRALEKATGEWVLSLDADERITPELAREINHHLSDPDADAYKLPWAVTIYGSRLDFGRSGRAPLRLFRRQGVSFSDALVHERILIPAGRKIKTLRGRLTHYTHRDFGHSLEKSAKYAWLGAMEKHRRGKKTRTMIYPTLRGLMTFVQVYFIRFGFLDGAVGYLTAVTYAQVTFNKYAGLWTLDRSQSDTFHE

SEQ ID NO: 600 - protein, 253 aa, Unknown
  Description of Unknown: Bacteroidetes bacterium sequence
MKISVVINTYNAECYLAEALDSVVDFDEVVICDMESTDSTREIAARYGCRVVTFPKGNHTIPEPARNFAIQSASHPYVLVIDADEVVPAALREYLYSLAGGDACPDGLWLARQNFFMRRFMHCYYPDYILRFFRREVADWPPTIHSMPQIDGRVEYMPRKRRDLALLHVVDETVAEQWVKMCRYTDNDAYRRREKRYGTGALFYRPLFRFFKIYFLKGAIRDGRAGLIKALMEASYQFMIVSKIIDGRERGEW

SEQ ID NO: 601 - protein, 266 aa, Enterobacter cancerogenus
MFKLTVCLLTYNSARLLHQVLPPLIRIADEIVVVDSGSHDETLFILEEYKISSIYHPYAMHGEQMNIAISQSRNDWVLCMDSDEILDEDTLEYIISLKSGEEPPADWGWSLSRYWYVLGERTRTIYPVSSPDYPLRLFNRRYVKFNNRPVDDKAVGAGQVTRIPGHVRHDTFYSLHEVFNKLNTYTSRVVKYQALKPSIARGIVSAIGAFFKWYLFSGAWRQGKIGVVTGLYATFYSFLKYFKAWHQYQDKRESASREHTDSHLIE

SEQ ID NO: 602 - protein, 266 aa, Enterobacter hormaechei
MFKITVCLLTFNSERTLHDVIPPLLKIADEFVVVDSGSTDATIYICQSYGLSPIFKKYSWHGEQMNHAVSHAHNDWVLCMDSDEILDQETVGAILKLKMGDEPEPDMAWRICRHWFVLGENVRTIYPVSSPDYPVRLFNRTQSRFNNRPVDDQVEGFLRSERIPGYVRHDTFYSLHELFNKLNGYTTRLVQYQTIRPSLGRGAISAIGAFFKWYLFSGAWRKGKVGVVTGFYATAYSFLKYFKAWYQDREKKESVAKEQSDSYLAE

SEQ ID NO: 603 - protein, 295 aa, Desulfobacca acetoxidans
MAKAPVSVIILTYNEEVNIRACLQSAKDLTDEIFIVDSFSTDQTLNIARAYTEKIYQNAWVHWADQRNWALDNLPLKTDWVLFLDADERLTPELCQEISETLAGKANPSVQGYYIKRNFYFLGRWLKHGGYKADYILRLIKKQQARILKRGAWEYATVQGELGYLNYPMRHEDARGLTYWIAKHNNYAIMESHELVRLDNKAGLTNEAAATNQRKIEHKFKIWLREKIWVRMPLFIRPLFYFFYRYIVQLGFLDGKEGLIYCFLHGLWYPFLVDAKYLELKKRNSHSGTSPCNNG

SEQ ID NO: 604 - protein, 292 aa, Unknown
  Description of Unknown: bacterium B17 sequence
MSTENTSVNHGKKAPLSVLIITYNEEVNIRESLESVVDWAGEVFVVDSFSSDQTVAICKEYEDKGVKVFQHEFENYSAQRNWALQELPWSNEWLFWIDADEIVTLELGRELMDLAVTDSFKKDFYYVKRRLIFLGKWIKHSSSYPLWLIRLFRIKDARFTRPINEQVVVPGDGGRLEHDLLHDDKKGIAGWLEKHNRYSSMEAEEYLKVLENSEGDQDFLNEKERPDVKRQKKLRFFIHLPFRPFFMFAYLYFWKLGFLDGKAGLIYCMLKAGNQRSISAKMQELKVARSKN

SEQ ID NO: 605 - protein, 253 aa, Unknown
  Description of Unknown: Chryseobacterium frigidisoli sequence
MNFTKVSGLMITFNEEKNINDVLKCFSFCDEIIIVDSFSKDKTVEIARQFPKVKIIENKFEDFTKQRNLALKNAKNDWILFLDGDERISPELENEIILELQKEDKKDAYYFYRKFFFAGKPVNFSGTQNDKNFRLFRKSKCHYVEDKKVHETLEVNGETGFLKHKLLHYSVEDYRSYKDKMIHYGKLKGEEIFIKGKRFSLLTQYLKTGFKFFKTYFLKLGFLDGKEGYQLSYLQSLSVFETYKSLKKVENKS

SEQ ID NO: 606 - protein, 249 aa, Arcobacter sp.
MNISAVVLAKNNENTIRRTLKSLKGFSDVVVYDNGSTDTTMNIAQEFSNVNLIQGEFKGFGWTKNHAASFAKNDWILIIDSDEVVDKELFETLQNKILDEKCVYKLNFKAFYKEIQVKYCGWNNQKIKRLYNKKCTQYNSNDVHEDIITDGFKIEELKGNVEHYSYHSISQFVIKADHYSTLFAQNNAGKKKSSPAKAYFNGFYSFIRTYIFKRGFLDGYVGLIIAFSHMVTNFYKYIKLYEANKELKK

SEQ ID NO: 607 - protein, 245 aa, Unknown
  Description of Unknown: unclassified Flavobacterium sequence
MKKLSVIILTYNEEFYIADAIKSVSFADEIIVLDSNSTDATQKIATDLGVKLFSRKFDNYCNQRNHAISFATGDWILFLDADERVTDKLQAEILKSIEWDEFDTYKIWFPHFFMNRFLFHYTDKVVRLMKNEKLVFENEVHEKLIIKSKPGVLKNYMVHYTYKGLFHFIGKKDKYAWFQAKMCANKGKKVTLFLLFFKPFYRFFHTYIVKRVYLDGVPGLAAAAIDAYGVFSRYAKMMLIEKDLE

SEQ ID NO: 608 - protein, 320 aa, Spirulina subsalsa
MTSKVDKIPVSVLIPAKNEERNLPACLESLTRADEVFMVDSQSGDRSVEIAESYGAQVFQFHFNGRWPKKKNWGLENLPFRNDWVLIVDCDERITPELWDEIAERIQDPDYDGYFLNRKVFFLGKWIRHGGKYPDWNMRLFRHKKGRYENLKTENIRNTGDNEVHEHVIIDGKTGYLKEDMLHIDFRDIYEWLARHNRYSNWEAQVYYNILTGKMDGDNIGANLFGDAVQRKRYLKKIWVRLPFKPFVRFILFYILRLGFLDGTPGYIYGRLLSQYEYQIGVKLYELRKFGGSLNVDVQHPPSNTPSNPPSVPQTVTEQQ

SEQ ID NO: 609 - protein, 253 aa, Emticicia sp.
MHLSVVILTFNSTRTIRQVLAAVAGWADEIVVVDSGSTDETLAIAQEFGCKIYHRKLDGFGKQKNFAVNQAKNDWVFVVDSDEVVTEALKKEIDAQLAQNTEYRGFLVPRILIFLDKKLKYGRESKLPTLRIFNRKFGNYNDKDVHEEVVLDGKTLTLKREMLHYSFSDIAEFFQKMNDYSSRSAAELYVKGKRTSILKVITKFPITFFVEYFIRLNFLNGYPGFVWAFTQAIYASLKYIKLRELQTASTLQS

SEQ ID NO: 610 - protein, 264 aa, Unknown
  Description of Unknown: Flavobacteriaceae bacterium MAR_2009_75 sequence
MPKERQKVSALIITYNEIGYIEKCIKSVEFADEIIVVDSYSTDGTFEFLKAHPKVKVIQHPFSNFTLQKSFTLKQATNDWVLFLDADEVVSEKLKAEIIKTVNSDTDISAFWFYRKFMFANKPLNFSGWQTDKNYRLFRKSKANFSDKKIVHETLDVIGKSGILKEKLTHYCYKSFEDYKSKMLKYGRLKAKEDFYRENRYNLLSLVFKPLWKFFNHYIIRLGILDGQKGVVICYLNALGDLERYRELKKLEKKNELAYYLVMP

SEQ ID NO: 611 - protein, 248 aa, Methylobacter tundripaludum
MLSVIIITKNEASHIGRCLESVAWADEIVVLDSGSEDDTVSICRQYTDKVYETDWPGFGIQKQHALDKANGDWILSVDADEVVTSELRAEIEKAIQQGNCKGYEIPRLSSYCGRQMRHGGWWPDYILRLFRRDCGRFTDSVVHENIIVQGQIGRLRSPLLHDAFVNLDEVLHKVDSYSSLGAEMLYQRGVRSSLGKAVLKGLWTFIRTYWIKAAFLDGRQGLMLSISNAEGAYYKYLKLLELQNRQPR

SEQ ID NO: 612 - protein, 266 aa, Lelliottia amnigena
MFKLTVCLLTCNSARLLREVLPPLLIVGDEIIVVDSGSTDNTLDICHEYGLTPHLHPYAMHGMQMNHAIGLASNDWVLCMDSDEILDAETIDFILALKAGEEPAVDNAWRITRYWHVLGQEVRTLYPVSSPDFPVRLFNRTQARFNHRPVDDKVEGRLHTVKMPGRVRHDTFYTLHEVFNKLNSYTSRLVKYQNVRPSIGRGIVSAIGAFFKWYLFSGAWRQGKVGVVTGLYATSYSFLKYFKAWYQHEDKKEPVAKEHTDSHLVE

SEQ ID NO: 613 - protein, 245 aa, Lacinutrix jangbogonensis
MSSITVIIPTYNEEAYIKQAIQSVGFASQIIVVDSNSVDNTAQIAEEMGCEVYLRPFDNFSNQKNHALQYATSEWILFVDADERIPYALQQELLAAIDSGKHAGYKLNFPHYYMNRFLYHHSDNVTRLVIRKKCHFEGSVHEKLIVDGTIGKLKNPVLHFTYKGLQHYISKKDSYAWFQAEQMLNKGKKATYFHLAFKPFYRFFSSYILRGGFRDGIPGLTVASVNAYGVFSRYVKLMLLKRGMR

SEQ ID NO: 614 - protein, 272 aa, Nissabacter sp.
MMELSICVLTYNSERLIREVLTPLLTLSDDIVIVDSGSSDNTLAICRELGCEPHHAPYETHGRQMNLAIQRARHPWVLCMDSDEIMDAQALCWLLQFKLVPNPDPHTAWRLCRHWFVLGQPVRTIYPVSSPDFPVRLFHRNVVRFNDQPVDDAAEGFSRTEIIPGSVRHDTFYSLHEVFTKANSYTTRLVKYKPITPSLWRGIASAIGALFKWYFFSGAWREGKVGVVTGSYAVLYSFLKYLKAWYASTETMTLADKLKQQWEKIRRIYPAP

SEQ ID NO: 615 - protein, 250 aa, Methylosarcina lacus
MLSVIVITKNEAAHIGRCLESVAWADEIIVLDSGSSDETVAICRRFTDKVFETDWPGFGIQKQRALDKAQGDWVLSIDADEVVGPELRQEIEQAIASAQLSGFEIPRLSDYCGRAIRHGGWWPDYVLRLFRRESGRFTDAVVHERVIVEGEIGRFKSPILHEAFVDLGEVLHKVNAYSTLGAEMLQRKGVRSSLSKAVLKALWTFIRTYCIKASILDGRQGFMLAVSNAEGAYYKYLKLWELQNRNLGPK

SEQ ID NO: 616 - protein, 255 aa, Unknown
  Description of Unknown: Flavobacterium beibuense sequence
MPQNNLSQKITALAITFNEEDNINRYVKSLSFADEIIVVDSFSTDATKELAEHLNVKFIQNEFKDFSSQRNFAIEQASNDWILFFDLDEIVTPSLENEIKQVVTSNDGSVAYFVKRKFHFMGKHIRFGGWRTDKAIRVFNKQHCKYTGLVHEVITAKGKVSTLKEKVDHYSYKSFDNYNGKLNLYSKLQAENLYSKKVRPNAYHFLFRPFYRFCWQYFYRLGILDGKEGFILAYIHSFSVFKRYLQLWMKYRKVD

SEQ ID NO: 617 - protein, 222 aa, Unknown
  Description of Unknown: Candidatus Collierbacteria bacterium GW2011_GWB1_44_197 sequence
MKLSVIILTYNVEDEIIPAIKSSQFADEIIAVDTGSTDGTLDICRKNGVKIVHTTTDSFSKWRNDGAKVAKGEWLLYLDSDERIPVKLAKEILATIQSPQHSAYTISRYEVFLGKHLNHWGDPRVLRFMKRSALKRWEGKLHEQPKIDGTIGDLRQQMVHLSHKNIDEKLPNTLLWSKTEAKMLYVLKAGSRLSIRCSASLSLTSGFGRCRENLLSKRPTIT

SEQ ID NO: 618 - protein, 254 aa, Sutterella sp.
MNNLAVLILTKNEEKNIAETIQSARQCTDEVILIDSGSTDRTVEIAEKAGARVVYRAWTNDFSAQRNFGLSATDATWVLYLDADEHLTPELASAIRRATEPGAQPAAYRMLRLCCAFGKTFRHGVIGPNWVTRLFPRTDVTWVNQVHEHPECSLQEKTLPGYMEHYTYADWSSWERKMSLYSTLWAENAYRQGRRTSLGGIFGHSAGSFFKMLILKLGFLDGALGTYLCFLNFSYTMMKYLKLHELQRTAADKK

SEQ ID NO: 619 - protein, 260 aa, Vibrio hepatarius
MSKATIGVLMIVKNESKHLAECLETVKDWVDEIVIVDSGSTDNTETIARQYTDKFYTHTDWQGFGKQRQVAQSYMTSDWVLPLDADERVTPELKSSIKKVLADNPKQTCYTLDRLTHALGKFIRHSGWYPDTITRLYRREETQYNDSLVHESVEIPKGMTKAHLSGDLLHYTFDSLSQYTGKTQLYMKSWADQREGKKRSGLTGAILHGFFRFFKMYIIKRGFLDGRHGLLLAILSANTTFTRYADLWIRDYVKQQDNKK

SEQ ID NO: 620 - protein, 286 aa, Pedobacter chitinilyticus
MKPAFSFIILTFNEEQHLPRLLNSIARLNAPIFILDSGSTDDTLKIAESFGAMVKFHPFENHPKQWDYALKNFEVQTPWVIGLDADQIVTPELLELLINFNDETYGNVEGIYFNRKNIFKGKWIKHGGYYPKYQLKMFRYGMGYSDLNENMDHRFIVTGNTTIWKKGHLLEENLKENEIRFWIDKHNRYSDLVANEEIERMENLRKQTIKPKLFGDPYQRTAYIKSIWWKLPRFLRPFIYFTYRMTFQLGFLDGRTGILFHFLQGFWFRLIVDVKIAEKLNQSKQK

SEQ ID NO: 621 - protein, 264 aa, Unknown
  Description of Unknown: Candidatus Curtissbacteria bacterium GW2011_GWA2_41_24 sequence
MSALSMLSVVVITKNEEKQIAKCLETCRFADEIIVVDDFSTDKTCQIARKCNAKVYLRRLDSIAKQADFGYSKAKGEWILAIAADERISFKLSQEILRAIKSKEYDGYNFYFQSFLFGKALGSTQTDGQVRLFKKNKGYITKERIHEKIRVKRGKIGQLKNPILHYSYPSVFGVVEKFNRYTNPESYLAYKRGERTNLFKISVAVPRVFFWRYLVAGEWRDGKRGFILSFLFGIYHLLWQLKLWEIQNKKGKHKFHSVHYIPKA

SEQ ID NO: 622 - protein, 249 aa, Orenia marismortui
MADLAALVLTYNEEGNIKECLESINWIEEIVVIDSYSSDNTIAIAKDYTDRVYQRKFDDFASQRNFALDKIEATWVLVVDADERVTLELKDEILNLLTSPQADAYKIPRKNYFLGSWIKYCGWYPDYTLRLFKAQENRYSGLVHEGVKIKGKVDKVNNAFIHYTYRNLNHYLSKINHYTSLDAEKKYKAGKKKGLAYIILRPIVEFIKKFILKKGFLLGMPGLIVSVLSSYYQFLKYIKLWEKNVSSDK

SEQ ID NO: 623 - protein, 279 aa, Unknown
  Description of Unknown: Desulfobacteraceae bacterium sequence
MKQKPALSVSIITYNEEDNIQDCLDSVQDLADEIVILDSFSTDQTESICLKNAKVKFSKHIFDGHIQQKNRALEKCSGEWILCIDADERVSQELQSSIEGFLLKNPQDIAGVKFPRLAFHMHRYIRHGGWYPNARYRLVRKGMAFWGGENPHDKLILKGKGLKIQGDLIHLTERDLSDQVKTINNFSSIAALMRFNKGKRYRIWRLLFKPVSKFVETYILKFGFLDRTQGFIIAVSSAYASFLKEAKMFEMDVLGSDKPSNLNNSYQKTRSSGRSRQGS

SEQ ID NO: 624 - protein, 380 aa, Alicyclobacillus acidiphilus
MSTSGSNWFCALQVGTIERPSCRRLPMKSNEDIQTMILKRQFDGVRYACIERISHNRLDGQAWAFLGTALVGLQRAQTARLCFERAWLFDPLSADLEKACHQAAELPPGRDDERVKKLLQVPKSTVSANILTKNSESTIYNCLSALQNAVDEIVVVDTGSTDNTIEIVQSFGIQVHHFDWVEDFSKARNFALSLSSCDWVLAVDSDEFLVTPDVPAVREVAGLYADCPWNPIVLCIQLNYVSGRVTPNGPARMFRNDGRTVWTRRIHEIPTSVEDSASPDVRRPLVRIRFNHFGYDPATIDTKAKCERNLELLFRDLNDHPNDARTLFYIGREHAGLGQRDEALHYLTLAKANMSPDEEVYFRSEMQEILAYLKAAETTS

SEQ ID NO: 625 - protein, 285 aa, Unknown
  Description of Unknown: Candidatus Woesebacteria bacterium GW2011_GWA1_39_12 sequence
MTKLSVVLAVRNEEKNIGECLSSIKGTADEIVVVDEESKDNTIEIVRSFGARIIKVEHSPIFHISKQKALEEANGEWILQLDADERVTPKLAEEIRRVIEMPDNKIDEYQKTLKNQRLFARHKRLIEKRDGAFIKEGEFAGFFIPRLNYFLGKYLRYGGVYPDGVIRLVKKEKAHFPQKSVHELIKVDGKVGWLQNDLIHMADPTFSRYLQRNSYYIDLIADDMKNENLGKSVWQFLNYVLVKPIWWFFLTLFRHKGILDGFQGIIFSFFSALRFPRAYLRYLRK

SEQ ID NO: 626 - protein, 265 aa, Franconibacter helveticus
MLKLSVCLLTCNSARLLREVLPPLIIVADEIVVLDSGSTDETLKICQEYDITPYTHPYAMHGQQMNHAIALAKNDWVLCMDSDEILDKETVDFILALKAGETPAPDKAWRLSRYWHVLGQPVRTIYPVSSPDFPVRLFNRRQARFNDRPVDDKVEGNIHAVKIPGYVRHDTFFSLHEVFNKLNGYTSRLVKYKYVKPSLLRGVISAIGAFFKWYLFSGAWREGKVGLVTGLYAAFYSFLKYFKAWYAYDKKRTDVKTASDSHLIR

SEQ ID NO: 627 - protein, 264 aa, Sediminicola sp.
MSSTKEKITALIITYNEIGYIEKCVQSIDFADEIIVVDSFSTDGTYEYLCNHPKIKVIQNPFENFTAQKAFTLKQATNDWVLFLDADEVVTKKLQKEIVETINGQSEHVAYWFYRKFMFQNKPLHFSGWQTDKNYRLFRKSKTKFSDKKIVHETLDVEGTSGILKEQLVHYCYKNYEDYKSKMLNYGKLKAKEAFYKEKKFNYFLLFLKPTWKFFNHYILRLGILDGKKGVIICYLNALGDFERFKELKQLEKKNELAYFLIMP

SEQ ID NO: 628 - protein, 312 aa, Calothrix rhizosoleniae
MMSTKIPVSVLIPAKNEEANLPACLVSLERADEVFVVDSQSSDRTMEIAQEYGANVVQFYFNGSWPKKKNWSLENINFRNEWVLIVDCDERITPELWLEIEQAIQSPSYNGYYLNRRVFFLGKWIRHGGKYPDWNLRLFRHKIGRYENLNTENIANTGDNEVHEHVVLTGQIGYLKKDMLHEDFRDLYHWLERHNRYSNWEAKVYYNILKQQDNSHTIGANLWGDPVQRKRFLKHIWVRLPFKPILRFILFYFINLGFLDGKAGYIYARLLSQYEYQIGVKLYELCHCHGQLNTVTKRQGSREENTYINIGT

SEQ ID NO: 629 - protein, 255 aa, Unknown
  Description of Unknown: Candidatus Roizmanbacteria bacterium GW2011_GWA2_33_33 sequence
MKISAIVLTKNEEKNIERCLKSLDFCDEIIIVDDYSTDKTIEIINNVGNKNLCSVHKRQLNNDFAQQRNFGLSKANNEWILFVDADEEVSKELKKEIVSLFHGSIVKENAFYLRRIDYFWNHELKFGEIKKVRIRLLKKNSGTWMGNVHEEFRIKNSKLKIAKLNNYINHYPHPTLKEFISDVNNYSSIRAEELFNRGTKTNVFEIIFLPFGKFIYNYFFNLGFLDGAVGFTYSFMMSFHSFLVRSKLYQLTNKQ

SEQ ID NO: 630 - protein, 205 aa, Unknown
  Description of Unknown: Candidatus Shapirobacteria bacterium CG10_big_fil_rev_8_21_14_0 _10_38_14 sequence
MKKPKISVVIIAKDEEKMIEDCLQSVKWADEVVLVDSGSTDQTPQIAKEYGAKVIQVPFEKLEFAKWRNVGLEKARGDWILYVDADERVIPELKKEILKVVTGHSRSVTAYEIPRRNFYLGKEVHYGGAWPDYVKRLFLKKKLKGWRKRLHEDPIFKGQMGRLKSPFVHLTHRDLSSMVEKTREWSKIEAKLLFESGHPAVTWWR

SEQ ID NO: 631 - protein, 257 aa, Cellvibrio sp.
MSYEQTPISAYLITLNEEAHLEEVLASLAEADEIVVVDSGSTDRTLAIAEKYGARIVYQPWLGFAKQKAFAMAQCTHDWVINLDGDEVLPAEGVRTIRQAIIEHPGRCFAFHRDDYFMGASMRFAKMKYFRKAYPKSAAKWRETDFVHEHIDISLPTKILPTIIKHYGHDSTEIIAAKKNRYSTLKAQQREAKGRQFSVLRMLLIYPVMFLKLYLLHRFCLCGWRGFIKANIEAGYFFLTEAKLFEKQFKTKHNIKS

SEQ ID NO: 632 - protein, 259 aa, Unknown
  Description of Unknown: Chryseobacterium tenax sequence
MQELKEKVSGLIITFNEEKNIREVLECFDFCDEIIVVDSFSTDQTLEIANTFPNVKILQNTFEDFTKQRNLALNTAKNDWVLFLDGDERITSQLREEIIETVKNPNAKDAYYFYRTFFVGTKKINFSGTQNDKNFRLFRKSKAHYLENKKVHETLKVNGTTGVLKHKLLHYSFENYECFKNKMLSYGKLKGQELQLKGEKYSVIVQWSKVIFKFSKTYFLKLGFLDGMNGLKISYLQSLYVYETHKTLNLKATDIFKNN

SEQ ID NO: 633 - protein, 284 aa, Coleofasciculus chthonoplastes
MFSIYILTYNEERDIEACINSARLSDDIIVVDSCSSDRTVEFAQRYPVRVVSHPFESHGRQRTWMLENLPTKYEWAYILEADERMTPALFAECLEAIKDNQYVGYYVAERVMFMNRWIRHCTQYPRYQLRLLRKGQVWFTDYGHTEREVCHGSTGFLQETYPHYTCSKGFSRWIEKHNRYSTDEARETLRQLEQGTVNWGALLLGRSEVERRHALKDLSLRLPFRPLLRFLYMYIFLGGFLDGRAGFTWCTLQAFYEYLITLKVWELKDEQLPTIEGTDSQLSF

SEQ ID NO: 634 - protein, 348 aa, Paenibacillus odorifer
MIVKNESEKLGRCLESVRSIVDEIVVVDTGSVDDTKKIASAYGARVFDFQWVNDFSAARNFALEQCEGDWILVLDADDRIIKASRKEIDDFITNNNSLGRIRITNSFDYDGELRESEANVTRLFPKGLFYTGKIHEQIVSDLPRKNVPIYVYHDGYYKSDKYKRNIKMLELELDEYPDDNYLLYQLGKEYRIIKDFINAEAYLSRCYSGITDIDGYKPQLIIECLYTMLGVGNFEEGLVLIEREARLLSDFPDFYFVSGLFYMELVFSDINKYMRYFPLIEKSYLKCLSIGDTDKYESVKGTGTFLATYNLAVFYETTGDLNKARKYYELSAQYNYKLARKRFEILSG

SEQ ID NO: 635 - protein, 314 aa, Fortiea contorta
MLTKIPVSVLIPAKNEQANLPACLTSLQRADEVFVVDSQSSDNSGEIAKSYGANVVQFHFNGSWPKKKNWSLDHLPFRNEWVLIVDCDERITPELWEEIALVITNNEYDGYYLNRRVFFLKTWIRHGGKYPDWNLRLFKHQNGRYENLHTEDIPNTGDNEVHEHVILQGKVGYLKNDMLHEDFRDLYHWLERHNRYSNWEARVYFNLLTNLDDSGTIGANLFGDAVQRKRFLKKVWVRLPFKPFLRFVLFYIIQRGFLDGRAGYVYARLLSQYEYQIGAKLYELRNCNGQLNTVNTSKSVTPLLTQEMGQTAAN

SEQ ID NO: 636 - protein, 630 aa, Unknown
  Description of Unknown: Bacillus sequence
MMGDKMRTISLCIIVKDEERFLERCLNSVAKHINEVILVDTGSTDRTLEIAENYNAKISHYEWINDFAAARNNSIKQATSDYILVLDADEYLDEDTDLQTVLITEKDHYTIRIKNYLSSGGAIFHPAVRLFKNHRGLQYQGRIHEHLNVEDKSLGLSHEFADVLIHHDGYKDEVVQEKEKHKRNIAILLEEVEKNPSGYNLYNLGTQYRANHQDEEAITYYKRAFELSKDRLYIQSLLYNMIDSIRRLGRHDEASNVVNAAIESFPNHTDFHFLKGRIFEELDFNNDAVQAYEHCIRLGEVELFQTLEGVGSFLAYVRLGAIAVEKGQYVLAFEMALKALESNKYHMPALRLYLEMMKKTNIPLKTMEEHLRNIFSVANVTDLKHLIVVLTVIKSPLLQQYIDLYKLKLDPSVSMIARLYNRQYAEAVEIATKMDDIKESETNDLFLLAYISNSEDLAGAARKPLNFSIKEWKQLKSFLQSKPEDLGNISEPVANIIVFIAEQLLNLQEEDLFNQCISTIQQGPATLTIKFCHMLIENRYSNIAMDLLLAEYDKNKQNIEWLELLGDACTQENQDKDALSVYNRALQLKPEYRIYEKVYEIYIKLNEHKEAGLIKNEIAKLFPFVEWAKA

SEQ ID NO: 637 - protein, 250 aa, Hydrogenimonas sp.
MVERISVTILTKNSERRLARCLDALREFDEVLIVDNGSSDDTLEIASKYPNVRVLEHEFTGFGPLKNFAAKEAKNDWIFSVDSDEVATRQLIESIKELDPEKIENIYSVERLNHYGNRPVKCCGWYPDIVMRIFNRSSTSFSDALVHESLIVPPGIEPKVLRGELLHYPFESVESLIAKMQSYSTLYAKQSDKPSSPAKAFWRATFAFFRNYFLQRGFMYGYEGLLISVSNANGVFYKYMKLYEKREAKR

SEQ ID NO: 638 - protein, 401 aa, Unknown
  Description of Unknown: Candidatus Brocadia fulgida sequence
MIQLSACLIVKNEAFLLPYCLDSIGAFVDEIIVVDTGSTDETIKIANKYKAKVSQFPWTEDFSAARNHSISCARGEWILYIDADEAIDRVNAGKIHDAIKRKDIMGITVRQCIPQRINNIATAYYSEYCRIFRRHKDVRFKGKIHEQILPSIERLGGKVLRTDIVFNHWAYGINEEKKRRRAERNLRYLLDEVENAPYDPFVYFNLGITYCELGKKDAAICSLQRTIDLYTGNIKRELIGQAHLWLAKLYLELDNFTKTEYHARMVSSYDPANPLSAYILATIAVVKEQYKTAIEHLEHAIQISKGETGLLPSVEMDLAQMYLELGSCRSASGDTLDAEKDFVRSLEYNPSGALPYVLLGNCRFLDGDKKEAEKMYERALAIDSSLVNASHGIELCRANKK

SEQ ID NO: 639 - protein, 249 aa, Unknown
  Description of Unknown: Chryseobacterium sp. T16E-39 sequence
MINISGLIITYNEEKNIKEVLECFDFCDEIIIIDSFSNDKTLEIAKANPNVKIIQNKFEDFTKQRNLALDEAKNDWVLFLDGDERITPALRAEIINELDKPDKKDAYYFYRKFFFAGKPIHYSGTQTDKNFRLFRKSKARYILEKKVHETLEVSGTIGELKNKLLHFSVSDYESYKQKMIHYGILKGQELSNKGKKFNITTQYSKTAFKFFKAYILRLGILDGKEGYQLSFLQALSAYETYESLKKEQN

SEQ ID NO: 640 - protein, 253 aa, Unknown
  Description of Unknown: bacterium BMS3Abin03 sequence
MPKNKISVIIITANEEENIRECLESVKWADEVIIVDSESSDRTTDIAGEFTDKIFIREWAGFASQKSFALEKTSNEWVLSIDADERVTPELSNEILSMDLSKSDGYFIKRDNYFLGKLIVGCGWGNDYQLRLMRKSKSGLTDNLVHEGFVVSGKREKLNSSIIHYTYNSIHQALDKINYYTSLEAKEKYTKKNVNILKIIFQPPVAFYHDFIARKGYKDGVRGFLISFNNALTKLQVLTKIWELKKNERTGAN

SEQ ID NO: 641 - protein, 329 aa, Leptolyngbya valderiana
MPLQDDLESHRAVLAELPAVEGYPPDGSVPVSVLVPVKNEQDNIAACVRRLAWAEQVTVIDSQSTDDTIVLSQALEAEVYQFHYDRSAGWPKKKNWALEHVPWRHEWVLIVDADEHITPELAAEIEAVVTGKYEPDGNGCGDGYWINRKFMFLGRWLKGGGWYPSWNLRLFKHRVGRYERIGDLGDTGSGDNEVHEHPVLLTGEAGYLKHDMLHYAYRDLTTWIEKHNRYTTWEAHAWGAKDAGGVKARLFGSTIERHRWLKKYARNLPGRPFLRFGFDYFFRRGILDGYPGLVMATNMAWYEFMSVAKRREMEIARRLGQRYSGAPPA

SEQ ID NO: 642 - protein, 251 aa, Orenia metallireducens
MDNLGALILTYNEEDNIEECLETLNWINDIVVIDSYSNDNTVELAKKYTQQVYQRKFDDFASQRNFGLEQIEAEWVLVVDADERVTPALKDEILNRLNSPQAEGYKIPRKNYFLGKWIKYCGWYPDYTLRLFKAHNRYSGLVHEGVKVEGRVDKLNNALIHYTYRDLKHYLSKINHYTTLDAEKKYKASKKIGIAYIILRPIVEFIKKFILKKGFLLGMQGFILSVLSSYYQFLKYIKLWEKNQLKLGREK

SEQ ID NO: 643 - protein, 288 aa, Hydrocarboniphaga effusa
MLAKLPTRLPLRAGERRTLSALIICCNEADRIEDCLRSLHGWVDEIIVFDSGSTDGTLDIVRRYTDKIWKTDWPGYGPQRNRALQQASGDWVLYIDADERVTPELRQEIDNALIDPHLDTTLFRIPWRTYLFDGELRHGRYATPQNRLFKRQGARFRDHQVHEQIVLPERRAAVMKAKLEHRSWRDYAHLQRKHRRYANLLARQKFEEGARGSIPYACMRFVTDFVQQYVLRLSVLDGWRGLMISAVLAQYAYWKYADLKALEREAARTAAPAANKTLAPVSAALLRR

SEQ ID NO: 644 - protein, 315 aa, Unknown
  Description of Unknown: Candidatus Magasanikbacteria bacterium GW2011_GWA2_45_39 sequence
MKQSLSVVLSVHNEESVIEPALESAKPIADEIIVVDNESTDKTVQIAKKYTKNIHEHKNTPELLNKPKNFGFSKAAGDWILSLDADERVSPELAKEISGILHSSFDIQNSPVGYWIPRQNLVFGKWLQHGIWYPDYQLRLFRKEKGQFPAIHNHEFLAVEGRTEKLKGHLIHKSYSGITEYIDKFNHTYTDNEAENFLKSGKKITWIDAIRWPLSDFITNFFARRSYQDGLHGLVLSLLQAFYALEVFAKVWERQGFWEYNSKDLAKGVKAEFQAKSKEFSWWYAKELIPWFMKPEVPDLSASIPQTITCQKVIR

SEQ ID NO: 645 - protein, 296 aa, Unknown
  Description of Unknown: Cyanobacterium stanieri PCC 7202 sequence
MTLEQKKIPVSVLIPAKNEELNIGACLDSVADADEVFLVDSQSGDRTVAIAEEKGAKVIQFHYNGKSPKKKNWSLENLPFKNDWVLIVDCDERITPELWAEIAQKIEDDNYQGYYLNRKVFFLGKWIKHGGKYPDWNLRLFRHKLGRYENLNTEDIKNTGDNEVHEHVILDGTVGYLENDMLHIDFRDIYEWLARHNRYSNWEARVYYNFLTGQNDDGTIGANLFGDAVQRKRFLKKIWVRLPFKPLLRFILFYIIRLGFLDGKAGYIYGRLLSQYEYQIGVKLYELMKFKGRLNN

SEQ ID NO: 646 - protein, 267 aa, Flagellimonas maritima
MTPLSNSKQKLSALIITYNEMGYIERCIDSISFADEIIVVDSFSTDGTYEYLKKLPNVKVIQNPFENFTAQKSFTLKQATNDWILFVDADEVVNNKLENEIIETINSPKACEAYWFYRKFMFQNKPLNFSGWQTDKNHRLFRKSKARFTDKKIVHETLEVDGTSCILKEKLTHYCYKDYNDYKGKMLRYGQLKAKEAFYKEKKFNYFSMIAKPLWKFFNHYFLRLGFLDGKRGIIISYLNALGVLERSKELKRLEKKNKLAYYLVMP

SEQ ID NO: 647 - protein, 246 aa, Unknown
  Description of Unknown: Candidatus Woesebacteria bacterium GW2011_GWC1_42_9 sequence
MKTSVVILTKNEERNIKKCLKSVYFSEEIILIDDYSTDKTVSIARRNGAKIYKRHLYDDFSKQRNFGLKKAKNKWVLFLDADEVLSPELAKEIQSLGATDTQGYFLKRRDYFLNKKILGGESGGVWLLRLGRKSAGKWDRAVHEHWEINGKTQRLKNYLYHSPHPSFLSLISKINYYSDLHAIENEKEGKNPSLIKIIFFPMAKFIYNFVFRLGLRDGTHGFVLAVAMSFHSFLSWSSLYLDDQKK

SEQ ID NO: 648 - protein, 273 aa, Unknown
  Description of Unknown: Solemya pervernicosa gill symbiont sequence
MEKLSVFITTFNNAHTLPFTLESVKWADEIVVLDSFSTDETMAIAEQYGCKTAQHKFMGYGPQKQLALEMTSHNWVLLLDADEAPCPELQAEIQALMAEGPSKAGYTIARQEQLFWRMRTTKNRMNHFLRLFDKRNGGLDDIPIHAAPKVEGELGRLKHPFYHFGEIDIHTKVSKINSYAQGLVADKVAKGRKGNPWMMVFYPPFFFVRSYLFKRSFLNGWAGFIGSVIATFYVFLKYANLYEHYQFEKHGDSLLPKGAPSTVALREKGRKTV

SEQ ID NO: 649 - protein, 267 aa, Unknown
  Description of Unknown: uncultured bacterium sequence
MKLSAVILTKNEEKNIERCLKSLDFCDEIIIVDDYSTDDTKNQISKINPPAGGKNDKLNIKIIEKNLNNDFAQQRNFGLSKANNRWVLFVDADEEVSEELKQEIVGLDSRLRGNDINICNAYYLKRRDYFWGKELKHGEINQIRQIGLVRLISKDSGKWMGTVHEVFYTAKNIGQLEGFLNHYPHQILKDFIIDINNYSSIRAEELFNRETKTNIFEIISFPFGKFFYNYFLNLGFLDGPAGFTYAFMMSFHSFLVRAKLYQLTNKK

SEQ ID NO: 650 - protein, 301 aa, Lysobacter sp.
MPAISACIITFNEAARIGDCLASLAFCDEIVVVDSQSTDATVQIADAMGARVLERPFTGFRSQKQFAIEQARHDWVLCVDADERVSDALREAILAARDAGFVDAAGYRFARLDNYFGRFLRHGNAYPDRILRLFDRRRGGWRGSREIHEAASVDGPVKTLAGDLIHYPYRSLEQQLAKTQRYARMMAEHDFARGKRASLTKLVLSPAWRFWRGYFLRAGFLDGWHGLVYAYVRANYVRQKTIMLWLLQNGQAVADTVEEGEERTPAFSVASNSAAAADVSATRAVDDHLPAPASHPPRAEG

SEQ ID NO: 651 - protein, 260 aa, Unknown
  Description of Unknown: Candidatus Woesebacteria bacterium GW2011_GWA1_39_8 sequence
MNNINAIVIAKNSEDKLLECLNSIDWVDEIIIVDTGSTDNTISIAEKKGCKVYRFNGGGYSQWRNEGLRRAGGRWVFYVDTDERISQKLAKEVRSVVGLTNNNYTAYAIPRTNIIFGKVLKHGGWWPDYVKRLFIRDKLNRWTGKLHEEPQFDGELGFLENPIIHKKHDNLEEMVVKTNDWSAIEAKLLNDAGHPKMVGWRFFRIMLTELWYRLVYQRGCLDGPQGILYAFYQMWSRFISYAKLWEMQTSKAGDLRISED

SEQ ID NO: 652 - protein, 253 aa, Mesonia sp.
MIKLSGVIITYNEERAIEKCMQSLQNVVDEIVVVDSFSTDKTKEICQKYGAKIIEQQFLGYIEQKNFALEQASHNYIVSLDGDESLSEELQKSIIELKNNWQLDGYYCNRYNNFCGQWIKYSDWYPEKKLRVFDRRKANWKGINPHDQIKLHNKESKIGHLKGDILHWNYQTYSEYNLKMETFSSISAKAYYDLGRRATLFNIVFNPFWAFVKSYILRLGFLDGVNGLVICSIKAHYTFLKYIKLLEIERKNK

SEQ ID NO: 653 - protein, 245 aa, Aequorivita sp.
MVNLSVIIPTFNEEAFVEEALKSISFADEIIVVDSFSTDKTPEISKKYATKFLQRKFDNFSNQKNFALKEATGDWVLFLDADERIPQKLKAEILTTLQHPKHDGYKLNFPHYFMDRFLYHHSDDVLRLVKREGANFTGLVHEKLNCTGSIGKLKAMVEHYTYKGLQNYISKKESYAWFQAEQLFAKGKKVTWGHLLIKPTFRFIKSYIIRGSYKDGVPGLTIAAINAYGVFSRYVKLMLLQKGIR

SEQ ID NO: 654 - protein, 259 aa, Gelidibacter mesophilus
MTKISGVIIAYNEEQYIAKCLESLQGIVDEILVVDSFSTDETLQICEKHGARVIQRAFIGFTDQKNYATEQAKFDYVLSLDADEALSEELKASILELKPTMDGEGYAFNRLNHYCGKWIHHSSWYPGTKIRLYNKHKARWYSPTNIHETITLDNPKSVVKLKGDLLHWAYDSFSKHHLKIDTYTTLSAVNYVKNKSKKVPYTKIIINPFWKFFKNYFINRGFLDGFQGFVVCCMSGYTTFLKYIKIIELQQNEKHHLNR

SEQ ID NO: 655 - protein, 232 aa, Desulfuromonas sp.
LADEIIVLDSGSTDRTVEIAGQYTDQVEVTDWPGYGRQKQRALDKATGDWVLSIDADEALSPELQQEIAAILDSDCEQVAFRLPWAVIVFGKQLNHGRSARAPLRLFRRAGTRFTDAIVHEHAQVPPGKIGRTRGRLLHYTHRDFEHYLQKNRQYAWLGGQRRYAEGKQGGGLAGAAVRAVLVFLQIYILRGGFLDGPVGFLVAVMYSQGAFNKYAALWYLRRQDRLAAHKK

SEQ ID NO: 656 - protein, 261 aa, Unknown
  Description of Unknown: Flavobacterium frigoris PS1 sequence
MDKAETIADSTIHLSVLVITYNEERNIKQLLQDLDFADEILVIDSFSTDKTVEIAQSFSNVKVSQHLFENYAIQRNYALSLAKGTWILFLDADERLTPALKNEIIQTIQNKAKFTAYYFKRTFMFANEKLLFSGWQTDKIIRLFRKENASYSLQKTVHEKLNTAGDIGKLKNNLIHHSYSDYFSYKEKMVRYGQLKAHEELIKGTKPNLIHFYIRPAYQFINQYILRLGILDGKKGIIICYLNAMSVYIRFQELKRMKINN

SEQ ID NO: 657 - protein, 310 aa, Rippkaea orientalis
MIAKVPVSVLIPAKNEELNLPACLESVARADEIFMVDSQSSDRSTEIAQQYGAKVVQFEFNGRWPKKKNWSLDNLPFRNDWVLIVDCDERITPELWDEIAEVIEDPSHNGYYLNRKVFFLGKWIRYGGKYPDWNLRLFRHKFGRYENLHTEDIPNTGDNEVHEHVILQGKVGYLKEDMLHIDFRDIYHWLDRHNRYSNWEARVYYNILMGDDDSNTIGSNLWGSMVQRKRFLKKIWVRLPFKPFLRFILFYVIRLGFLDGRAGYIYGRLLSQYEYQIGVKLYELRQFGGHLNVQTEPELSSSTTQPLISK

SEQ ID NO: 658 - protein, 290 aa, Prevotella denticola
MFHAFFIRLFCGDNEYFIIFAAMNDAQRISVIINTYNAERHLEAVIEAVKDFDEIVVCDMESTDRTLDIARSYGCKVVTFPKGDLRIVEPARQFAIDKAGSPWVLVVDADEIVTPALRKYLYAAIRKADCPDAIAIPRKNYFMGRMMHSSYPDYIVRFLRRSKCSWPPVIHASPKVDGNIWKIPASRTDLAFEHLANDSVADIIRKNNTYSDYEVPRRRQKKYGCMALVYRPVFRFFKSYFLKRGCLDGVPGLIHAVLDAGYQFYIVAKLREERQCDPMSVNTRTPAPDI

SEQ ID NO: 659 - protein, 256 aa, Unknown
  Description of Unknown: Candidatus Omnitrophica bacterium CG11_big_fil_rev_8_21_14_0_20 _42_13 sequence
MDKVPVSVVVLTKNEEVNIIDCLSSVKGWADEIIVVDDESKDKTVELANEYADKVLLNKMKVEGAHRNWAYAQARNEWVLSLDADEQVSPELKNEIDRALADTDCVCFSIPLRNFIGKHWVRYGGWYPAGKVRLFKRSKFKYEEVEVHPRVFTEGRCGFLKSDIIHKGYPDFEHFLASVNRQTTLEARKWVNTNRKMSFGKAMWRTIDRFFRAFIGKKGYKDGLVGFMVALFASWYQILSYAKYRQMKQEASQIEK

SEQ ID NO: 660 - protein, 243 aa, Lebetimonas natsushimae
MKSEKLSIVILTKNSQKYLEKVLKSVEFADEVIIYDSGSSDKTLDIAKNFKNVKIFVDKNWEGFGKQKQKAVDRASNKWVFVLDSDEVFTDNLKKEVLEILKNPIYDAYRVARLNNFFGKWIRHCGLFPDYSIRLFNREKCKFNEREVHESVECKRVGVLNNYFLHYAYENIEEFIDKQNRYSSLGAKPNKLKAIFSPYWTFLKIYFIKLGFLDGWAGFVIAKLYSEYTFWKYVKDKYENIGN

SEQ ID NO: 661 - protein, 398 aa, Selenomonas ruminantium
MRWKVFFIILAKYTGEGGSILQKIELSVCYMVKNEAENLPVSLASIKDAADEVVVVDTGSQDNTKEIAAAIGARVYDFPWQDDFSAPRNYAIEQAQGEWILFLDADEYFPSALNKDKLLCYLAGQKEKDAILLLRYNIENDKERKDWRTDWCLRIFRNVPYLRYKGRIHENIARHNGELQVAYAPTEWYLYHTGYKKELNEAKAQRNLRLLQQSIREEGWQPGYDLYLMDCYYGLQEYEKALQHGMSLLRGDCYVYGGMVHVYHMILECMRFLHRPDEDMLPFAQEACREYPDIPEFYGEQGMILCGMGQLIQARQLLIDALLRYEERQAKGQLDGYFSPVVAAKVAARLGEIAMHYEDEEEAAFWFRQAMTYCDNSEVVLMKYQKYRQWAAEKGLEP

SEQ ID NO: 662 - protein, 254 aa, Unknown
  Description of Unknown: Cryomorphaceae bacterium BACL23 MAG-120924-bin60 sequence
MKWTLLVPTYNEEDVLERCLSSAAALADEILVVDSFSTDGTLKIAQRFGAKILQREYQNSASQKNWAIPQASHPWILLLDADEWLSPSLQQELRRVKDGRDPMECGFWMYRANHFLGKRVRYSGWQGDKVIRLFQRDTCRYQEKHVHSEIETSGRVGKLRGKLNHDTFKGIPAWEKKLRRYAAWQSRDYDQRMGAITLYHWWVKPGFRFFKHFILRGGLLDGRVGFKVSAYAAWAVRLRYEALRDLRAGNPWEA

SEQ ID NO: 663 - protein, 251 aa, Unknown
  Description of Unknown: Bacteroidetes bacterium 4572_77 sequence
MIKLSVVLISYNEERNIGRCLDSVQNIADEILVVDSYSTDKTVEICEAKGARVVPHVFENFIKQRNFADSQAQNPYVLILDADEVISLELAVSIQKIKENWQYDVYEFNRLNNYCGQWIKHSGWYPEWRPRLFDKRQAHWEGQLVHERLAKNAGVTTGRASGNLLHYSYNSIAEHIQKTNRYTDLTAQEAFEKGKKSSLFKIWFNPKWRFIRDYVINGGFKDGFMGYTICKISAWGTFLKYSKLQNMHHKR

SEQ ID NO: 664 - protein, 269 aa, Unknown
  Description of Unknown: Berkelbacteria bacterium GW2011_GWA1_36_9 sequence
MKLSTIVIAKDEEERISACLESAKWANELVVVMDDSVDNTAKIAKKYTNEVLIYKGEHDFAKLRNWAMEQTSGEWVLFLDADERILSPLKEEIVNAISGSEKSAFAIPRKNIIFGTEKKYGPFWPDFVIRLLKRENFTGWAGKIHEQPTFEGSLGYLKNPFLHLTHRDLNQIICKSLDWSNIDAKLRLSSNHPKISSWRLIRILLIELFNQGFLRKGFFAGTIGTMDAILQTFSLVMTYIRLWEMQQSRPLDRVYAEIDKKLIDGNFKF

SEQ ID NO: 665 - protein, 249 aa, Unknown
  Description of Unknown: Chryseobacterium nematophagum sequence
MMNISGLTITYNEEKNIKEVLECFDFCDEIIVVDSFSTDKTVEIAKTFPNVKIIQHRFEDFTKQRNLALDVAKNDWVLFLDGDERITPALRKEIIKELNSPSKKDAYYFYRKFFFANKPINFSGTQSDKNFRLFRRSKARYIAEKKVHETLEVKGTVGILENKLLHYSVSDYESYRKKMIHYGVLKGKELAAKGKKFNILVQYLKTVFKFFKAYIMRLGVLDGKEGYQLSYLQSLSVFETYESLKKEQN

SEQ ID NO: 666 - protein, 245 aa, Lacinutrix sp.
MKSITVIIPTYNEEAYIKEAIRSVAFASQIIIIDSNSKDNTVKIAKEMGCEVYSRTFDNFSNQKNHALQYATGEWILFIDADERITKSLQQEVFEAIASGKHAGYKLNFPHFYMNRFLYHHSDNVTRLVLREKCHFEGSVHEKLIVDGTIGKLENPVLHFTYKGLQHYISKKDSYAWFQAEQMLKKGKKATYFHLAFKPFYRFFSSYILRGGFLDGIPGLTVATVNAYGVFSRYVKLMLLKRGMR

SEQ ID NO: 667 - protein, 253 aa, Unknown
  Description of Unknown: Chryseobacterium soldanellicola sequence
MPELTEKVSGLIITFNEEKNIREVLECFDFCDEIIIIDSFSTDKTLEIAQSFPNVKIIQNKFEDFTKQRNFALDHAKNDWVLFLDGDERITPQLRSEIIEKLNRPYKKDAYYFYRKFFFAGKPINYSGTQTDKNFRLFRRSKARYISEKKVHETLEVHGTIGELRNKLLHFSVSDYESYKQKMIHYGVLKGQELASKGKKFSSLTQYSKTAFKFFKAYILRLGILDGKEGYQLSYLQSLSVFETYESLKKEQN

SEQ ID NO: 668 - protein, 316 aa, Stanieria sp.
MTYSTKKVPVSVLIPAKNEELNLPACLESVAQADEIFIVDSQSDDRSSEIAETYGAKVVQFNFNGRWPKKKNWALENLPFRNDWVLIVDCDERITPELWTEIATVIETSECDGYYLNRKVFFLGKWIRYGGKYPDWNLRLFKHRLGRYENLSTEDIPNTGDNEVHEHVILQGKVGYLKEDMLHIDFRDIYQWLARHNRYSNWEARVYYNLLTGKNESGTIGANLFGDAVQRKRFLKKIWVRLPFKPTLRFILFYIIRLGFLDGLPGYIYARLLSQYEYQIGVKLYELQKFGGKLNRASNSSKLPTLESSPVKTVQL

SEQ ID NO: 669 - protein, 248 aa, Unknown
  Description of Unknown: Nitrospinae bacterium CG11_big_fil_rev_8_21_14_0_20_45_15 sequence
MEKLSVIIITYNEEEHIERCLKSVQWADEIVVLDSFSTDATVDICRRYTDRVFQMEWQGYGGQKNLAAEKASHTWILNLDADEEVSSEVEREIRTLMEVGPMFSAYDFPRKNFFGEHWIRFCGWYPDRIIRLYDKMKARFTEGRVHEKIETAGGVGSLNEPLLHHSFRDMEDYITRQNRYSTLSAQDRFDRKGPVGIGRILLGPPWVFIKVYILRQGFREGRLGFFIAASMAFYSFLKYIKTHECKVS

SEQ ID NO: 670 - protein, 257 aa, Unknown
  Description of Unknown: Candidatus Peregrinibacteria bacterium GW2011_GWC2_33_13 sequence
MTISVVIHTYNSEKYLEECLESVKSVEEIVICDMYSNDRTIEIAQKYGAKIVYHENLGFADPARNFALSNASQDWILVLDSDEIVPKELLSYLREYIKNHDPLYEAVYIPRKNILLGKVLWSWYPNPIIRFFRNGVVTYDEKVHCAPTIHKGGQFFIDPKRTELALIHYNYDSIEAFISRMNKYTSLELEKFSERNIKFSVTLLFTRPIAEFLKRYFLKKGYKDGWHGFIFAVLMGIYKFVAIAKLWQSELNLETKA

SEQ ID NO: 671 - protein, 265 aa, Franconibacter pulveris
MFKLSVCLLTHNSARLLREVLPPLIIVADEIVVLDSGSTDETVEICREYDISPHTHPYAMHGQQMNYAVDLAKNDWVLCMDSDEILDRETVDFILALKAGETPSPDKAWRISRYWHVLGQPVKTIYPVSSPDYPVRLFNRRQARFNDRPVDDKVEGNIETVKIPGYVRHDTFYSIHEVFNKLNGYTSRLVKYKYVKPSLWRGVISAIGAFFKWYLFSGAWREGKVGLVTGLYATFYSFLKYFKAWYAHDKKSARVKTASDSQFIR

SEQ ID NO: 672 - protein, 262 aa, Unknown
  Description of Unknown: Nitrospira bacterium SG8_3 sequence
MQRETVGSAVVSFNEEKNLQPCLESAKWMDEIVVVDSFSTDRTIDIARKYTNKIFQRHWRGFGDQKNYAMDQVSTDWVFILDSDERISAELQAEIETVLSARSTDGPVAYYVPRHNYYFGSLVLHAGCYPDYQLRLFRRGIGHLDDAEPHNKFIFTGDSAYLSCPLIHHTRPTLQNYLEKFSNFTTMAAQDRAKTKGYVRSTDLLFRPVFTFLKYFLVRQGYRDGMSGFLVSALASMYTFVKYAKVWHMKQYESYGSLQEKK

SEQ ID NO: 673 - protein, 258 aa, Unknown
  Description of Unknown: Flavobacteriales bacterium 34_180_T64 sequence
MKEGTVKLTALVITYNEMIHIEELIASLSFADELIVVDSFSTDGTFEKLSALNHVNVVQHKFESFAEQKNYALSLANHDWVLFIDADERISEEFKKEVHEKINALHNPIAAYYSLFQYHFGQTPIKYSGFQTAKSHRLFKVSKCSYDTTKKVHENLIVDGESGLLNNRIKHFSFRNYEHYKEKMKHYAHIKARELHKKGKRSTFFASRIKPLYRFFNHFVMRLGILDGKIGYIISKLNAFEVKERYRELDRLNDSLSK

SEQ ID NO: 674 - protein, 251 aa, Giesbergeria anulus
MNRPTLSVILITKNEALLIDQALASVQWADEIIVVDSGSTDATVEICRRYTDKVTVTDWPGFGAQKNRALALATGEWVLSIDADEQVSPELAQEIRATVQDAAYPVYSLPRLSSFMGRPIRHGDWWPDEIPRLFRRTQARFSDDLVHERLVFEGAAGRLQHLLLHQSIRSIEQLLGKTNSYTTGGAVRVRQAGKSCGIGTAISHAFWAFLRGYVFKRGFLDGKEGFIIALSVAENSFYKYVKASYLPPRQP

SEQ ID NO: 675 - protein, 254 aa, Prevotella sp.
MDKKISVVINTYNAERLLKKVLESVKDFDEIVVCDMESTDATVEIACQHGAKVVTFPKADHKSAEPARTFAIQSAQSPWVLVVDADELVTPELRDYLYSRISQPDCPAGLYIPRKNYFMQRLFDYPDYQLRFFIKEGTTWPPYVHTFPQVNGPLGYLPKERKELAFIHLADDTISMRLKKTDLYTDNEVKKRFGKHYGATALLVSPLWRFIRSYFFKGGIRRGKAGFINSVLYAFYKFITVAKIIEYNRQNDIR

SEQ ID NO: 676 - protein, 252 aa, Halanaerobium saccharolyticum
MMKNLTALVLTYNEEDNIADCLDSINWIERVVVIDSYSDDRTEKICQQYDKVDFYENEFNDFASQRNFGLDKIETEWVFVIDADERVTEELRDEIKDVLNKPEVEGYEISRKNYFLGKWIKYCGWYPDYTLRLFRSKYKYKGLVHESPQINGRIDRLKNDFIHYTYKDLESYVSKMNQYTTLDAEKKYSAGKTVGISYILSRPFLEFVKKYILKRGFLLGSQGLILSILSAYYQFLKSVKLWELNKFGDGNL

SEQ ID NO: 677 - protein, 252 aa, Shewanella woodyi
MKLPISVFIITKNEEKHIEKTLQSVALLDEVILVDSGSTDGTLAIAERYGAKIYSHPWQGYAKQKQYAMSLCSHEWVLNLDGDEAINTSLIEAFKTIMEQDKADSVRFWRNDIFIDKPLSSWSKKPNNHRFYKRSKSFFDDSRLAHESATVDGKEIFINETFDHFGYCSIEAITSKNNSYSGLKADEKFAKGKKFSNLKLITVFPLIFIKEYFIQRKIFSGRRGFILAVMDAYYAFIKEAKLYEHHQLKDNK

SEQ ID NO: 678 - protein, 342 aa, Unknown
  Description of Unknown: unclassified Butyrivibrio sequence
MITISLCMIVKNEEEKLPTCLDCIKDLVDEMIIVDTGSTDKTIEIAKSYGAKVYNFEWTGSFSDARNYSFEQATCDFIYTADADETIDEENRERFRQLKKDIDELDIDVVQMYYCNQLSHNTVYNYDKELRPKLFRRIRKYVWHDPIHEMIKLDSTVCNSDVEVKHNPTEDHGERDLAAFRRAIREGEYISKRLHNMYARELFMVGTDEDFMLSKEFFEESIMDNGRDLDQIKEAACVLAHIAVLDGKTEEILKYCLKDLTTIPSSEMCYELGNYYRNKGDLIEAIIWYYNAAYETSPILEIHRGGDMALHKISECYRELGNLEQAEDYEAAANNWQIPSNE

SEQ ID NO: 679 - protein, 259 aa, Unknown
  Description of Unknown: Proteobacteria bacterium sequence
MAEEIFLSGLMVAHNEEEVIEEALKSLHFCDEIIVVLDRCTDQTASIAKKYATKVVEGGAGDNFHIEGVRRNTGIEACKGTWVLELDADERISPELATEIQKTVKTVGEKGYYLLPVHNYVGDRHVQYGWAGSFGTNSVARLFTKGSKTWGDGLVHPKVELHNRLGRLTKPIVHLVDKDINDMIDRLKRYTDARALDMASQPLPKFRTTVRKGLTRFYKSYLARKGYKEGRMGFLLALMAMPFVILSHIKAEIEVKKNG

SEQ ID NO: 680 - protein, 253 aa, Pontibacter ummariensis
MPGVSAIIICKNEEQHIAGAIASLSWADEVLVVDSYSTDNTLQIAATYPVRLLQHAFENYSRQRNWALSQASQPWVLMLDADERIPGDLQAEITALLQSEPAHAAYRIFRKNFFMGKRVRFSGWRHDGVVRLFDRRRCQYSDKNVHEELIIPGTVGQLKHRMLHYTYKNLPHYLEKWDQYTWLSAKDKAKKTKHVTLFHLALKPWVRFVRQYFFKLGILDGRVGFVIASLSAGSVFMRYLKVWRLQEEELQNK

SEQ ID NO: 681 - protein, 265 aa, Unknown
  Description of Unknown: unclassified Klebsiella sequence
MLKLSVCLLTCNSSRLLREVLPPLLKVADELIVIDSGSTDATLQICQQFGLTAHHHPYVTHGAQMNYAISRATHDWVLCMDSDEILDDEVTAAILALKAGDEPDPACAWRLPRYWFVLGEEVRTIYPVSSPDFPVRLFNRAVARFNDRPVDDQVVGFKHDSKLPGFVRHDTFYSLHEVFSKLNSYTTRLVVHQKIRPSIGRGIISAIGAFFKWYLFSGAWRKGKVGVVTGLYATFYSFLKYFKAWYAHQDKQEPAAKKHTDSRTV

SEQ ID NO: 682 - protein, 251 aa, Unknown
  Description of Unknown: Pelagibacteraceae bacterium TMED13 sequence
MKKISVLLVVHNEEKQISDCLERLSFSDEIVVILDKCTDNTLNIVKKFTNQFYSGSWDIEGDRRNYGIQKCKNDWILEIDADERINLNLSKEILYTIKNSQYDWHQINVDNYINRKLVSHGWGAYFGKSAYAGLFRKKCKSWGSQRVHPKITLLGNRGGNLKNHLIHYYCYSIADLIKKLDGYSSARALDLEKENIKENIFTNIRRVFSRFWKCFIVRKGFKEGRIGLMIGIVAGLYPLLSYLKYKENKND

SEQ ID NO: 683 - protein, 293 aa, Unknown
  Description of Unknown: Microgenomates bacterium UTCPR1 sequence
MKLSLCIATYNEEKNIHYALDSSYDLADEVIVVDGGSTDDTVKIAKSYGKKVRIINSDNPSMFHKNKQKAIEAARGEWILQLDADEELSDELKEEIKKVVDIGSSFYPTILGNQREAGKIASVQSGPANSRYSSENREIVAYRIPRRNWFLTKFLMKGGQYPDYTIRLYRNGVAKFPCKDVHENVEINGEVGYLKSPLNHYADPDFSRYLMRWDRYTTLEVQRPKFKVKNENKNSFLMFLEYFFWKPMMTFFSMFIRHKGFMDRFPGFVFALFSSIRFWVIYIKWVMRRRNSN

SEQ ID NO: 684 - protein, 246 aa, Unknown
  Description of Unknown: Candidatus Roizmanbacteria bacterium CG10_big_fil_rev_8_21_14_0 _10_39_6 sequence
MKHFSILILTKNEEENIGRCLNSVAHMGDETIVVDDQSSDATVEIARTHGAKIYTQSLNGNFAEARNRAIAQVKSRYVLCIDADEVVSNEMRDYIAQIPESTQEYAFAFKRIDYFWNTRMRFGEVRNVYVTRLVAKDHGTFIRPVHEIWQGPKIKKVNRPLYHYPHPTIASFLHSINTYSSLNAEYMLTQNKKVGVFELVTIPMAKFIYTYFAQFGFLDGAAGFVYSFMMSFHSFLTRAKVYTGKK

SEQ ID NO: 685 - protein, 260 aa, Salinivibrio socompensis
MITGVVITLNEEKNIQACIESLRQVCSDIVVVDSQSSDSTIAIAEQLDATVVTQPYLGDGLQKNVGLAHTDNQWILSIDADERLTEEAVKQIQALDLANTEHDAFAFRRRNHIGSRWIKQCGWYPDYCIRLYNKSKTRFAEVKQHAAVKAKNPKQLDCDLIHYSFENIGQLFAKPGRNFSGRAAKIMYQKGKRANGFSPFIHGLNAFIRKYLFQRGFLGGVDGMTVALSSAVNSYLKYAKLLEFQRDPKVLENEDFDKVW

SEQ ID NO: 686 - protein, 377 aa, Aerococcus urinae
MATLPDRHSFPRRSSRPLVAASMIVRNEERHLPDCLSSIAGLVDEIVIVDTGSTDSTIDIARSFGAKVLESPWQGDFAAPRNLSLDNCSSEWILYIDADERLRGIDRAGLEAALSEPGRVCLRPWLRPRIGYTPYREYRLFRNDPRIRFRSKIHESIVPGIEAVAASDGLRVGAIEAVLEHVGYEGDQTAKHRRNLPLLREQVMHSPDRIFLWWHLGHVLEGLGQIEEAEEAWAHGVELARRDVDGTTDALAYLSLIGSRVDRGEDVSALLADAKRRFPTNHYLRFLEARHHMNGKRFAEALPPLLTLAAIDGETFRDEQCAYNKELFGLPTYEALATCYFRLGDFNESATWYGRAEALAPERADLRAKRVVAASRA

SEQ ID NO: 687 - protein, 247 aa, Unknown
  Description of Unknown: Candidatus Microgenomates bacterium sequence
MAKITAIVLTKNEEKNIKDCLYSLTWCDEIILIDDYSTDNTVAIAEKFGARMIKRRLNGSFASQRNYALEMAKNNWILFVDADERVSDSLAYEIKKAILNENNSGYYISRNTVFLGKEMRGGEWSGAKLLRLGKKNSGLWTRAVHETWEIGGTVELLKSPLLHLSPTSLDKMISSMALYSPLHARSRASENKDVKYFQIIIYPVVKFFNNFFVKRGCVDGVHGFVYSTLMSLHSFLSLATQWIEKKS

SEQ ID NO: 688 - protein, 253 aa, Selenomonas ruminantium
MSRLAVIILTKNEETNIVAAMESAAFADEVLIVDSGSTDRTQELAEKRGAKFVSHPMDESGFAGQRNFALTQTDAEWVFYLDADERITQLGRDVIQDIVAQNSNNVYKVERKNIVFGQLMNYGVHRPDYVARLFPRTAVQWQGRVHEGIKTELPVKKLTDILQHYTYTNWYQYFAKFNRYTSLAAEELAQRDKQISNIGIIAHTLGAFFKSYILKKGFLDGFLGFVMSFMSMAYTLTKYMKLQNIYRLKLDRS

SEQ ID NO: 689 - protein, 254 aa, Paraburkholderia rhizosphaerae
MNEPTLGVAIITKNAAARLAECLQSVAFADEIVVIDGGSTDATVQIAQAHGARVVIDTDWPGFGPQKNRALDALSTGWVLSIDADEIVTPELAVSIAAAIATPRADVYAIDRLSAFCGHWIRHSGWYPDWIPRLFRRGSARFSADLVHERLVFDTRVERLSGKLLHYSYEDFETVLRKLDAYSTAGARQRHAAGQRGSFGKALARGAWAFMRTYVMRRGFLDGRAGFMIAVFNAATVYYRFLKLAHLETQQPRK

SEQ ID NO: 690 - protein, 255 aa, Unknown
  Description of Unknown: Microgenomates group bacterium GW2011_GWC1_39_7 sequence
MPLTVIVLTKNEEKNILDCLEGVFGSDQIIVIDDDSSDRTVEVIESLKKKNIEIFKHKLNGDFAKQRDFALSKAKSDWVFFLDADERVPASLFKEINYKIVNSKHRKINGYYIKRRDVMWNRELRYGETGNIKLIRLAKKGAGGWVGKVHEVWDISGEVGDLDNELIHYPHQSTREFLSEINFYSSLRSKQLFDEGKRVKWYEIILFPKIKFFLNYFIRLGFLDGIQGLALALFMSFHSFLVRGKLWLLEDNEKQ

SEQ ID NO: 691 - protein, 222 aa, Unknown
  Description of Unknown: Candidatus Roizmanbacteria bacterium GW2011_GWA2_34_18 sequence
MKLSAVVLTKNEEKNIEKCLKSIDFCDEIIVVDDYSTDKTLEEIQKLEVKSQNYKSKVKIFKKQLNKDFAFQRNYGLSKATNEWILFIDADEEISENLKLEIKNLKVKKNSGTWMGTVHEVFHTANKVGQINGFLNHYPHPTLKEFINDINYYSFIRTEELFSRGTKTNIFEIIFFPFGKFIYNYFLNLGFLDGPAGFTYAFMMSFHSFLVRAKFYQLTNKQ

SEQ ID NO: 692 - protein, 263 aa, Unknown
  Description of Unknown: Chryseobacterium sp. T16E-39 sequence
MPLTLAVITYNEEYNIVRLLDALCDIVDEIIIVDSYSTDSTKEIILRQYPKAKFFEKKFNGYGEQKNHALKFCSNDWVLFLDADEVPNKELKKSIKQITSLQNPEFCVYKAKFNNHLGTRLIKHGGWGTVSRERLFKKDAAKYSDDKVHEYLVTNQKSGTLEGRLDHYTYKSIHCHVSKINKYSDMMAEKMFDNGKRIKRFKIIVSPVFEFVKVFIFKLGFLDGFAGYYVAKTMSYYTFLKYIKLREKIKISELQKKCSQKNI

SEQ ID NO: 693 - protein, 272 aa, Unknown
  Description of Unknown: Candidatus Yonathbacteria bacterium CG23_combo_of_CG06-09_8_20 _14_all_46_18 sequence
MKKIPCSVEILTFNNEKTIRRTLESVKDFDEIVIVDGGSTDGTLAIAREYGCAIISQDMACKNEDGTIKDFAAARNQGLARARNVWFLFVDSDEYMGAGVVREIGDVARGNATPAGYFVPRKYVFDGRMIECALAYPSFQMRLFHKDAAEKFIKEVHERIKLKNGTETRRLAKPMFVPISVDIRALRKKQERYIAIEQKREGNISIGRFLFLFYHQIKTIMLYLFRMARNAIGCHGSRLPFSYEWGMILYHFKLCAAFARCVRIRKQTWIKA

SEQ ID NO: 694 - protein, 254 aa, Unknown
  Description of Unknown: Chryseobacterium gregarium sequence
MTENVVMDVSALIITHNEEKNMQEVLECFDFCEEIIVVDSFSTDKTVEIAEKFPKVKIIQHPFEDFTKQRNLALDAAKNDWVLFLDGDERITPALRKEIIEELNKAKQKDAYYFYRKFYFAKKPVHYSGTQTDKNIRLFRKSKARYAEGKKVHETLEVNGNIGELKNKLLHFSVNDYESYKEKMIHYGVLKGQELAAKGKKFNPLTQYSKTAFKFFKAYILRLGILDGKEGYQLSYLQSLSVFETYESLRKVQN

SEQ ID NO: 695 - protein, 261 aa, Unknown
  Description of Unknown: Microgenomates group bacterium GW2011_GWA2_39_19 sequence
MKISGIIISRNNEDKIERALKSLNGVVDEIVLIDNGSTDNTIKIAKKYKARVFEDGGKSYSQWRNRGLKEAKGEWVLYLDSDEEVTPGLKKEMQSIIDKDTDTDTENYVAYAIPRKNIILGREMIHGGWWPDYVKRLFRKDALIKWEGDLHEEPVFNGQIGHLKNPIIHYKHNNLSEMVEKTNKWSEIEAKLLLESGHPLMSWWRFIRIMLTEAWFRIVVNRAFLDGTEGIIYAIYQVWSKFISYGKLWEMQKTRINTDSG

SEQ ID NO: 696 - protein, 312 aa, Unknown
  Description of Unknown: Cyanobacteria bacterium J055 sequence
MTSTSAKVPISVLIPAKNEEANLPACLESVARADEIFVVDSQSDDRTCEIAESYGAKVVQFHFKGGWPKKKNWSLDRLPFRNEWVLIVDCDERITPELWDEMAAAIQSGDRDGYYLNRRVFFLGTWIRHGGKYPDWNLRLFKHAKGRYENLHTEDVPNTGDNEVHEHVVLETPAGYLQHDMIHEDFRDIYHWLERHNRYSNWEARVYYNILTSNDDRGTIGANLFGDAVQRKRFLKKIWVQLPFRPTLRFILFYFIRLGFLDGKAGYVYGRLLGQYEFQISAKLYELMNYGGQLNVVKESPKVTKSVAQLNS

SEQ ID NO: 697 - protein, 296 aa, Achromobacter insuavis
MSKIPVSVVVMTKNEERNIAKCLKALADFDEVFVVDSNSTDATCAMAAALGAKVSNFQWNGKYPKKKQWCLEQLPFTHPVVLYVDADEEMTPELAAEIRAALPRFAAGAGGAFVPFDYVFCGRKLRHGHRVYKLALLARDRSRFLDYDDLDVAHMWEVEGHYQPQVQGETFALRARMVHNDHDSLYHYFDKHNRYSDWEANLRIKGLMNDPREANVGARALLKRVFQAMPFKAPISFLHSYVLRLGLLDGRAGFDYAIARAMYYWQIRIKTEEIRKARLAVPEERQQGGTVAGAAK

SEQ ID NO: 698 - protein, 269 aa, Larkinella rosea
MSVLPLPGSPPVSAVMITFNSARILPAVLRALSWCDEIVVVDSGSTDQTLPLAQQFGCRVLHRDFDGFGLQKGFAVSQARNPWVLVVDADEVVSDELRSEIQLRLAEVAAGKRHFHGFEVPISLVFLDRLMRYGGEYKMPHLRLFDKRFGNYNTARVHEDVILTGPVGKLTHHMLHDSYGSLHEYFEKFNRYTTAGARDLLSRGKRGSIAQIIFRLPITFVKAYVIKRNFLNGYPGFIWSLFSAMYPVVKYAKLRELRRSRNPNAALSD

SEQ ID NO: 699 - protein, 507 aa, Persephonella sp.
MKISACIIAKNEEKNLPRLLESLKGKFDEIILVDTGSTDKTIEIAKQHGCKVYHRQWQGFADARNYAVSKASGEWIWHFDADFELEEEEWKKALYYLNNIPENILAVTILIKNIGDNIESAGISSNTFIHRNNPKVKWVGKVHETLNVSESYGIPVFVKHYGFQDSTVLRKKALRNIKLLRQELKELDKNSKQYHIKLFYLVQSYAVLTSYDAKYTKQVIKYATQFINNIVEETKFFDIYVYVYLIEALLKEKRFKEALEKIKEAQQIFPDYLDIIFLEGKVYLELEEYNEAVEAFLKFITLTDQHLKNPFVLSKGHAFVSDKLLNLPYYIENIIPEAVIKSDQYTLEKLINLWKEKKGEYLGILIITTAKKLNQDISKFLNKFINLYNNSSKALSFALVYAEHMGHINTKSKIIKRLQKVDPQNSLLCYFSGKEALEKGKYETALKDLTIYFQKTKNLNIIPDIRKCLINLNLKEELKRFDEEINNLTKKLKTTSDNKTQQKQNRR

SEQ ID NO: 700 - protein, 246 aa, Myroides profundi
MNLSVIIPTYNEEKYIADAIKSVDFADQIIVLDSYSNDKTTQIATDMGCLVLQNKFVNFSTQKNFAIPYAKGKWILFIDADERVTDSLRKEILEVIKNPGEYKAFKLRFPHFFINEFLFHKADKVTRLVYNEGVHFTGEVHEKLHTTEGKTGILKNHVVHLTYKGIFHYMSKKESYSWFQASEQFKKKKKVSYYHLAFKPFYRFFHIYFIKRGYLDKTAGLAGATLDAYGVFARYLKLMLLQKGLK

SEQ ID NO: 701 - protein, 263 aa, Unknown
  Description of Unknown: Flavobacteriaceae bacterium CG_4_9_14_0_8_um_filter_34_30 sequence
MKLQERPKITALLITYNEIVHIQQVLENLAFADEIIVVDSYSTDGTVEVIKAYKNIKLVQKKFNNFTEQRNFACSLATNSWILFIDADERIPQILGDEILNTVSSSNASAAYYIKRKIFFNGKQLRFGGRQTDKIHRLFQKDKAHYRKDLLVHEKLEVTGETGILKNYLNHFPYKDFAHYEAKRKHYARLKAKELFLKKKKSNLFHFCIKPPFTFFQHYILKLGIFDGYPGLVLSYLNAKYVYKRYTYLNKFYAANSMETNYN

SEQ ID NO: 702 - protein, 267 aa, Unknown
  Description of Unknown: uncultured bacterium sequence
MKLSIIILSRNVKNEIIPAIKSSQFADEIIAVDTGSTDGTLDICRQMGVKIVHTTTDSFSKWRNDGAKAAKGEWLLYLDSDERIPVKLAREILTTIQNPDYAAYTISRYEVFLGKHLGHWGDPRVLRLMKRSALVRWEGKLHEQPKINGPVGKLKQQMVHLSHKNIDEKLPNTLVWSKYEAQMLLSAHHPPMAGWRFIRIMFSEFWYRCVRQGLWRDGTEGWIEIIYQMFSKFVTYERLWEMQRKPSLKDTYDNIDRQIISEWEKQE

SEQ ID NO: 703 - protein, 720 aa, Unknown
  Description of Unknown: bacterium 1XD42-8 sequence
MKFNFLFGRMAMKARVKNNKNILLSVGIITKNEEKNLPNCLEGLKPLLMAIPSELIIVDTGSTDQTKEIARKYTSKVYDFKWINDFSAARNETLKHASGEWYMYLDADEWIEDCRDLIAFFSNKSELACYNSASITIRSFVDEQMTEQNDFYAPRIARRFPDTIFVGRVHEYIKVRYQPRKYINCVARHFGYVSDNGKVLNKSKRNLPLLLESLDDPTTDLPHTYTQIANEYVIHGDIDKAMEYQRKGIDSLESDDIPERCALYHELVRLLCSQEKWDEALQIAQEYFSGKKTIYSTDVDIHLFLAIAWKNKNDPVKEQAELETYFRLRQLAEQKALDTADLLAANLCYTTVGYTNLAYFLYAILMNDTEPVKALENLEKIQGWNKVEPKVYIEMENSCVIAAKAWDWYPNHYDVISNDEEWGLQRREKMIEIWKNYPESRDSMAQALAKLDIQDDPFLLEVRLQQNMPDALETLEETLPTMSVTPYEINLLYYAMKENLDIDPFISRIDADELQDYIAVIDDWENAYQVITDYYQNYPNPPSLRGLRWKCTALEHILLQADVTDEVVQQNFISYVQSMTVLARALYKEPSEEALSIIPHVHRFAIYMGRAEAARRANKMAECVQYMVDAANEYPIMKHLVQAQIEAIRQDMNEALQQEQNRDAERASLYLQIKEKLRVLIEAGDFDNAAQILEQYQKLNPTDEAISYFWQKINNPVKPS

SEQ ID NO: 704 - protein, 852 aa, Pseudothermotoga hypogea
MIVKDEEHNIRRALDSIKDVADEIVVVDTGSTDKTPQIVREYTDKLYFHPWKNDFSEARNNSLKYPTCEWVLIFDADEEASEDFRKNIRSFLESLPPDVNTVYLPTLSYLDWDFKRSEVASTPRIFRNGTVYYKNIVHNQAIYKPKVVNANFLIYHYGYIWTRKLKKQKYERTGNLIRKHLQSCKNDQERLYYLVQLYKTEKTGGTLYQASEVGWQALQLLKKLTSVPAIGLEFLYLFSVDLLNAGLYDLAEQLSKTAIQAVPEYPDPYLSLIHVSFKKKDWQTLLKHYDDFKKAVEHASINIEKFGWTIMSFKDVPTADLLAMIAAIEVEDYDKFNEIALERFEKDEDVREDLVQYLLNKASAKDAEKALPGLKKLLEFARRKNLQLNAQAFYEKVVEKRLPVKLEEILLKQITPFSYYLIKRLETNADLLLDFLSSGQHEKLVRENGVGGLLFVYTHLRDDEKKPFLEKFLEDEDSLIKGVAKALYADHLLKESKFLEAIRAYRDSIQLVPELSQFIKPIVEDLKTRLDPTIEGVYEELYRFYAKQKEFMIDFKKYAGNDVSKLYLISDSDVALYVSAVHTDKAEKSVELLSKIKDPSKFPMYHYRMAKFYNKFDKEKAFVHHIKAVETNEKLADLVLGRFSYTGLYPNATLNWFDRSDTIVWVGNISEKFPTLGVIHPIRAWKRAKNGLLYAIPFPIDESIKAYKDLEKEFGIESFAKVKESQLRQALVETNWDNVEKTESLESFEHLFEDLGVETSNDSKRRIVLEGIETQLDLSKLVGDSKEALIFYHFPNLSDENDLVWFYPAFRVLRSSAQMRKELSKLGFHLVKEFFFDRGLRCVWVKREGSDP

SEQ ID NO: 705 - protein, 256 aa, Capnocytophaga sp.
MQPLTEKVSGLIITYNEEKNIKEVLQCLDFCNEIIVVDSFSTDHTVAIAESFPKVKVIQNKFEDFAQQRNLALENVSNDWVLFLDGDERITPELKEEIILTLNSPEKKDAYYFYRLFFFAGKPIHFSGTQGDRNFRLFRKSKCHYVPERKVHETLSVEGTIGTLKHKLLHYSVSDYKSYREKAILYGKLRGEEMFLKGKRYNPLKMYVKMAFHFFKTYILKLGILDGKEGFLLSKVSALSVYENFRSLKQQQNKNN

SEQ ID NO: 706 - protein, 262 aa, Unknown
  Description of Unknown: Chryseobacterium daeguense sequence
MPLSLAVITYNEEENIVRLLDSLKDTVDEIVIVDSFSTDKTKEICTQKYPQVKFFEKKFNGYGEQKNHALNLCSKEWILFLDADEIPDETLIHSIKKIISSEQPEHKVYKAKFNNHLGIHLIRHGGWGNVCRERLFRKNCAKYSDDKVHEFLVTGEKAGLLEGKINHYTYKSIHHHIVKINKYSDMMAEKMFERGKKINRFKIIASPIFEFVKVFIFKFGFLDGFPGFYIAKTMSYYTFLKYIKLHEKIRLMELEKKHGKKC

SEQ ID NO: 707 - protein, 284 aa, Parageobacillus thermantarcticus
MNTNISVLINTFNEEKNIRNCLESVKWADEIIIVDMYSDDRTVEIAREYTDKIYMYERMGYADPARQFALEKASNEWVLVVDADEIVPIRLRNKLIEIAESGKYDAVLIPSINYFFGYKMKGTGWGPLQDMHIRFFKKKFMNYGTRIHNFSNLDPSARVYKLKDESLGFIHFNYIDVEHFLEKLNRYTTIEAKNAVDAGEKFSVTKLLIIILKEFINRFIRRKGYADGFQGFALSMLMVTYRLSASLKHYLIEKYSCKEVREEVLRQYDIIANREIEKYKNTKV

SEQ ID NO: 708 - protein, 257 aa, Unknown
  Description of Unknown: Candidatus Berkiella aquae sequence
MTKLSIIVITKNEAHNIGDCLASVAFADEKIVFDSGSTDDTVSVCQQYTSRVTVTPDWPGDGPQKNRALATATGEWVLCLDADERVSEALAQEILAAIQNDRGFAAYEIPYQSTYCGKPLRFGDWRNESHVRLFKRGLASFTENIVHCHLQVHGKTGKLKHAIIHHPFHHLGAMLFKLNDYSTQSAKALFAKGRKATLTTALSRSLWSFFRGYFLKLGLLDGKEGFLLAVSNAQGTYYRYLKLMYLWQAHQNKGTCR

SEQ ID NO: 709 - protein, 261 aa, Unknown
  Description of Unknown: Candidatus Omnitrophus magneticus sequence
MKKTPLTVVVITKNEEENINDCLASAEWADEIIVVDDESRDKTIEIAKKYTDKIYSRKMDNEGRHRNWAYAKASNDWVLSLDADERITEQLAEEVTNLLKGSPVYKAYTIPRRNFIGKYWLKYGGEYPAAQTRLFLKKEFKYEEAEVHPRALLDGDTGHLKGDIIHYSHSDIADYLKSLNSHTTLEAKKWYAQGRKMSLFHALWRAFDRCFYRRIIRKQGYKDGIYGWTVAIFSGFYQIVSYLKYREMIELNKNNKPAKVK

SEQ ID NO: 710 - protein, 251 aa, Unknown
  Description of Unknown: Candidatus Riflebacteria bacterium HGW-Riflebacteria-2 sequence
MLSAVIITKNEEHNIKKCIDHLIDWVDEIVVFDSFSTDRTVAVLEEFRSAKIKVTQIEWQGFARTKNLAVEAASGDWILSVDADELVTPELRAEIQRLVGTAEREGYLIPRLLYFCNRPVRYGGSYPDYQLRLFRKDAGRFEETPVHESVKLSSQPGRLKNHMLHYSYRTMFDYWARLNRYTELDAEKKFRQGKRFRFYRVFVLQLEIVKRLFLRMGILDGFPGIFYHIFSAVSSLVKYAKLWEYQETINS

SEQ ID NO: 711 - protein, 257 aa, Capnocytophaga ochracea
MSTITEKVSGLIITYNEEKNIGEVLPCFDFCDEIIVIDSFSTDNTVAIAQSFPKVKVIQHKFEDFASQRNVALQHAQNDWVLFFDGDERITPELRTEIIQTLNCTDKKDAYYFRRLFFFAGKPIHFSGTQGDKNFRLFRKSKCHYIPERKVHETLAVDGTIGVLKHKLLHYSVADYPSYRQKATLYGKFKGEEMYHKGKRYSALKMYAKMAFHFFKTYVLKLGFLDGKEGLLLSKVDALSVYENFTSLKKYQQNHNL

SEQ ID NO: 712 - protein, 256 aa, Unknown
  Description of Unknown: Flavobacteriaceae bacterium UR159 sequence
MTKISGVIITFNEEKFIENCLKSITGVVDEIVVVDSFSTDRTKEICLQYGVRFIENKFIGFTDQKNFANDQAQYDYILSLDADEALSEELKKSILEAKNNFVHDGYSFNRLNNYCGKWIKHSNWYPDNKIRLFNRHKARWKGENNLHEIIVLDEPKSKENLNGDLLHWAYDSIDEHYQKVRSYTNIAAQNSFKRKPNKKIGFSKIVINPFWKFFKNYFIKKGFLDGYQGFVICCFASFGTFLKYVKIKELQQKNNR

SEQ ID NO: 713 - protein, 256 aa, Unknown
  Description of Unknown: Flavobacterium anhuiense sequence
MNSEKQKLSVLIITLNEEQHIKSLLEDLDFADEIIVVDSYSTDKTIGIIESFTNVKLIQNHFVNYTSQRNFALDQAKNQWVLFIDADERLTPELKSEIIATFNSKKTASAYFIYRIFMFEDSRLNFSGWQTDKIFRLFDKSKCRYNEERTVHEKLIVKGPIASLKNKIIHFSYSSYEDYKAKMRNYGILKANEKFSKGIRPYFSMLFLHPLYTFLYQFIMRFGFLDGRKGIIVCYLNAYSVYIRYKELRRITSSRI

SEQ ID NO: 714 - protein, 276 aa, Parabacteroides gordonii
MEKIPVSVIIPVKNEEKNLPRCLSLLKDFSEVIVVDSYSTDKTPQIAEEYGCRLIEFTWNGRFPKKRNWVLRNVELQNTWVLFLDADESVTNDFIVCVRKTIERTDYCGFWIYYNDHFMGRQLKHGVKMRKLALFRKDKGEYEYIDEHSWSHLDMEIHEHPVIDGKVGVLPVPLIHNDYKGLEHYIAKHNAYSTWEVHRFFQLIKSETPLTFRQKVKYFLLDSWFLAPLYFLYAYFFRLGMLDGRAGLLFSLYKMQYFFQIKSKIIELKRISVINN

SEQ ID NO: 715 - protein, 281 aa, Paenibacillus sp.
MEKIPLSVIIMTKNEEKNIRKCLNSVSAFSQIFVVDSGSTDRTVEIASAMDATVVPFDWNGKYPKKKQWCLDNLPFAHDYVLYVDADEEVVPDFEREVRGLFERGNLKDGYFVGFYILFMDKLLKHGHRSYKLVLFNRHKGRFLDYDDLNASNMWEVEGHYQPEIQGSTAVIGSCLIHHNHDSLYDYFHKHNRYSDWEAMVRSNGAYSNLKESQIWIRALQKKLFHKFPLKWVVSFLHSYVLKMGFLDGSPGFHYALARSLYYWQVEIKIKELYYMKERSV

SEQ ID NO: 716 - protein, 256 aa, Unknown
  Description of Unknown: candidate division GN15 bacterium sequence
MKKLSVIIITHNEEENLPRCLESVKWADEVIVVDSHSTDRTPQIAADFKCQYYDLDWHGFGAAKQAALAHASGEWVLSIDADEAVSEELRASITSGINGKSEYRGYEMARRTQFLGRWIRHCGWYPDYILRLFRRDSGRFNPLVIHESIAVGGPVGRLKGDLLHYSYPNLEKYFAKSNRYTTLGAEEALRLGKRAGIIDLLFKPPISFFKHYIQKGGFLDGTQGLLVSWLSAAAVFNKYAKLWHLSKRADVTNGKK

SEQ ID NO: 717 - protein, 282 aa, Unknown
  Description of Unknown: Nitrospirae bacterium sequence
MRRRFNRRGRAVKQFSIIILTFKEEENIRRCLDSINDFTDDIIIVDSFSTDATLKICEKYGCRVFQHAFTNQALQFNWALDTVPWERPWILRLDADEVLPDKLKQELRELTATCGPEVMGIYLNRRMYFMNRWLKHGGMYPHYILRAFRKGAGRYEEKTEEHFVLTSGRAIYAKNDFLEDNRQNTLKYWLKKHDDLSDGEIRDTLLETRNPGLDLKEDLFGNKVERTRWLKTRVYANSPLFFRAFFYFIHRYFFRLGFLDGVPGLIFHVLQAFWYRFYIDAR

SEQ ID NO: 718 - protein, 872 aa, Selenomonas ruminantium
MKLAACYMVKNEEKNLARSLGSIAGVVDDIVVVDTGSTDKTKAIAAGFGARIYDFPWQEDFSAPRNFAIEQTDADWILFLDADEFFAAKPAIKEFLSSQQKLPDAYMVMRRNQEDGQDKDAGLGTDWCCRLFRRARELRYQGIIHEQLTRADGGICIANLPKEIYLWHTGYQHGLIEEKLRRNLKLLEKDSREKGETPHHWLHMIDCYFGLGDYQRAYQYALKVRQSELEIFNNEAHLYHMLIESMRQLKLPAQDMLPYAEEALQKYPTMPEFHGEKGMILCALGELKEARQELETAIVCYQHPERWPAQTGYFTKKSAAVVRARLEELYQLEQEQESKVEQSRITACYIVRNEADNLARSLASIKGQYDDLIVVDTGSTDTTKAVAQEYQARLYDFTWQDDFAVARNYALDQVKTEWVLFLDADEYLRPDSPSNLHDLVARAGNYEVLLLAMQNIEPTSDEVLMEFWAPRCYRYRQERRYVGAIHEELRDNGAVIESVVRVAPEEIMLIHTGYAAAVSKEKATRNLLLLHKAMEQEAEPQRLYRYLAEAYDGIGDQKSAEAWALRDVAQGRQPVVYASASYRLLLRYYAQSEQQENRYILAANAVREFPEVPEFHAELAECLASMEKWAEAEQQADLAERTYVNRTGAEPVMFTDEMLDTLRQRRKTWQENISIGNDEVLSVLRRAQQEKSGQYPQKLLTALADNVPQLTRALLALEREQTSAVQALLGRGEKLLPAAMAQVWAAYRGLQGVLPSADGYGLMLKEALVYGDESQRQRFLQLSLQMTTAEVYQAAEAAFQEELWEEAFRMYETIPADAPEVTAEFWHHAGICLYHLRESAAAIECLQRAQALGCRNRSIPAYIQWSQELSHD

SEQ ID NO: 719 - protein, 281 aa, Unknown
  Description of Unknown: Candidatus Pelagibacter sp. RS40 sequence
MLANITAIILTYNEEKHIKRCILSIKKFVKNIIIIDSFSTDQTLEIAKKFKVKIYKHKFINQAKQINWALKKIKFQTSWILRIDADEYLTKELKKEVKTHINTLNSNYDGISFNRVIKFLNKEIYYGGTSPHKTLRIWKNKKGKCENVWMDEQIIVKGKVFHLNQNLIDENLNDLKWWKLKHRNYAKREAISFLYNKKNKNKSKFEKKLNNVRKSKHLKEKIYYKFPIFVRPLLFFLYSLIFKLGIVTGWQGLVFYYYQTLWFRLLVDINIFKLSWLFRKK

SEQ ID NO: 720 - protein, 259 aa, Unknown
  Description of Unknown: Deltaproteobacteria bacterium sequence
MNGNNNQRQKLTVLIPCYNEEKNIEACLQSVLWADEILVVDSFSTDRTLDIVRQYTDRILQHEYINSASQKNWAIPQAKHDWVLIVDSDERIPLVLSDEIKEILRKGPDKDGYWIGRKNYLMGKQVKYSGWGRDRVLRLFRRDLGRYQEKRVHAEIKLKNTRLLMTHLEHHSISSMTSWVAKINRYSSWKAKDKFEKGISAPVFHLLFRPPFRFFKDFVLRLGILDGWRGFLISAMSSFAELVMAAKITQITLKSRQNH

SEQ ID NO: 721 - protein, 319 aa, Sphingomonas sp.
MSGGRYRHVAGSAQLVSAAAVPRYRPAAARLRARRVPALDRNFRMSVLPVTVVVPTKNEAKNLQQCLSRLGDFAHVWVVDSGSTDGTQQIARDYGARVIDFDWAGGYPKKRNWVLLNEQFKTPWVLFLDGDEQVSAAFVRELASALTETDKVGFWLNYTTHFMGKVLKHGLPQRKLALFRVGAGLYERIEDPGWSKLDMEVHEHPQLDGAVGEIAARIDHLDFRGIEHFIARHNSYSTWEVHRRAQLMADTGGAWARLTKRQKTKYRALDKWWFAPAYFLGTYIAKRGFLDGAAGLHYALMKFAYFHDIKLKIDERAGQ

SEQ ID NO: 722 - protein, 273 aa, Adhaeribacter sp.
MISVIILTKNEEKDIPLCLTSLHWCDDVHVLDSGSTDKTIEIAKQFEAKVWNNVFESFGKQRNYALDHISSKHNWILFLDADEIVTDKFKLAMYEAINIANIEVAGFYCCWKMMLEGKWLKHCDNFPKWQFRLMRKSRARFTDFGHGQKEDKVDGQIKYIKEPYLHFGFSKGWYQWIERHNKYSTLEAVARLQNPQSIKNIFARHGSVRNQALRSWLSKLPGWPFLRFFHAYFLNFGFLEGIPGLIYCTNMGYYEFLIQIKIRELSRNRVNKK

SEQ ID NO: 723 - protein, 253 aa, Nitrospira moscoviensis
MPLSIVVITKNEERNIDACLGSIRWADEIIVVDACSDDRTVDLARRYTEHVVVREWPGFGPQKNFAMDQATSEWILIVDADERVTDVLRDEILRTIGGTVPDEVAAFEIPRRNFFYGRWLRGGGVYPDYQIRLLRRGAGRYDDTLVHERLNLHGRISRLTQPLDHYSIPTVGHHFRKIARYTTLAASEKLKAEIRISPAQVAWHHLGTFLKVYGVRKGYIDGTPGLIAALFAAMYTFVKYAKAWALVEQRGKG

SEQ ID NO: 724 - protein, 257 aa, Capnocytophaga canimorsus
MKISVVINTYNAEKHLQAVLETVKDFDEIVICDMYSTDKTIDIATKYNCKIVYHQNTGYAEPARNFAISQAKNEWILVIDADETIPPKLKKYLYSIIETPDLGGVYIPFKNYFINKWIRSAYPDYKLRFFRKEGAFWPPEVHSTVKVQGKIIKVPRNQTNLASEHLANDSITTILQKNNTYSTAEIVRKKDKKITWFLLICSPLFWFIKFYFIKKGFLDGKRGFIFAVLKSQYKFLCLAKVYEYQSLNNRKNEDLRD

SEQ ID NO: 725 - protein, 253 aa, Azovibrio restrictus
MAQLTVCLLTHNSLRTLAPCLTPALEIADELVVVDSGSSDGTLEYLAGQGVTPIHRPYKTHAEQMNFAIAQASHDWVLCLDSDEFLDPETLAAIRALKPQLSDPDTAYRIRRYWRVLGREVHGIYPVSSPDFPLRLFNRQKVRFNDVPVDDKATGARKRIVLPGHVVHDTFFSLHEVFAKLNGYTSRLVRFQEVPPSLGRAFFSPPFAFLKWYLRKGGWRDGAVGLVTGAYAALYTFLKYFKSWCRARGIPLQ

SEQ ID NO: 726 - protein, 258 aa, Unknown
  Description of Unknown: Candidatus Omnitrophica bacterium CG23_combo_of_CG06-09_8_20_14 _all_41_10 sequence
MEKINLSAVILTKNSELIIEDSLKSVCDWVGEIVVVDDMSTDKTLDIVRKYTDKIQIRKWDREGAHRNFAYSLAKFDYILSLDSDERVTPELRDEIIGIFKEGPKFVGYNIPHRNFIGNYWIKYGGWYPNAKLKMYVKKGFRYEEEAEYHPRAFLEGKTCTLKSDIIHYAYRDFQNLFSKLNHQTDFEAKKWVRDNRKMSFSLCMVKAISRFIKFYYVKKGKKDGFIGFMMALASAAYQLMTYAKYWEIKKKTCGFCK

SEQ ID NO: 727 - protein, 252 aa, Chlorobium sp.
MADNISVTILTKNSAASLVECLTALEAFSEVVIVDTGSTDETISIASGFRNVILYQHPFIGFGPMKNIAVDRASNDWILSVDSDEVVTTELVDELLSLKLDDNVVYMMARDNYYHRRLIRGCGWENDRVERLFNRQSTRYNDKQVHEGLAMSGNLKTELLTGRLKHYPYDNASQLLHKMQHYSTLWAEDQRGRKKASPLKALFYGVLTFLKSYLLKQGWRYGYEGLLISVSNANGVFYKYIKLYEVDRECHL

SEQ ID NO: 728 - protein, 297 aa, Paenibacillus pini
MVNKIPVSVIIMTKNEEKNIRKCLLSVVDFAEVFVVDSGSTDQTQSISEAMGATVVDFQWNGQYPKKKQWCLDYLPFQNDYVLYVDADEEVTAELAAEIKGLFANGAPLNGYFVGFDLVFMNKVLKFGHRMFKLVLLNRHAGHFLDYNDLNASNMWEVEGHYQPQIDGSTGVLKSSMVHYDHDSLFDYFAKHNRYSDWEAVVRSNGAMSNLNESQIWIRTLQKRIFHQLPLKWAVSFLHSYVMKLGFLDGAAGFHYAFARCVYYWQIGIKIKELRYRTEQALGAELEGDLRKVHEGA

SEQ ID NO: 729 - protein, 255 aa, Unknown
  Description of Unknown: Deltaproteobacteria bacterium sequence
MNREKLTVTIITYNEEENIRDCLQSVKWADEIVVVDAESTDRTVEICKEYTDKVFLNPWPGHKEQKNFAISKASNLWVFSIDADERVPDELKNFILEELKNPVFDGYRFPRQNYFLGKWLRHGGWYPDHVLRLFRKDKGSFGGINPHDKVIVKSGKVATVSVPIIHYTYKSISQYVSKQNLYSSISAKQLPVSNKKVTISLFKVVVKPVWKFIETYFIKAGFMDGIRGLITAIGASYASFLKQIKIWEINNLSRE

SEQ ID NO: 730 - protein, 303 aa, Unknown
  Description of Unknown: Candidatus Gottesmanbacteria bacterium GW2011_GWA1_43_11 sequence
MHKKISAVINTRNEEANIVRCIRSVVPYVDEVVVVDMESTDDTVKLAHQYTSRIFKHKNTDYVEPARNYAISKAQGEWILLVDADEVIPDTLGLKLRKLTEGEYSYFGIPRKNFIFGTWIQHSGWWPDYQIRFFEKNAVSWNDEIHSIPVTTGKGIDLPATEAEAFMHHHYVTIEQYIERLNRYSTQEVRQLLRDGVHFEWKNLIAKPTNEFLSRFFAWEGYKDGVHGLALALLQAFSFLVVQLKLWEQQKFETHTPQNFLDESNEVLKRSYNDITYWYQTTKYQEAEGVSKTLAKIRSKIKL

SEQ ID NO: 731 - protein, 262 aa, Algoriella xinjiangensis
MSTKISALLITYNEEKNIQRYLNNVDFADEIIIVDSYSTDKTEQIALQNPKVKFVKRKFDDFTNQRNYSISLANNEWITFFDADEGIPDELKEEIISTINNNPQFDAYFVYRKFFFKNKHIQYTGMQNDKAIRVFRKSKSQYRLDRMVHEIVECKGEVGFLKHKLDHYTFDNEQEYLAKLNSYSKLRAQELHLKKLVPSFFHYNIKPAYRFLSYYIFRLGFLDGKEGYTISKLHAISVANRYRYLDDIYREEKSKTSIKIEV

SEQ ID NO: 732 - protein, 642 aa, Unknown
  Description of Unknown: Geobacillus sequence
MKPFVSLCMIVKDEEKVLQRCLDSVYGIVDEIIIVDTGSTDSTKQIALKYTNKVYDFEWTNSFAEARNFAQQQATGEWILVLDADEYVERANLQAMIDVLKQTDESVEAYDVVIYNFMGVYGERILQHRHTRIYRNCPHLRYDRAIHEQLQRVNGEYVQAKQGILTVYHTGYMHQAVVEKKKHDRNAPLIEREIQAGESVAFDYFNLGNEYLSKGEIEKALESFVKAYQEKKDIRLSWVSYCLVQIILCLKYLKRFEDALRVITDAETLYSETADFPFLRGEIYYLQHRYDDAAKQLEYLLENKSKYPYTIKTFEYVEYDPHMLLGHIYRHKGNLQKAMYHYSSALSFNRKSYEALYHVLQLLARAHHQEEMIQFIEDKQLANDELAISLILRIASVLHLEKVIQWYALKLSDETARRGFQIKVNILQKNYERALQQILKSSVSNLQTYIRTGSLDSYDLLVTAFKTNQLDVVRLLLHLVSEQKEKEFLLFMMNEYKEASEPMFYLLLLERTIQLKEYELFEQFFALSDKFPASVHIQIGHLLHRYEFMDVALQLYRSVENMSAWDAESFVNVIEALAVKNETIEAVQYGLLAISFGHRDFRLYKYVIELMNICGISEERKKVVQQAKRIYPDSEWLKEKEK

SEQ ID NO: 733 - protein, 260 aa, Bacteroides neonati
MMIDPKISVVINTYNAEKYLAEVLDSAKGFDEILICDMESTDRTCSIAKEYGCKIVTFEKKNHHSAEPARTFAIQSASTEWVLVVDADELIPEDLKNYLYKCIKEPDCPAGIYIPRKNYFMGKFMHCHYPDYLLRFFRREGTVWPPYVHTFPIVKGRLEKIAKDQHHLAFVHLANDGVRDIVRKTNQYTENEIEKKKKKRYGTMALLHRPLFRFFKTYILKGGIRDGKEGFIRACLEGYYQFIMVAKILENRKGKSSIHK

SEQ ID NO: 734 - protein, 253 aa, Burkholderia sp.
MTPLSVYILTYNSERHLDKVLAAAKRIADDLLVVDSGSKDATLAIAAKHGARIAHRTFDNFRAQRLFANSLCLHQAVMFFDSDEIASEALIDEITALKASGFSHDAYVVRRDWIVMGTRVHALMPIGCPDYPIRICHRDKTDFTEHSVHETPIGYESVGRVESPMVHHTFETKSELMRKLDFYTDLAATDLLARRKWIGLLLLKQWTSPVGAFVKWYVRSGNWRDGRVGLALGLYALKYTHRKYRKAILLTNS

SEQ ID NO: 735 - protein, 245 aa, Lacinutrix sp.
MTKLSVIIPTYNEQDYLENALRSVRFADEIIVVDSMSTDRTVVIAEQSGCKVISRKFDNFSNQKNHALAFATGEWVLFIDADERIPYPLRQEILEAITSEKHAGYKLNFPHFYMNRFLYHHSDNVLRLVKRENCRFEGLVHEKLIIDGSIGKLKNPVLHFTYKGLQHYISKKDTYAWFQAEQMLKKGKKVTYFHLAFKPFYRFFNSYILRGGFKDGIPGLTVATINAYGVFSRYVKLLLLQRGIR

SEQ ID NO: 736 - protein, 281 aa, Paenibacillus senegalensis
MQNPIPVSVIIMTKNEQRNIRKCLQSVREFAEVFVVDSSSTDKTVEIAQRMGAAVIPFEWNGGYPKKKQWCLENLPFKYDYVMYVDADEEPSPKLIEELRSLFAGGKLKAGYFVGYDHMFVKKVLKYGHRMYKLVLFHRKKGRFLDYDDLDAANMWEVEGHYQPQISGETGVLKNTILHSDHDSLFDYFAKHNRYSDWEAVVRSNGAYHNLNESQIKLRALQKKMFHRMPCKWVFAFLHSYIFKLGILDGAAGFHYAFARSVYYWQVGIKISERQKEKLPT

SEQ ID NO: 737 - protein, 279 aa, Trichormus variabilis
MSHLCQVSAIILTKNEVCNLERCINSLQWCQEIIVVDSGSTDGTIQLAEALGIKVFTHIQPPPFKISEQRNWALENCQLKSEWVLFLDADEIIPPDLAAEIQRICSANNQEYNAYELPARYLFWGKWLKLTQGYPNWHSRLLKLGEVTFTGGVWEHFSAGTKVSRINIPYDHYANSKGFGDWLERHNRYSSWDAQKVVDFLETGKTSALGTERKLKLRLLAAKLWFMRPIVRFIQMYFLRLGFLEGITALIFCLLYAMYEFMTVVKIIELRRKKSGLPL

SEQ ID NO: 738 - protein, 271 aa, Unknown
  Description of Unknown: Planctomycetes bacterium sequence
MKEKLTVIIPCKNERLNIRPCVLSAKLVADEVLVADSGSTDGSLDIVREIGGCRIVEREYINSGNFKNWAIPQATHPWVLIVDSDERVSDGLAREINALLAEGPTRDGYHIYRENYFLGHHIRHAGWGADKVLRLFRRDLGRYEGESDHAEVHVRDGNVGYLRHRLLHYTYWSYDQYFRKLHRYTVQGAQNKYAAGKRASFWQMLLAPPLRFLHCYIFRLGFLDGLAGLQISALTGMSSFIKQLRLWEMEHRLDQPDPEAEHAADQSRHAA

SEQ ID NO: 739 - protein, 291 aa, Unknown
  Description of Unknown: Candidatus Collierbacteria bacterium GW2011_GWB1_44_6 sequence
MKTKRQTISVTLATYNEEANIAACLESVKDFADEIVVVDGYSTDNTAEIAKKLGVKVILRPNNPVFHVQKDIANRSAKSDWILQMDADERVTKEMVKEILGILEGSYFGYDSWISPLKSSINKIIKIFSEPQLLRSPASAYYLPRKNFFLNRYLENAGQYPDPVIRLFQRGKARLPAKDVHEQMIVKGVTGWLMSDLDHLATPNFSRYLLRENSYSSLHAHQLKDAGVKVNLFNTLNYLFFKPLGTFLSLYFRYRGFLDGFPGFVFSLYSGLHHAFSYMKLWEIYKDEEYK

SEQ ID NO: 740 - protein, 314 aa, Unknown
  Description of Unknown: Saprospiraceae bacterium sequence
MPNQQPPTDKRQFSFIVLTYNEEQHLPRLLASIAPLQAPVFVLDSGSTDGTLGIAQKYGAITAHHDFVNHPRQWDFALHHFPVATPWTIGLDADQTVTPELLALLQNFSDDAVPAHVNGIYFNRKNYFKGRWIKHGGYFPKYLLKMFRTGVGHSDLSQNMDHRFVVPGETVVWEKGYLLEENLKENEIEFWIAKHNRYSTLQAQEEIGRKNGWLKQTTEARMNGDPDQKTAWLKAIWWKAPLFLRPFAYFIWRYFFRLGFLDGKQGLIFHFLQAFWYRLVIDIKMDEIQNKKAAHPSMSSPMTHKSTIDVHTRH

SEQ ID NO: 741 - protein, 252 aa, Nitrospira sp.
MNQTKVSAYVIAYNDEPNMRPCLESLRWVDELIVVDSHSTDATAKISQEYTDKVFQHEFHGFGRLRNEAVAHATHEWIFSLDTDERATPEIRDEIRRVLDEGPKADAYFVPRRNYFLGRQIRHCGWYPDYRQPQLFRKSRLRYREEAVHEGFELNGQAGYLREHVLQYPFRDVDHYLAKMDRYSGLMAERMVKRGRRFSPHQLFTHPTFTFCKMYLGRGGFLDGTPGLILSGLYAYYTFIKYAKLWELTKRN

SEQ ID NO: 742 - protein, 264 aa, Unknown
  Description of Unknown: Flavobacterium sp. 1 sequence
MTANSPVKKLSVLIITLNEEEHINALLPDLDFADEIVIVDSLSTDRTEDISKSFSKVKFLQNKFENFSTQRNFAIEQAKNDWVLFLDADERLTPELKQEIIDTLQNTPHYSAYFFERTFMFENSILKYSGNQTDKIFRLFDKKFARYDKRRLVHEKLIVNGEIGFLKNKLIHYSFSSYNEYKEKIIFYAKFKAEEKFIKKTKTTFLHQLFHPSYNFFYNYIIRLGFLDGKKGIIICYLNAYCITVRYRELKKLWRQNQNLTSKT

SEQ ID NO: 743 - protein, 258 aa, Smithella sp.
MPLSVAIITKNEEENIRACLESVAFAGQIVVVDSGSTDATLAIAAEFGCDIYREGWFGFGRQKQIAIDRCVKPWVLLLDADERIPPETAEFIKEIVMSSDAKTAGFSFPRKNYFQGRWIRHAGWWPDRVLRLFRRDAGRMTDAAVHEAVEVRGAVKNLDAVIEHYTESGLDKILQKIDRYSTLGAQEAFAAGKRSSPASAFFRAALTFLQDYFLRLGILDGRQGLTLAVTDSVNKFFKYAKLSELQRKSRRAGKDSCR

SEQ ID NO: 744 - protein, 251 aa, Unknown
  Description of Unknown: candidate division Zixibacteria bacterium RBG-1 sequence
MEMLSVIIITYNEEKNLARCLGSLTFADEIIIVDSHSTDKTKEIAQKYTDKIWEVNWEGFGKTKELARQKASHAWVLSIDADEEVTPKLQEEILRAVQNNSYTGYFVPRQSLFLGKWMEHSGWHPDYVLRLFRKERGQFDTALVHEQAQVKGEIGYLKNPLLHYTYPNLKHYFKKLQRYTTLAAQQLNERKVKAYPWDLVFRPPATFFKMYLIKLGFLDGWLGFVLAILSSYQVLIKYLKLLGLNFRSQNV

SEQ ID NO: 745 - protein, 272 aa, Unknown
  Description of Unknown: Deltaproteobacteria bacterium sequence
MPSMAAVNNPAEIRPTVSAIVVCYNEEDRIEDCLESLRWCDEIVVVDAFSTDRTPEICRRYTNHVIQRRWAGYRDQKAYAHSQTTKDWVLLVDSDERVTPRLRDEILHALTSDKGQFAGYSIPRLMHYLERWWWRGGWYPDYDVRLFRREKATWGGSDPHEKILVDGKLRRLQNPLHHFSYRNIEDHLSRINRFTSVSSHELKKDGVRWRLSDAVLRPIGRFMRSYILKRGFMEGFAGFYVAISAAVYVFLKYAKLWELELEEKKKIERKRS

SEQ ID NO: 746 - protein, 293 aa, Unknown
  Description of Unknown: Candidatus Amesbacteria bacterium GW2011_GWC1_48_10 sequence
AWNEEKNLPTVVNSVRRLADEIVVVVDKSSTDKTAAVAGKLGCKVFWHPHTGYVEPMRNFSISKATGDWILVLDADEEVPPKLAVQIKDILKQPAADYYRLPRKNLIFGKWITSQHWWPDYVYRLFKKGHVTWEDAIHSVPFTKGSGADLPADENLALIHYHYTGIGQYVDRLNRYTDHQLKHLQQNNHRFLPSDFLIFPFREFIRQFFARRGYRDGLHGLTLALLQAFSELVLYLKFWEQLKFPETPFNPGNLVSELRTTNSELTWWYYQSKIDTSSIFLKPWWKLVRRLKL

SEQ ID NO: 747 - protein, 262 aa, Unknown
  Description of Unknown: Chryseobacterium hispalense sequence
MVLSLAVITYNEEDNIVRLLNSVSDIADEIIVVDSHSTDRTKEICLQDYPKVQFFEKKFNGYGEQKNYALELCSGEWILFLDADEVPDNDLKKAIQQVISQQNPEYSVYRAKYNNHLGIHLIKFGGWGNVCKERLFRKGSAKYSDDKVHEFLITNEKPGFLEGKINHYTYKNIHHHVTKINRYSDMMAEKMFERGKKINRFKIIINPVFVFIKVFIFKMGFLDGFPGFYIAKTMSYYTFLKYIKLYEKIRMIELEQKYGNFL

SEQ ID NO: 748 - protein, 245 aa, Unknown
  Description of Unknown: Bacteroidetes bacterium sequence
MARLTVIIPTFNEEHYIEDCLYSVKFADEIIVIDSFSTDGTVAIANKNNCKVVQRKFDNFSNQKNHALQYATCDWVLFVDADERIPYLLKTQIFDAMESGKHNGYKLKFPHFFLNRFLYHHYNYVTRLVIRTECHFEGSVHEKLIINGSIGKLDSPVLHFTYKGLQHYINKKDSYAWFQAKQMRGKGKKATYFHLAFKPFYRFFSSYVLRGGFRDGIPGLAIAGINAYGVFSRYAKLILLQKGLK

SEQ ID NO: 749 - protein, 250 aa, Nitrospina sp.
MLSIVIIAKNEADKIRECLESVQWADEIVVLDSGSTDSTVKICREYTDKVFETDWPGYGPQKNRALEKATGDWILSIDADERVPPELRSEIEQAVKSERYKGYQIPRSSYYCGQRIRHSGWWPDYTPRLLRQGSGKFSNSLVHERLEIQGPVGYLRNPMIHYSFDDFEDVLNKMNWFSTQNAKMLLESGKSSGLLKAVVRGLFVFIKTYILRAGFLDGRRGFMLAVSNAEGTYYKYLKLLLLREKQSQKK

SEQ ID NO: 750 - protein, 277 aa, Unknown
  Description of Unknown: bacterium (Candidatus Blackallbacteria) CG13_big_fil_rev_8_21 _14_2_50_49_14 sequence
MSLSACLMIKNEAESLPRCLESLQTLASEIIVLDTGSSDQSLQIASAFNAQILQRPWSGHFAQTRNQVLQAAQGDWILNIDADEWLEPESSQALQAFLKQAPPAIYALRWQQAPDQPPSRKAVLFPNHRGVVYLGRVHEIPWDPSGQLPYQTLNHIELAHAPRISPLSAQKVKAYRHLLAQDLEHPNPIERFHALRHWGQSELILQNDRAARAAFLAAWELFRHLPAPCYAWGSTVLEALLFLACETEQAEEYSFWRKVYAQAYPENPRLSSLPLEL

SEQ ID NO: 751 - protein, 313 aa, Dethiosulfatarculus sandiegensis
MAGKISCIVHTRNSEATLEKALSSVDWVDELVVVDMQSEDETLKIAANYADRILKAEPAPRIDGVRNTFLKELNHQWALVLDSDEYLALDAAQNIKSLIKQHGDNFDAFAFPRFNYLAGVPLMGGGRYPDHQIRLFRNGSVKWHDSNHQLPEVITGPDRLMKLTPPNCLHIHHPNYENLQEFMAKQISYALNDTYPQDPAAFEFSEYIARAHEQLALRSEPQTDGDVSHALALVMAWDSLLRGLIHWDRLDPKPPLNYLSALPAGATKVPHSKIALRKMLGRHLAWKHILAALVYRLRRLLHKFKPGRKRDSQ

SEQ ID NO: 752 - protein, 229 aa, Unknown
  Description of Unknown: Candidatus Aminicenantes bacterium sequence
DEIIVVDSMSQDKTVEIAREYTDKVYQKAWHGYVEQKNFAISKARGNWILSVDADEEITATLRKEILTETAKADAKDGYRIPRRSFYQGRWINHSGYYPDRQLRLFRCVRGNWTGGRVHEKVDIQGSIGDLKNDLLHYPYKGVISGQLQTVNSFSSLMAEDMYEKWKRYHISLLFLRPTFKFFEIYILKLGFLDGLAGFIIAVTSAYAMFVRYVKLRELWNRLGNQTTL

SEQ ID NO: 753 - protein, 258 aa, Unknown
  Description of Unknown: Flavobacteriales bacterium sequence
MQIQLSVVIITFNEEKNIARCLDSVVKVADDIVVVDSYSTDKTKKICLSFDRLRMTKLNFVEHKFEGHIEQKNWAITQAKHQYVLSLDADEALTEELQQEIINIKNNWQADGYRFNRLTNFCGTWIKHCGWYPDKKLRLWDTTKGKWGGDNPHDKVIMEKGATTKHINADVLHYSFYTVEQHLKQIDYFTDISSKAAFEKGKTSSGLKIFYKSTFKFIRDYFLKLGFLDGYYGYVVCKNSAYAKRLKYAKLRELNRNS

SEQ ID NO: 754 - protein, 318 aa, Coleofasciculus chthonoplastes
MTSLDSKVPVSVLIPAKNEEANLPACLASVARADEVFIVDSQSSDRSIEIAEKTGAKIVQFYFNGHWPKKKNWSLENLPFRNEWVLIVDCDERIPPALWDEIATAIKNPNYEGYYINRRVYFLGKWIRHGGKYPDWNLRLFKHQKGRYENLGTEGIPNTGDNEVHEHVILQGLVGYLKADMDHIDFRDIYHWLARHNRYSNWEARVYLNMLTGHDESGTIGANLFGDAVQRKRFLRKVWVWLPFKPTLRFIIFYFIRFGFLDGKAGYIYGRLLSQYEYQIGVKLYELRKFGGHLNPEAETSTVSSAKSPATSVVSPNS

SEQ ID NO: 755 - protein, 260 aa, Desulfonatronovibrio hydrogenovorans
MAHVPISVVIPCFNEEDNIGACLESVAWADEILVVDSFSTDRTLEIAGRYTNRVFQREYQSHADQLNWTIPQASHEWVLVVDSDERVPDTLAKEIRDLDLANNKIDGYWIRRSNHLFGKKIRFSGWGRDRVLRLFRRDLGRKENKRVHAEFKVPKAGRLKEAILHYPIPSMEAWVVKINRYTTWKAMDKVEKGNPAALIHFFLRPPIRFFKDSVLRLGLLDGWRGILIAAMSAFAEMIMSAKMMQLKRQDNRGGRSVADL

SEQ ID NO: 756 - protein, 265 aa, Trabulsiella odontotermitis
MFKLTVCLLTYNSERLLHKVIPPLITIADEFVVIDSGSTDKTINICEGYGLTPIYNPYSMHGEQMNVAIKHSSNDWVLCVDSDEIFDEPTLEFIQTLKAGETPSPEYGWRISRFWYVLGEQTRTIYPISSPDFPVRLFNRNHARFNLRPVDDKVEGTGETFTIPGHVRHDTFYSLHEVFSKLNSYTTRLVKYQKVRPSIARGIISAIGAFFKWYLFSGAWRQGKVGAVTGLYATLYSFLKYFKAWYQYQDNKKSVADKHTDSHTV

SEQ ID NO: 757 - protein, 248 aa, Sulfurovum lithotrophicum
MDKKISVVMLTKNSSVYLEQVLNALKLFDEVIILDNGSSDNTVEIAQTYKNVRVHEHEFIGFGPMKQLAVSFARNDWILSIDSDEVLEEELIDEITSLPLNENNVYAIKRDNYYAGRLIRCCGWENDYVRRLFNREKVQFDSKQVHESLILNGIEVQKLRYPMKHYSFNNAEELISKMQHYSTLYAQENQKKKKSSTFKAFSRALFSFIKNYIFQKGFLYGYEGLLISVSNANGVFYKYIKLLEKNRK

SEQ ID NO: 758 - protein, 271 aa, Dysgonomonas sp.
MQYICYYLHFLKMKISVVIHTYNAEEFLDRVLESVKGFDEIVICDMYSTDRTLEIANKHHCKVVFHENVGFADPARTYSISQASHEWVFMVDADELVPTVLREYLYYTIQRRPDIGGLRIPRKNYQMGRFMHSAYPDYILRFFKKENTIWPATVHSQPIIEGGKIFDIPSKRKDLAFIHLSNETIRQTINKMNTYTDFETERRRHKNYGVLSLIFEPLLRFLRFYVFKGGFRDGIPGLIWASEYAYYKFITIAKVIESKVTKEDWDKDLKE

SEQ ID NO: 759 - protein, 254 aa, Unknown
  Description of Unknown: Ignavibacteriae bacterium sequence
MNNKLSVIIITKNEQENIKDCLESVKWANEIIIVDAYSIDGTVEIAKNYTDKIYVREWQGFANAKNYALQFVTNKWVFSIDADERITKELKDEINQLISLENNEYCGYMVARRSYFLGKWIKHCGWYPNYVTRLFQKEYGRYNNLNVHEQLIVDGKVGMLKNDLIHFTDKNLFHYFNKFNTYTSLAVEDLLNSKQKFSYKNLLINPIFTFFKMYFLKLGFLDGIHGLILCTLSSFYVFTKYAKLWEKSINNKEN

SEQ ID NO: 760 - protein, 260 aa, Vibrio sp.
MITGVVITLNEEDNIKECIESLMQVCSEVVIVDSLSTDNTLNIAKSLGAKTVSQPYIGDGLQKNVGLPHTDNNWILSIDADERLTPEAVEAIKQLDLNNTQHDAFALRRRNYIGSRWIKHCGWYPDYCIRLYNKQLTRFAEVKQHAVVQAKNPQRLDADLQHYSFENIGQLFAKPGRNFSGRAAKIMYQKGKRANAFSPFTHGLNAFIRKYIFQRGFLSGVDGMTVALSSGVNSYLKYAKLLEYQRDPKVLEKEDFDKVW

SEQ ID NO: 761 - protein, 279 aa, Algibacter lectus
MTSAIILTYNEENILDQCLSALNFVDQIIVFDSFSTDNTLEIAKKHDAKIIQRVFDNYAAQRNAALESITTDYNWVLMVDADEIITEPLKNEIIKATSTENTTTMYRVRRKDMFQDKWIKQSSGYPTWFPRLFKNGCVTVEREINEEYNTTGAEGVLHEHLIHYPFNKGLTWWFDKHNRYSEMEAQKMLHEINDKLVLSDLFSNDPVLKRKAQKRLSYKLPFRPFFIFTAFYILKLGFLNGKAGYTFCKLRYMYETMIDIKFKELKRQQRKALKQATKA

SEQ ID NO: 762 - protein, 254 aa, Unknown
  Description of Unknown: Fusobacterium necrogenes sequence
MKLSVAMITMNEERILAKTLESVKGIADEIVIVDSGSTDKTEEIAKRYGAKFYREVWKGYGSQRNSAIDKASGEWILNIDADEEISLELQKKILEIKKATREDSVFTINFTSVCFGKKIKYGGWSNSYHIRLFKKDAGRFNENTVHETFETTEKVQILKEEIYHHSYSTLTDYFTKFNRYTTEGAIEYYKRGKKCNIFQLVFNPLFKFLRMYLLRLGFLDGKEGFLLACTSSLYTMVKYYKLYEITKNGSYIEK

SEQ ID NO: 763 - protein, 265 aa, Eudoraea adriatica
MNSSEEKISAVIITYNEIGYIEKCIQSIDFADEIIVVDSFSTDGTYEYLLNLENVKVIQHPFDNFTLQKSFALKQAANDWVLFLDADEVVPENLKNEIIETLNSTPEHAAYWFYRKFMFQNKSLRFSGWQTDKNYRLFRKSKVKFSEEKLVHETLDVDGSSGILSEKLIHYCYKNFREYKDKIISYGRLKAKESFFKEKKFNYAYMILKPSWKFLHRYIFRLGILDGKKGIIICYLDSLGVLERYRELKRLETKNQLAYYLAITE

SEQ ID NO: 764 - protein, 249 aa, Selenomonas sp.
MPRLAVIILTKNEEANIEGAMESAAFADEIVIIDSGSTDRTKELAERHGAKFVSHPMDDEGFAGQRNFALTQTNAEWVLYLDADERLNDKLALEIKKHIAECPQYAAEIKRVNVVMGQTMYHGVYRPDYCQRLFKRENVRWESVVHEHAVTDMPTVCLKTPMKHLCLTNWHQYISKLDRYTTLMAEEMKLRGKKVGWLQMHSHAMFAFLKMYLLKGGFLDGKLGFILCQLHYFYTLMKYVKLHDLYKQE

SEQ ID NO: 765 - protein, 260 aa, Hymenobacter aquaticus
MPPVSLSVVIITFNEEANIGRCLEALQDVADDVVVVDSFSTDQTVDICRRHGVRVVQHAFAGYVEQKNYATAQARHDYVLQLDADEVLTDALRTSIRATKANWQHAGYTLARLTNYCGTWVRHGGWYPDRKLRLYDRRLGQWEGLLLHERFEVAPGQTVGALAGDALHYSYHSVEQHVSQLNRFTSISAAELALRGKTQVTLFHLLLKPVWKFVHGYFFRLGFLDGFAGLCIATISAWGVFLKFAKLRTQSATPAAPLSA

SEQ ID NO: 766 - protein, 257 aa, Unknown
  Description of Unknown: Candidatus Roizmanbacteria bacterium GW2011_GWB1_40_7 sequence
MNLSVIIITKNEEELISDCIKSISFADEVIVIDSESTDKTVDIARKLGAQIVTKKFTNYADQRATALKHAKGKWLLYIDADERASEKLHEEIVEVVNRKPQTANGTDSIVAFRIPRQNYYLGKNKWPHIEYLERLFLKEKLVGWEGAVHEHAIYTGEVGTLQNPIIHYTHRNLELMTAKTNQWSEVEADMLLASHHPLMNELRFIRIMLTKFFDSYIKQGGWKIGTPGLIESLYQAYSYFIIYAKLWEKQNKLRVKK

SEQ ID NO: 767 - protein, 470 aa, Paenibacillus sp.
MRQAILEPIVQALKLKRYKDAEIMAAGVVRNDPLLAQAWVYLGEALMHQGCGKAARRVFDRAWMLDPQSGWVPAVYEAVKNVPDGPERASIHELLRVKKVSVAAAVLVYNSERSIERCLSHLSGAVDEIVVIDSGSTDRTPELVRRFAGAKLVDVEWRDDFADKRNRGLSHVESDWVLWVDADEYLASEDKHTVREVAGLFDGLDLPPVLLIWQMNQINGAVSDEFTQARMFPTRRGLCFKGRVHEQIAIAGDGVLESDTYRQSVRIRLHHDGYEPSIVQKERKLERNLRLLEQMVAEEPDNPGWLLYYGRESWAYGNTDHALELFLAAEEKAAAFPRFGRTLDIQMFLAKLYLSRKELDLAEQACRRALAAAPNFPDAMYYLAQIQMRQAVRLLQSSEQSLRGAKEQFQTYRGPTPADSQIAQWKSDAALADLALITGKKEDARALLQRLLERNPGLEQVRLKLRQLER

SEQ ID NO: 768 - protein, 260 aa, Unknown
  Description of Unknown: Nitrospirae bacterium sequence
MSKLSVYVIAYNDEPNIRACLESVTWADELIVVDSHSADATEKISREFTDKVFQHEFKGFGQLRNEAVAHATHDWVFSLDTDERATPEIRDEIRQTLERGPEADAYFVPRRNYFLGRWIRHCGWYPDYRQPQLFRKSRMRYREELVHEGFDLDGRAGYLKTHVLQYPFRDVNHYLIKMDRYSDLMARRMVQQGVQFRNHQLVTHPLYTFAKMYVGRLGILEGMPGLILAGLYAYYTFLKYARLWEMSRGRASFRSERGVL

SEQ ID NO: 769 - protein, 252 aa, Psychroflexus sp.
MPKISALIITLNEAKNIADVIDNLDFADEIIVVDSYSQDSTVEIAEAYQNVIVHKHKFENFTKQRNFALSKANHEWILFLDADERIPGVLKHEILETIQSKKTADAYYFYRKFMFKSRPLHFSGWQTDKNIRLFKKSKSTYTEGRLVHEVLEVNGKVTNLQHHLIHYSYENYISYKKKMLSYASLKAKELFLKGVEPNPYHFIIKPVYKFLYSYIIRLGVLDGRKGIIICYLNALSIYKRYPYLKELIKTSE

SEQ ID NO: 770 - protein, 264 aa, Zeaxanthinibacter enoshimensis
MSKTKEKISALIITYNEMGYIQKCIDSVSFADEIIVVDSFSTDGTYEYLSAHPKVKVIQHPFTNFTLQKSYTLKQASHDWVLFVDADEVVSDALKDEILATINNNTDCVAYWFYRKFMFQNEPLNFSGWQTDKNYRLFRKSKVSFSDKKIVHETLNVNGKSGILKEKLTHYCYKNYEDYKAKMLSYGRLKAKEDFYRESPYNVLYMIFKPAWKFFNHYILRLGILDEKKGLTICYLNALGDLERYRELKKLEKKNELTYYLVMP

SEQ ID NO: 771 - protein, 292 aa, Syntrophobacter fumaroxidans
MPETPLTAIILTFNEEINIVRCLNCLDWADDVVIVDSGSADRTLELAAQARPDIRVFTHPFKDFGDQRNWALDNVQPKHEWVLFVDADEFCVPELAREIGEYIRSPGDTVGAFIAGKNHFMGKWLRHSGLYPSYQLRLLKMGAVRYRKEGHGQREVTDGKAAFLKEGWIHEGFSKGLTNWLDKHNRYSTEEVDLMVRLRSEPPGLRQLFSKNPLRRRECMKRMGAKLLPLMPLLRFGYRYGLRGGFLDGKPGFLFSLLYASVSIQVVAKVYEAERNRTPMGDDRARRPSNRI

SEQ ID NO: 772 - protein, 316 aa, Aphanothece hegewaldii
MYSQLEKIPVSVLIPAKDEEYNLPACLESVALADEVFVIDSQSSDRSVEICESYGAKVVQFYFKGGWPKKKNWSLDNLPFRNDWVLIVDCDERITPELWDEIAFRIKDPSFAGYYLNRRVFFLGKWIRHGGKYPDWNLRLFKHRLGRYENLKTEDIPNTGDNEVHEHVILNGQVGYLKNDMLHIDFRDIYHWLARHNRYSNWEARVYYNLLTDNSDNGTIGANLFGDSVQRKRFLKKIWVRLPFKPFLRFILFYFIRLGFLDGKPGYTYGRLLSQYEYQIGVKLYELRQFGGRLNQPVPSEKSLSESVAKEPAKLS

SEQ ID NO: 773 - protein, 256 aa, Cellulophaga sp.
MRNKLSVFIITFNEERIIEKCLKSLWWADEIVVVDSGSTDATLAICEKYGAQIFHKDFDGLGTQKQFALEQTKNNWVLSIDADEILTEALIEEIQELLKATPNADGYYIKRKQVFLDKVFNYGPESKQCFLRLFKKELGSFDGKKVNASIVLNGNKGKLKNNFLHFKTRSLDTYIEKLNSYATIYAEGEYLKNKKHPLLFIFIRVKYEFFKKYILELNFLNGKEGFYWAFLSTYYLGLKYIKTNEQYKTVKKQLLF

SEQ ID NO: 774 - protein, 256 aa, Lysobacter sp.
MPLSAVIITFNEADRIADCIASLAFCDDVVVVDSHSTDATAQIAHDLGARVLLRPFDGFRSQKQFAVEQARHDWVLCLDADERISQELAAAIATARDAGFDAAGYRFARLSQYFGKFLRRGNAYPDRVLRLFDRRRGGWRGTREVHEAASVDGPVRTLHGDLIHYPYRSLEQQLAKTQRYARMMAEHDHARGKRATVAKLVLSPAWRFWRGYVLRLGFLDGWHGLVYAYVRANYVRQKTIMLWMLQNGQPVTTPER

SEQ ID NO: 775 - protein, 280 aa, Syntrophorhabdus sp.
MDQPVASNQQKQTLNSEQLTPSDGLPLSVYMITYNNGVTIERALQSVADWADEVIVVDSYSTDGAQDIIPRYTEKLYQFETKDLREKYQYAHDQCINPWTLFIDADEWLMDDIKKEISTIIRGTPSCDGYIASRRNMYLGREIKHGGWYPDREIRLYRREKGRWEGGLHAKVTVDGTVGTLKHFYMHTPYADIAHQIRTIDRYSEAFAEDLRSSGRRFHLVNLITRPVYRFFRDYILKRGFLDGTPGFIIVVSTMYYVFMKYAKLWEIEMKEKKQFRNRF

SEQ ID NO: 776 - protein, 249 aa, Pelodictyon luteolum
MAEKITVTILTKDSEATLRECLEALRGFDEVVVLDSGSGDRTLEIARRFPNVVVHEHPFLGFGPMKNLAVDKASNDWILSVDSDEVVSSFLAEEIQSMQLDEHCVYAVGRNNHYHGRLINGCGWDNDLVERLFNRKRVRFNDRMIHEGLEINEGTRIVRLRGRLKHYAYDNASQLIAKLQHYSTLWADERKGKKSASALQAFLFAAFSFFKYYILKRGWLYGYEGLLISVSNANGVFYKYIKLYEANRR

SEQ ID NO: 777 - protein, 255 aa, Roseivirga seohaensis
MDSIKISGVIITYNEESNIARCLNSLMDVCDEIIVVDSFSTDKTKEICIKYDVTFIEHAFAGHIEQKNFAVSQAKNNVVLSLDADEELSETLKQSILEVKQNWATDAYYFNRLTNFCGAWIKHSGWYPDAKTRLWDKRYGSWGGENPHDTVIITSNKPRVKLKGDLFHYSFHRLEDHALRAAKYAEIAAKAMHQRGKKSSIGKAIGSALILFIKSFFFKLGFLDGFYGIIICVTSAHTSFLKYVYLHELNKKAKH

SEQ ID NO: 778 - protein, 281 aa, Bdellovibrio bacteriovorus
MDKSLSIQKMVSSRESFDKTLIQRESDSVTKLPISLVIITLNEEAHIERCIRSAAFVDDVVVVDSFSTDRTVEIAQKCGARVFQEKWKGFGPQKAFAAAQAKNDWVLSLDADEALSPELASELYESFHSLDPEAGYLFPRKSYHLGRWIKYGGWYPDYQLRLFNKSRSQWNSADVHEKVEVKRMLKMKRDLLHWVFDGLSDQVITNDRYSTLGAKQLAASGKKFSYLKLIFKPWGKFIETYFVKRGFMDGMPGFVIAVGAAYSLFLKFAKQWEMERVHKKP

SEQ ID NO: 779 - protein, 289 aa, Thermoanaerobaculum aquaticum
MPELQRPKISAVITTYNEERNIGDCIESLLWCDEIVVVDSFSTDRTPEIAKSYEKVRFFQRPYYGSASQKNWAMDQTQYEWILIFDADERCTPELQAEIEALLASGPKYEAYTIKRRVYFMDRVIRFSGWQHDRVVRLVKRGAGRYPNRRVHADMQTRGPAPVLKNPMLHFMIESFEQYLPRIIKYGFWGAAQGWKTGRRSGFLEVFGRSTWRFIRMYVFQLGFLDGMAGLVFCMLQAFGTYLKWAILWEWRVNAARGRMPNLPPFDEDEKVWEWKAGEENAEEQKANG

SEQ ID NO: 780 - protein, 246 aa, Unknown
  Description of Unknown: Nitrospiraceae bacterium sequence
MFPVSVVIVTKNEEVNIEDALKSVADAKEIIVVDSFSTDRTVDICRKYTDKVHQHEWQGFARQKQTAVDYAEGPWILILDADERVTPELKAEILKNISGTETNGFYMPRENYFIGKRIRYGGWWPDHTLRLFKKDKGRLGPREVHERVVVEGSTVYLKNPLRHYTYRSVSEFVERMERYSTLAAKEIRKNSGRAGLISLVIKPPFTFIKMYFFRLGLLDGTRGFMLAVLYSFYTFLKYAKTWEKQA

SEQ ID NO: 781 - protein, 263 aa, Unknown
  Description of Unknown: Flavobacteriaceae bacterium sequence
MPNQKISALVITYNEMGYIQKCIDSIEFVDEIIVVDSYSTDGTYEYLLNHPKVRVIQNPFKNFTAQKSFALKQASNDWVLFLDADEVVPEQLEKEITQVVNCNPKHVAYWFYRTFMFQKERLRFSGWQTDKNYRLFRKSKVNFSDKRIVHETLDIDGTSGILKSKLIHYCYKDYENYKGKMLYYGQLKAKEAFNNHKQFNYALLILKPLWKFLYSYIVRLGFLDGAKGITICQLNALGDLERYRELQKLKQEETWSSIFKTYP

SEQ ID NO: 782 - protein, 257 aa, Serratia plymuthica
MSDRKSLSVVIIAKNEAGLLPDCLNSVAWADEVVILDSGSQDDSIAIAENLGAKVFVHTDWQGFGKQRQLAQSYASHDYILMIDADERVTPELRQSIEQTLAAPDDNQVYSCARRNLFLGRFMRHSGWYPDRVNRLYANRRYRYNDDLVHESLNIGAAKVVPLSGDLLHLTCRDFFAFQRKQLRYAEEWANQRHQAGKRCGYSSILTHTFGAFCKTWLLRAGFLDGKQGLLLAVVNAQYTFNKYAALWALGRNSSEK

SEQ ID NO: 783 - protein, 263 aa, Syntrophorhabdus sp.
MERERETRPPLSVYMITFNNSTTIARALDSVAGWADEVIVVDSHSPDGTAEIASKYTEQVLQFDTTSQPEKYQYAQDHCRNSWVLFIDADEWLTDSFKKEVEDILTSGSPSDGYIADRRNIYLGREIKHGGWYPDREIRLYRKDRGGWEGGIHAKVHVEGKVGHMKNHYLHTPYADSAYQLRTIDRYSEAYARDLFAAGRSFHLANMLLRPIWRFFRDYIFKMGFLDGIPGIIIMASTMYYVFMKHARLWEMERDEGGRKGVR

SEQ ID NO: 784 - protein, 277 aa, Planctomicrobium piriforme
MPRVSAFVTTFNDEETIGACLDSLKWADEIVLLDSFSTDRTIEIARQYTDCIYQHKFLGYGRQKQSALDKCTCDWVLFLDSDEMLPLPLQAEIQLVMRSEPSVDGYEIPRREQLFWRMASPNTRHNHFLRLFRRSKVKFNTIPVHAGPELDGRSAKLREQFFHFGERSIHEKVEKVNGYSTGLVNFRAGQGRTASPWAMLYYPPFTFLRQYIQKRHYLNGWAGFIASVCMAFYSFMKCAKAYESVCRERYGSTLLPDECPRLEAPQTAEPAQVTSAA

SEQ ID NO: 785 - protein, 652 aa, Bacillus sp.
MLEVASPTISANIIVRNAERTIERCLNSIQKVVDEIVIVDTGSTDQTLELLKKYHVKLIQTNWNDSFSEARNVAKSHSSSEWILTIDADEYLANQEPPLREMLVSTCEAGWITVKNFLSDDFLHSNQQRALRLFKNNELYSFSGRIHEQILPSILQQHHKVEVLEIPLEIHHTGYLQSEVLTHQKSLRNLSLLKKELSEQQYPFHHYNIAVEYVRMNEHEQALEHLITCFQLEKEAASYLSSATYLKAVILLVLKRYKEAQDWLLTSLDRYKDYADLYYLLGEAYMKQHYYEQAANAYLTATKQNVNNQYMTNEGTNSFGAYYKIGRCFQQTKRFKDALLHFLPVISLRPNDREAYLRTAECLHALDIPVHQIKGYFEDVMTHHHGQPLLIVHALFHIGVYQLTKPFIEMINEKQLTASLQNEVYMNERLLSDAITIQKSLLRDLPEAEQLPIIRDHCLAFLIEGVRLPQFLKRHLHTTFPQLYEVIYEKKLNEEACQLIDRALSLHYPELINYFASIHSSTDALLFYGKQLFKHGYLNRAADYFISLLEQQSLSTEVATYLGEILYHKNHLEEAISLLESVDESALTDSLRLLLSACYLKEAKQWLVRLLEERPNERLQLHLHDTEKSLHRIELSLSSAAWTVKQRRNGEK

SEQ ID NO: 786 - protein, 290 aa, Syntrophobacter sp.
MLAAGKRAGPAHAVSHGFWMFFRNYFLSLGFSGGYMQREKVSVYVLTYNEEAKIRDCLESVTWADEIVILDSFSNDRTLPICQNYTDKIFQQEFVGFGKLRNIAIEHCTNNWVLSVDADERVTPELREEILKKLTDGPDADAYFIPRKSHFLKYWVRHCGWYPDYRQPQFFHKRKMKYREQMVHEGFDVTGKVAHLRGHVIQYPFLSLDQFLKKMDRYSSLRAEDMVKQGASFHISQVLTHPAATFWRMYFLKLGFLDGKVGLILSLLYAYYTMLKYAKLWEKLKSQESI

SEQ ID NO: 787 - protein, 252 aa, Halanaerobium saccharolyticum
MKGLSALVLTYNEEDNIADCLDSISWIDKIVVVDSYSDDRTKEICQQYENVNFYENEFKDFASQRNFGLDKIETDWVFVIDADERVTEELKNEIRNLKNDDEVDAFNIIRKNYFLGKWIKYCGWHPDYNLRLFKNKYRYSGIVHEGFSVNGKIERLENGFLHYTYKNLSSYITRMNQYTTLDAEKKYRSGKKIGITYILSRSFLEFIKMYIIKRGFFDGFHGIVLSLLSSYYQFIKNIKLWELNNLRSDLDE

SEQ ID NO: 788 - protein, 258 aa, Bordetella genomosp.
MKLSVIVITKNEAANIVGCLDSVAFADEFIVVDSGSTDNTIELARAMGATVEQTHDWPGFGPQKNRALNLAQGEWVLSIDADERVTPELAKAIQDAIAAPACDAYEIARLSDFCGRFIRHSGWWPDYVVRLFRRDRARFSDAAVHEKVVPAPGSRVGRLAGHFLHYPYPNLDALVNKVNRYSSDAAAMMHARGKRTGIWGALGHGFWTFVRIYLIRRGFLDGRHGLVLAVTAAAGSFFRYAKLMFLTENARRDGAPRP

SEQ ID NO: 789 - protein, 257 aa, Pontibacter korlensis
MPVKLSVVIITYNEERNIARCLESVKRVADEIVVVDSFSKDRTKEICLGYGARFIEHPFGGHIEQKNYALTQATYNHVLSLDADETLTPELEQAVLTAKNNWEADAYSMNRLTNYCGKWIHHSGWYPDTKVRLFDRTKAVWGGENPHDKIILDKGASLQHLRGDLLHYSYYSVSQHLGQINKFTDASSNAMIRGGKTVFLPMVIIKPLFRFFRAYVLKRGFLDGPEGFIISVSSAVSVYYKYVKLYMHNRQQKRDQK

SEQ ID NO: 790 - protein, 302 aa, Unknown
  Description of Unknown: Candidatus Microgenomates bacterium sequence
MKLSVVVNTRNEEAAIERCLSSVSPYVDEIVVVDMESTDETRQRARKYTNKIFKTKPQGYVEPARNFAISKASGEWILLIDADEVLPESLGLKLRKLVTSEFSYYRLARKNLIFGKWMKHTGWWPDYQIRLFDKQCVFWQNEIHSIPITQGRGTDLEAEESLAIIHYNYQTVEQFIERLNRYTSEEAKEAVRQNQTFHWTNLIRKPTNEFFARFFSEEGYKDGVHGLALSLLQAFSMLVVELKIWQYEKKFAEIRPKEFITELNEQYENVRNDYHYWFHTTQGKQSEGLTKNVHKARAKLRL

SEQ ID NO: 791 - protein, 285 aa, Unknown
  Description of Unknown: Verrucomicrobia bacterium sequence
MNSRVPVSVIIPIKNEAVNLPRCLDCVKWADEIFVVDSQSTDGSIAIAQHFGAKVVQFEFNGTWPKKKNWALENLPFRNEWVFILDADEVLPPPAEAEFAEAITDAGDIGGYWINRRFMFMGRWLRHAYYPNWNLRLFRHALGRYEKLTDAPTNSGDNEVHEHVLVNGRTAKLQVEIDHYAFPSIDVFVEKHNRYSNWEARVAAETLLDSSSGKIGSQAVNRRRKLKTLSQRLPFRPLLRFLYIYVWQKGFLDGAEGYYFARLHGFYEFLSVAKMRELLKARERH

SEQ ID NO: 792 - protein, 366 aa, Phreatobacter sp.
MRLSATLIVKNESRFIEDCLSSLAGIVDEIVVVDTGSTDDTVERARRYPVKLGFFPWCDDFSAARNAALEQATGDWILYIDADERFRPLTADWRQQIDRPDIAAARLRLHPRVGWTAYSELRLFRRDPRIRFEGVVHERVHGTVDAVCRADGLHVGMCDVALDHVGYEDDQAAKVPRNLPLLRRYLAEDPNRVYCWWHLGDQLKTAGDNEGAVEAWRNGIAAIARLPASAIRDSESTPYLSLIQHLHGSGEAVDALLAEARARFPRHLALQWIEAKIALERGDIAQALPVFERLAAIDAETFHDEDLAYDKAIFTHLAQESLALAAFRSGRFADAAVHYRQAALTAPNRQEMLVKASLASARAGSL

SEQ ID NO: 793 - protein, 252 aa, Fangia hongkongensis
MDKLTVIIITKNEEKNIARCLDSVKWADEIIIVDSGSTDRTIDIASQYPNVKVYKQQWLGYGPQKNIALSYATNSWILALDADEVLSSELTDNIQKKIQQEHSASVYKFKRLSQFCGKWIHHGDWGNDIIPRLFKKDSARYSNDMIHEKLIYNEKDALLSGILKHYSQESISISLSKLNNYSDATANRLLLKGKKTTLFKASIHKNWTFIRGFFIKAGFLDGSHGYLIAKLSAYGSYFKYVKLWEKQQNDKK

SEQ ID NO: 794 - protein, 249 aa, Unknown
  Description of Unknown: Flavobacterium sp. 81 sequence
MSIEGKKLSVIILTYNEESYIGDAIRSVEFADEIIVLDSHSTDSTTKIVTDLGAKLIFRKFDNYCNQRNHAIESTTGEWVLFLDADERVSEELQKEILETINSNKSDAYRIWFPHFFMDRFLFHYTDKITRLVKNDSIRFENEVHEKLVVKSKAPVLKNYMIHYTYKGLFHFISKKDQYAWFQAKMSIKKGKKATLFLLIFKPFYRFFHTYFIKRVYLDGVPGLAAASIDAYGVFSRYAKMVLLEKNLE

SEQ ID NO: 795 - protein, 247 aa, Unknown
  Description of Unknown: Chlamydiales bacterium SCGC AG-110-M15 sequence
MSISVTILTKNSEQYLAEVLESVSSFDEVILLDNGSTDSTFEVAEGFSNVVVHRTTFDGFGPMHNRAIDLAKNDWILSIDSDEVLSKELQEEIKEISKDDGAVYSFPVHNYFNGKWIRWCGWYPDRHVRLFNRKKTRFTDVQVHEGVITDGMKTCLLNNPVRHYSYSCTADFLRKMQVYSDLFAEQNVGKKKSSLLKAITHGLGGFLKSYIIKKGFMGGYEGFVISAYNGHTAYYKYLKLLEKNRQL

SEQ ID NO: 796 - protein, 278 aa, Acinetobacter soli
MKISALINTLNEEKNIEKCLQSLSWVDEIILVDMYSDDKTVEIAKKYTNKIFYFERVGYSEPARAFALSQVSNEWVVVLDADEVIPKSLSDELIAIAKEDKADAIWIPRKNFMFGHEIKHTGWNMHDDIQMRFFKKSMMTYGSTIHNFVNISDQARIITLKNNETCIWHFNYIDIEHFLEKLNKYTTVEAKQLFDKRKQSSFLIVIYACIREFIYRFILKSGYKDGFYGLVLSLLMCVYRFTTLAKLKIMIEQNNATPRDSIVTTYDDLSSKVVDSYK

SEQ ID NO: 797 - protein, 249 aa, Pusillimonas harenae
MKLSVIIITKNEAAHIGDCIDSVAFADEVIVVDSGSTDETREIAAGKGAKVSLTADWPGFGLQKNRALDLATGDWVLSIDADERVTPELATEIKKELEHPRADAYKIPRLSNYAGRWIRHSGWWPDHVLRLFKRGTARFSDAAVHESVQTASPVAVLSAHFLHYPYADLESHIAKLNHYSSAAAAMLHARGKKTSTLGAVGHAFWTFVRHYLIRRGFLDGKEGFMLAVMASAGSFFRYSKLLLLNKQNK

SEQ ID NO: 798 - protein, 256 aa, Unknown
  Description of Unknown: Burkholderiaceae bacterium sequence
MNTTPPPLSAVIITRNAAAELADCLRSLAFAQEVVVVDSGSTDGTVALAQQLGARVIEKEWLGFGPQKQFAVEQARNDWVLCVDADERISPALQASIVHTLAAPAQRVYRMRRCNRFLGRYLRHGEGYPDWNTRLFDRRAARWADVPVHEHVVSDVLVGDLEGDLLHHSQDTLASYIDKQNRYTTLQANELFARGKKVGALKIVASPLVRFLRFYVFRLGFLDGLPGFAHIAMGSFFGMVKYAKCYALQLSGNKNQ

SEQ ID NO: 799 - protein, 245 aa, Unknown
  Description of Unknown: Candidatus Levybacteria bacterium sequence
MISAVILTRNEEKNIIDCMESLYFCNEIVIIDDVSTDRTVEIAKKAGAIVYEHELNNNFSKQRNFGLEKAKNEWILFIDADERISVDLKNEIKYKILKKGINGYSIKRSDFFYGKELFHGETSSISLVRLGKKNHGLWDGAVHEEWKINGKISILDTPLLHYPHPTINEFLLEINFYTDLNAMELFNKGIRATWYDVIIYPVAKFIHNFIIRAGFQDGVAGMIIAIMMSFHSFLVRAKLLKYNEN

SEQ ID NO: 800 - protein, 247 aa, Unknown
  Description of Unknown: Candidatus Roizmanbacteria bacterium CG06_land_8_20_14_3_00_34 _14 sequence
MKITILIYTRNEERNISDCINSAKLLTDKIILVDMESSDKTVEIAKSLNIPVFNFPKSNYVEPAREFGIKQAETDWVLILDADERITKELANEIKDITRYNQIQSDKISKKTDYIRLNPIESDSVRLHPIISDYISQYKIPRRNTFAGIKWLRHGGWWPDYQTRLINKKFFLNWPKRIHSTPHIKGDIGYLKNPLIHYFHGDLNGMVKKTIIFEDIESDLLFKAKRKTGIGIFFRKFLAEIYRRLIR

SEQ ID NO: 801 - protein, 264 aa, Unknown
  Description of Unknown: Candidatus Roizmanbacteria bacterium GW2011_GWC2_35_12 sequence
MKHDISVIMITKNAESTIENSLKSVSSWVREIIVVDSYSTDKTVEIAERHKSIVYKHKYEGEGKQRNFALSKAKLNWVLVLDADESVTSKLKNEILRIIKATKLLGFNIPVQSYYKNKQLNYGGENYKKMILFKRVQGKSTLDQIHAVCQVHDKKIGLLKNKLNHFSYTSFCQVIKKFTSYSYRVAMVKAKKGEKASLKKIFLYPIHMFYARFIKDKGYKDGLFRIPLDMVFAYMEGLAYLILFISNVKAQIAKLHLKFKKFKV

SEQ ID NO: 802 - protein, 308 aa, Unknown
  Description of Unknown: Planktothrix sequence
MNSNPSKLPVSVLIPARNEQSNLPACLASVARADEIFVVDSQSSDRSVEIAEDYGAKVVQFYFKGGWPKKKNWSLETLPFRNEWVLIVDGDERITPESWDEIAEVINNPEYTGYYINRRVFFLGTWVRHGGKYPDWNLRLFKHKLGRYENLNTEDVPNTGDNEVHEHVVMSSGQVGYLKNDMLHEDFRDLFHWIERHNRYSNWEARVYYNTLMGTDDSKTIGADLFGDSVQRKRFLKKIWVRLPFKPLLRFIIFYVIRLGFLDGKAGYIYGRLLSQYEYQIGVKLFELRTFGGQLNVTPKPDKPPISH

SEQ ID NO: 803 - protein, 254 aa, Unknown
  Description of Unknown: Pectobacterium punjabense sequence
MNKKLSIIIITKNESELITECLQSANWADEIIIVDSGSTDSTVEIARQYGARVYQHNDWQGYGKQRQRAQSYASGDYIFFIDADERVTPELRQSIESVLLNSNLDDKIVYSCARQNLFLGRFMKHSGWYPDKVIRLYANHHYQYNDNRVHESLDYGDAPIQHLSGDLKHLTCRNFSAFQEKQLRYASAWAKERYEKGKSCSYIAIFTHTIFSFLKTWIFRAGFLDGKQGLLLAFVNAQYTFNKYTELWSLNNNK

SEQ ID NO: 804 - protein, 254 aa, Unknown
  Description of Unknown: Deltaproteobacteria bacterium CG07_land_8_20_14_0_80_60 _11 sequence
MPRLSVIVIALNQEANIGDCLKSVSFADEIVVVDTGSADRTVELARAYTGRVIDAPWEGFGRTKNYALDQARGEWVFSLDTDERAPPALQEEILAVVAADGPRDGYRVARKNYFCGRWIRHLGWYPDYTLRLFRRGRGRFRDREVHEEVVVAGSVGTLTTPLEHYSYRSVSEYVARMDRYARLAAQELAKAGRRPYPGELFFRPFFSFLHLYFIRRGFLEGATGYDLAVLMSMYKFLKYYYLRELSQGRDLDGH

SEQ ID NO: 805 - protein, 278 aa, Unknown
  Description of Unknown: bacterium sequence
MPNNEPNSQSNIKADQTEPVGLAVVICTFNNIRTIEPVLESIAPIADRIVIVDSGSTDETLEIVAKYNTKVIHRPWPGPVDQKQFAIDTSPDARWVLLLDSDEIIEPTLQRALAKAVADDDPSVDGWTINRIVRMFGTDLLHTYQPERRLRLIRGGIGQVVGIGPEGKGGHDRIDIAGKVGNLEGNCIHDSWADLDAMMQQHMNFARRAALYNPKGGRAIDILTRPPIAMFKQYVLKQGFRDGKAGFFASATVFCGTLMKHLYIARQKWIHREEEINR

SEQ ID NO: 806 - protein, 255 aa, Unknown
  Description of Unknown: candidate division KSB3 bacterium sequence
MARQKLSVTIITCNEETRIRAALKSAVWADEIVVVDSGSTDQTLEICREYTQHVFQEPWHGYVEQKNIATARCLHDWVLNIDADEIISTGLAAEIQEIFTCGPTHAGYMIPRRTYYLGAWIRHCGWYPDKKLRLFNKQQGRWTGQMLHEKVQVEGTTASLQHDLYHYTYENIEDHLKTINTYTSIAASHKQGSITAAGILGHTLFTFFKKYLIKQGFRDGGRGLIVSLLSAFSVAVKYAKLWELRHVPQEEKRLT

SEQ ID NO: 807 - protein, 253 aa, Unknown
  Description of Unknown: bacterium BMS3Abin03 sequence
MKKKISCVLITFNEEENLKKSLPAVSWCDEIVVVDSGSSDNTLEVCEKFNCKIFHREFDGFGPQKRFAVSKAENDWILSLDADEVISEELKNEILSELNKEKINYAGFLIPRRLYFLGRKFKHGRESKDYQLRLFNRNYGNYTKDKVHEKVIVKGEVKKLKKELLHFSYSSIHQYFEKFNSYTSRAAEELYKQGKKKSIVAIVFSLPVYFVKNYFIYVNFLNGFQGFLWALFSSLYPVVKYFKLMTLNSTQEN

SEQ ID NO: 808 - protein, 264 aa, Granulosicoccus antarcticus
MNHQYSLSVTIITKNEADRIERCLESVKDLANEIIVFDSGSTDATLDIVRRYTDKIWQTDWPGYGLQKQRALEQAQYDWVLAIDADEALDEELQNSLKEFLSRDRQDVVAVKMKWGVTIYEKRLDYGRSARSPLRMTWREGTFFSNDEVHEKMLHASGRTITLKGRLLHFTHRNYGHAQHKSVEYAWLGSQKYFRKGRRCHSLTGAVLRGLWTFILIFFIRGGFLDGSIGFLTAVSYAQNSFNKYAGLWTLTRMEKIETGRAKR

SEQ ID NO: 809 - protein, 610 aa, Unknown
  Description of Unknown: Flavobacteriaceae bacterium CG18_big_fil_WC_8_21_14_2_50_34 _36 sequence
MTYKFLIYISHSYAIPIGKPLETEILKRGYSVWWYSDLAEGAASISHESNAFNSIKEVVAYRPHIVLTITDMVPDFISGLKVQIFHGFPANKRKGLDQFKIRGFFDLYCTQGSSSTEIFNTLKAKYKTFEVIETGWSKVDALYPLKEKSVSEIPTVLIASTFTKQYSLALNDAVLLEIVRLSELNKWKFMVVLHPKLPENIKQKIKKIQNKNITYYNTTDLVPLFKKADFLFADTSSAIIEFLLQEKPVVTFKNNMPGPYLINISSVNEIEPAFEKAKRRPKHLINEIKKFAQFSHAFTDGKSSERVINACIEFLHKDKSYLKKKPRNLVRKFKIRRKNGFFTWKSYRTAIQYPTKVLTTPKVKISAVIITLNEEEHIDALIKNLDFVEEIIFVDSYSTDKTFEKLSSYPNIQKYQKEFLNFPSQKNFALSKASNDWVLFMDADERITQNGKEEILNLLTNTDKVAFWGKFQYYFGNKKINFSGFQTAKSIRLFRKTKCLYDASIPVHENLIVEGKIGTLQNKILHYSFKNYTHYKSKMEHYANLIARHNFEKNKKMSFPLMLLKYAYRFINHYILRLGILDGKIGLKISYLNAYGIYFRYKILKKLNTP

SEQ ID NO: 810 - protein, 313 aa, Nostoc azollae
MTSKIPVSVLIPAKNEQANLPACLTSLQPADEIFLVDSQSTDKSIEIAGIYGANVVQFKFNGSWPKKKNWSLENLPFRNEWVLIVDCDERITPESWAEIAEVIQNEECNGYYINRRVFFLGKWIRHGGKYPDWNLRLFKHQKGRYENLSTEDIPNTGDNEVHEHVILQGKVGYLKHEILHEDFRDLYHWLERHNRYSNWEARVYLNLLIGKDKSGTISANLFGDAVQRKRFLKTVWVRLPFKPLLRFILFYIIQSGFLDGKAGYIYGRLLSQYEYQIGVKLYELQTLGGTLNVAKTPAYTAKPVNQEVEKTAI

SEQ ID NO: 811 - protein, 248 aa, Pusillimonas sp.
MKLSVIIITKNEAAHIGDCIDSVAFADEIIVVDSGSTDQTRAIAESKGAKVSLTADWPGFGPQKNRALDLATGVWVLSIDADERVTPELAAEIQEELDSPRADAYEIPRMSNYAGRWIRHSGWWPDHVLRLFKRGTARFKDVAVHESVQTSSPVVALSKHFLHYPYADLESHIAKLNRYSSEAAAMLYARGKKTSLPGVVGHAFWTFIRHYIIRRGFLDGKEGFILAVMASTGSFFRYSKLLLLNKQK

SEQ ID NO: 812 - protein, 277 aa, Calothrix rhizosoleniae
MNFLISVVILTKNEESNIQRCISSLEWCNEVVVVDSGSKDTTVQLATKLGAKVFVNIPIGLFSAAKQRNWALHNCDLKGDWVLFVDADEVIPASLVNEIRETCSHTTFNAFQLTPRYLFWGKWLKRSLGYPNWHDRLLKRGEVFYEDESGSMECFTKDTKTSRLYEPYDHYANSKGFSDWLERHDRYSSWEAKWAFDFLETNNLEAFGTKGKNRLRVIAAKFWLLRPPARFIYMYFIRLGFLEGWESFIYCLLHAMYEFMTIIKIIELKRKKAGLSI

SEQ ID NO: 813 - protein, 253 aa, Unknown
  Description of Unknown: bacterium 336/3 sequence
MIKISVSIITLNEEKNIARCLESVKGVADEVVVVDSFSIDKTKDICLQYGVKFIEQTFLGYVEQKNFADAQAENDWILSLDADEELSEKLKKEILAIKNTLTADAYEMPRMTNYIGKWIRHTDWYPDRKIRLYNRKKAQWQGQSLHEQLTIHDDAKLIKLKGDILHYSYYSIHQHIAQFNKFTEIGAKEAVQKGKKAPLYKVFINPVWKFIYSYFFRLGFLDGYKGFLVCAISAFATFCKYIKMRELWRETKK

SEQ ID NO: 814 - protein, 253 aa, Vogesella sp.
MSRQLSVVLITKNAEALLEKCLQSCAFADEIVVVDSGSTDRTLAIASAYKAKVIHQPWLGFGPQKQFAVQQASHDWVLCLDADEWLSEKLRHEISNLLHNPALGAYRFARSNKFMGRFLKFGEGYPDYSLRLFDRRQARWSDDVVHEYVIANGEVGTLTGDLMHESGEDIALYLDKQNRYTSLQAETLYQRGKKVGIAKLVLSPLLRFVKFYLLRQGFRDGLPGLVHISIGCFNSYLKYAKLIELHRLRPQEK

SEQ ID NO: 815 - protein, 264 aa, Unknown
  Description of Unknown: Candidatus Thioglobus autotrophicus sequence
MYKISAYIITYNEIDKITDCINSVLWVDEIIVIDSHSTDGTTEIAEKLGCKVIHIPFEGYGKLRNEAIKHCSGEWILSLDSDERCTTEFRDEVMHITENSNYDIYKVPRKNYFMGRWIRHSGWYPNFRQPQLFRNGKMSYTLDPVHEGYVKNSNKDVQTTRSFIWQFPFKNTEEIMHKANRYSTLGARKLNSKGTVGSVNKAFFHGLWAFIKHYIFKFGFLDGGAGFVIAFGNFEGTFYRYLKLSEIQFKWEKPPTINPINKAS

SEQ ID NO: 816 - protein, 253 aa, Psychroserpens jangbogonensis
MIKLSGVIITFNEDKNIERCLQSLVNLVDEIIVVDSFSTDNTKQICLKYNVTFIEQEFLGYIEQKNFALKQASNDFIVSLDGDEALSETLQNSIIELKSNWQFDGYYCNRFNNFCGQWIKHSDWYPNKKLRVFDRCVAHWEGINPHDEIKLKDNRKTSRLKGDILHWTYQSYPEFNQKTEYFSTISAQAYYDKGEKAPLYKIVWNPIWAFFKAYILRFGFLDGKNGFVISAQTANITYLKYTKLKKLYRNKEF

SEQ ID NO: 817 - protein, 244 aa, Pigmentiphaga sp.
MRLSVIIITRNEARNLAECLESVRFADELVVLDSGSTDETVEIARRHGARVEVAPDWPGFGPQKNRALDMATGDWVLSLDADERVTPELAAAIAQTLRDPAYDAYDMPRLSSFCGRFIRHSGWWPDRVLRLFRRGTARFSDDRVHEKVVPAGSVGHLEPHLLHYTYPDLDSAIAKMNRYSTDSAQAMHARGRRASIGTAIGHGAWTFVRLYLFKRGFLDGRHGFLLAVTAAAGSFYRYAKLSLQ

SEQ ID NO: 818 - protein, 243 aa, Unknown
  Description of Unknown: Acidobacteria bacterium sequence
MEITATIITFNEEDRIGEAIASLSCCDEIVVVDSGSTDRTREIAEARGARVIQRAWQGYSKQKNFAAEQARHDWILSIDADERLSIELADDIVNAFPGASAWAAYSMPRRAFYMGRWINHSEWYPDRKVRLYDRRRCRWEGDHVHESMKVDGPVGRLHGDLFHFPYRDWNDHVTRIEKYTKLAAEAARSSGRRGNVLKLLFAPLLTFIRIFFLHAGFLDGWRGLAIAYMGARYVFLRESRILH

SEQ ID NO: 819 - protein, 265 aa, Unknown
  Description of Unknown: Acidobacteria bacterium sequence
MPKLSVTVITKNEAADIAEALESAAWADEIVVVDSASADDTVAIARRYTDRVIVREWPGYSAQKNYAAAAASHDWILSLDADERITPVLADEIRATLAAGPAEAGYRVPRVTWHLGRWIRTTDWYPDYQLRLYDRRSGQWTGRYVHESVAVAGRVGELHGELEHFAYRDIADHLETIDRYTTFAARQMHEGGRRAGLLQIGGHPPLAFARNYLLRGGIRDGIPGFIISALNAYYVFLKFAKLWELQVSARLNHEDTKVAKEHEKR

SEQ ID NO: 820 - protein, 252 aa, Desulfovibrio frigidus
MTSITGLVLTYNGERLLDETLASLSFCSEILLIDSGSSDATLDIAKKHNARVIHNDWNGAIDQHKFAVKQIKTPWVVTIDQDEIISPELKDNILKNLENPPKDLDGFYCPRKSWYFNRFILHSGWYPDKLFRIYKPEGISIGGIRPHEELRPKTKAGNLKGDIIHYPYENFKQHLEKINYYTQDAAEDLYSRGKRGSLGSAISHGIGKFFKQYILQQGFLDGRAGFIIAVHGFFYTFQKYIRLAELEPKDKK

SEQ ID NO: 821 - protein, 951 aa, Anaerovibrio sp.
MFDVKISAVYIAKNEAHNIARSLDSIRVSVDELVLVDTGSADETVKIFESYGGKVYHEKWADDFSAPRNIALSKATGDWIIILDADESFSMETRQNIRAVLAQASAETNGLLINMINYDKDTGKALDEFYALRIVRNIPGLNYKGRIHEMMYIGEDYFHGWQRVSPKLLTIDHTGYTASISLEKNQRNIRLMEAAIRDGEPAERYYTNLFESYSALGNMERALYYAQMDVARGRQSITYASRSYRGLISYYAKDTSSEGRLKHLQWVEKAVKDFPELPDFHAEYSECLYRQGRYREAKREIELALSLCENYDGLEPCLLTPEMKPLMEQRKREITRLAEKQSKITISACAIVKNEENNIYGWLENVSVFADEIIINDTGSEDRTKEFIAKFSEENPDLAMVLIESQWQDDFSFAKNQCLAEATGDWIVFTDADETFVTPEKVRSVIGEQINGNTQVIMVPMANVDRDDNNNIINTFSVPRIFRREEGLCYEGRIHEMITIGGRRPDNLATVWADKRLFMEHTGYSTGINESKAQRNLTLLLKDIEDGQDIEKLYQYLAESYYALGNYAEALNKALLAIQSAYQPMGHQGDMYWLALNAMEKLDYSPEDKMAIVEGGIRLLPELPDFYARKGSVQMEAGNYHEAIKSFNMAWAKMAKYDEEAVHTNASNLRSILHLLFADWGRCLYRTGYSDMAEEKYREALKIKPWTETALCGWADIYQGRTAKDFIASLEAIYADIENSRELLADIYAVNGFPELAGYFSKVKKCSLINDKDYSEIYNKSMKEMAEILPALFVCLLEKYNEEYVKLLPDNLKILVNYLHGKPVAGEIKECFADYSSFMKAVMDFGTQELLVKYLGFLDYFATDEEKREKQLLEVAGLLQKNHREKEALELYQLLPEGSSKADSVYYQNVGFCLFREKEYAKALEYFQRAEQSEIVKSYIIWCREAMENGN

SEQ ID NO: 822 - protein, 681 aa, Paenibacillus massiliensis
MKRLSVCMIVKDEEAVLERCLESVRGIADEIIIVDTGSTDATKAIATRYTDKIYDYVWTNDFAAARNESLKHATGKWILVLDADEYLSKDEHDEWNSFLDQETPLPYLAYTLPVINFTGDKGNKDEITTAPVTRLFPNHMGIIFERPIHEQLTRSSIHEKMQDNDDPDASDVLLKDLSRSRTHENLYHKKLSLNIFHTGYQVQTIVNKNKHERNMQIFETMREKQKLDYYDWFTLGNQYRYAKEEEKALECYENALGIENTSVVWFPHCLIGLITLYYKMSRLPDSWKLTEEKLSRYSDFSEYHTICGFHYETLGFFKEAVASYQQAVEIAELRARQGKEIWLTDPVHSFDSPVQQLVSLSFRINDNQQAIYWMSKQLNKNKQNPQILLQLVQWLSQNETESNVIEFFDRIYDRTNSSDAALIFKVALALGQTALVKHYEQYVQLHTLHETDQLRLAILNKDAVQGHKLLKSAIGPELAKQQQLWLQVVVGSLIWNKADMLEASLKHLGEAEGLEEATALILQAVKGQQPDQATHEQYAEWLFMVSKQLFLVQEYSIFDQFVGVFQSPALINQLANHFYSLNLMPQALQYYSLLLEQQQLDHTSIENLAIYHVNHGFNEEAVEFLKEAIAVQPGKRHLYSVLMRLLPNEQTSSLVQQFEQRFPNFSSISFVEEFIKDKALV

SEQ ID NO: 823 - protein, 265 aa, Nitrospira sp.
MSLSVYIIAYNEAKKIADTINSVLWADEIIVADSASTDETARIAGDLGARVVQIPFHGFGDLRNQAIKACTHEWIFSLDTDEQCTPEVRDEILRVLAGTPAHDAYLVPRRNYFMGRWIKHSGWYPNFRQPQLFRKGAMKYAESPVHEGYELLTSKPVGCLSQAIWQVPFRDFEEVVKKANRYSSLGALKLADRRVSMGAALGHGIWSFLKHYVAKRGFLDGWPGFVIAFGNFEGTFYRYAKRYEAQQRWPMPTQPALRRPDVQSK

SEQ ID NO: 824 - protein, 410 aa, Unknown
  Description of Unknown: Acidobacteria bacterium sequence
MRPVPPRRRIRRRAAAAKRRAARRARSAGPVSSHPSVDPRRRCAVELDHRPTSSTAVGASERLFWQASRRCRRAPSGPSRGSPSTSRRSCPPPSSVIRHPRARTVLDLLVSSPSSIEESTSSPSAAERPKISAIVTTFNEERHIRECLESLVWCDEVLVVDSFSTDRTPELVQEFDNVRFVQRVYYGSASQKNWAMDQTTHEWILIFDADERCTPALRDEILRLFAGGDPPHDAYTINRRVFFMGEVIRFSGWQRDRVVRLLRRGAGRYPNRRVHADMVTRGPAPCLEEAMDHLMVEDFVKYAQRIQKYSWWGAAQAWREGKRSGMLQVVGRSFWRFVRTYCLQLGVLDGMRGMVFCLLQAYGTYLKWSYLWSWQINERLGQEPNLPIFDESEETWQGLAEFGAPTTLES

SEQ ID NO: 825 - protein, 266 aa, Unknown
  Description of Unknown: Aquificae bacterium sequence
MQKKLTVIVPTLNEEENLQACLESVAWADEIIVVDSGSTDATLEIAQSLADRILEHEYINSATQKNWAIPQATHPWVMIVDADERVTPELKKEIQKVLEAPKHQGYSIGRLNHFLGHPLRHGGWSPKEDRNVRLFMRDKGQYEDKEVHADVIVEGSVGHLKHPLIHYSYRNLDQYFRKMERYTRWAAMDIAKKGSPVKWHHVTLRPLGDFIKLYFMKLGFLDGFPGLIIAFLSAYYVMVKYSRAWEIEKKGLDTQRANPVSRHKNK

SEQ ID NO: 826 - protein, 263 aa, Polynucleobacter sp.
MPKVSVYIIAFNEERKIADAIGSVAWADEIVVIDSNSKDRTAQIAEELGAKVVQVEFNGFGQLRRDAVSACSHEWIFSLDSDERCTPKVAQEIQQIIQNNLADVCYVPRRNFFLGKKIEHSGWYPNYRQPQLFKKSCLTYDNSPVHEGYDISAGAKIMHLKNAIWQLPFNDLSESIAKMNRYSSLGSVKSRQKGSTYAKALGHASWAFMRHYVFKKGILDGWAGFFIAFSYFEVTLYRYAKAVELANQNEWDEQWKKVQKTDV

SEQ ID NO: 827 - protein, 252 aa, Unknown
  Description of Unknown: Chryseobacterium sp. OV705 sequence
MPELTEKVSGLIITYNEEKNIREVLECFDFCDEIVIIDSFSKDNTVEIAKANPNVKIIQNRFEDFTKQRNLALDNAKNDWVLFLDGDERISQELKKEIIKTINDSKACDAYYFFRVFFLGKEKIRFSGTQNDKNFRLFRKSKAYYDTNKKVHETLIVNGDVGFLKNKLLHYSYENYDAFKKKMLYYGALKGSELTDKGKKYSVITHWSKVAFKFTKTYFLKLGILDGINGLKISYLQSLYVDETYRNLKNKK

SEQ ID NO: 828 - protein, 256 aa, Unknown
  Description of Unknown: Photobacterium ganghwense sequence
MRRHSLSVIVITKNEADRIEPCLQSVVDIADEIIVLDSGSTDNTVEICQRYTDNVTITDWPGFGKQKQRALDKATGDWVLSIDADEALDETMKSALIAMLEQEQIEHTAYRLPWGVTLYGKTLKYGRSARSVLRLFKREGARFTLDEVHETVVPAPGSTGVMKGLLLHYTHRDYGHGLDKAAKYAWLGSQKYHRKGKKSHGLVLALLRGMWTFFHIYILRRGFLDGSVGFIVAMTYAQVNFNKYVGLWLLEQEKNA

SEQ ID NO: 829 - protein, 260 aa, Polynucleobacter sp.
MPTLSVILITRNEEANLADCLASLEGIAQQIVVVDTKSTDQTLEIAKNHGALVSQPLDWPGFGPQKNRALDLATEEWVLSLDADERLTPALRSEILTAIHHPAHVNCFAIPRLSWYCGRFIRHSGWNPDYVDRLFKRGTARFSDDLVHERLIPQGPVAKLENPMLHYSFMNYSQVLQKVDRYSTASAEQAFARGKTSSPIKAVLHGAWSFLRTYFLRAGFLDGPQGFALAISNGQGTYYRYMKLWHLHQEAQNKHHPHSK

SEQ ID NO: 830 - protein, 302 aa, Unknown
  Description of Unknown: Candidatus Gottesmanbacteria bacterium GW2011_GWA1_42_26 sequence
MHLSAVVNTRNEERNIVRCLQHISPYVDEIVVVDMESSDNTVKLARKFTAKIWQHENTGYVEPARNFAIGKATGEWILLIDADEILPEALGLKLRRLAQHGVYSYYRIPRKNLLFGKWLSHSGWWPDYQIRLFKQGSVSWNDEIHSVPVTEGVGMDLPAEEKNALLHYNYATLEEYLTRLNRYTSQEAKQLVQDDYVFSWKNLVAKPGQEFLTRYFAWEGYKDGLHGLALAMLQAVSFAVVELKVWENTGFKDDVNAGQPDDVMKQLRKIKYQLNFWYFTKKAETSSDLTKTINKIRAKISL

SEQ ID NO: 831 - protein, 350 aa, Paenibacillus sp.
MIVKNEEQTLDRCLSSVSDLVDEIIIVDTGSDDQTKQIARKYTDRVFEFVWVNDFSKARNYAFSQATQEYILWLDADDVILPTDAEKFKELLAGLEWTVDSVSMNYILARDEYGNVMTSLRRNRLVKREKRFQWIGFVHEYLQVAGNIHYADINITHDRLHGNSDRNLHIYENHEATGELFSSRDLFYYGNELADHGLWERALEKYDQFLQRPDGWVEDRIRACGRAADCAAELGGISEAKAKALQSFVYALPRAEICCRLGHLHIKEEKFEDAIFWYKLATELKKPTDSFAILQHSNWTWVPHLQLCVCYDRLGQRELAFRHNEIAAGFVPNEPSVVGNRAYFKGLGLA

SEQ ID NO: 832 - protein, 249 aa, Unknown
  Description of Unknown: Chryseobacterium sp. G0201 sequence
MMNISGLIITQNEEKNIQQVLECFDFCNEIIIVDSFSTDKTVEIAEKFPNVKIIQHKFEDFTKQRNLALDTAKNDWVLFLDGDERITPELRKEIIDELNKDQQKDAYYFYRKFFFAEKPINYSGTQTDKNFRLFRRSKARYIAGKKVHETLEVNGTIGEFRNKLLHYSVSDYESYKQKMIHYGVLKGQELAIKGKKYSILAQYAKTAFKFFKAYIMRLGIFDGKEGYQLSYLQSLSVFETYESLKKEQN

SEQ ID NO: 833 - protein, 283 aa, Phycisphaera sp.
MSTESVKVTVVIPVKNEEKNLPECFSHLGRFSEVLVVDSGSTDRTLEICEAHGVEVLQFRWNGEFPKKRNWTLRNHTFQNEWVLFLDADEFLNPEFVSEVEQAVSDPQKVGYWLNYNNFFLSGKLRFGESMRKLALFRIGSGEYERIDECSWSHLDMEVHEHPVLDGPVGHITTPIFHKDYKGIGSYLAKHDAYAEWEANRYVALNAPGSDAQQWHTGRQKVKYRHLTKWWLAPAYFAYSYVYKLGFLDGRRGLVFCLLKFHYFFQIRLRILEKLAAQNSDGT

SEQ ID NO: 834 - protein, 256 aa, Helicobacter magdeburgensis
MQKLPISVTILVKNAQSTFSECLSALVDFDEVIVLDNGSDDGTLDIAKNFANVKIYQSEFIGFGALKNLAISYATHEWILSVDSDEILESSTLEQIRLALSSMQPHHIYAMPRKNLYNGEWIKACGWYPDYVWRLFNKTFTRFNDNIIHESVILPKNAKLIKLTSGLKHYAAPNMESIIAKMNRYTSYSAEQKHRHKKKASMLGAIARFWLTFFKDYFLRGGIKYGYKGFIIALLNASGAFFRYAKLYELDKQDKK

SEQ ID NO: 835 - protein, 260 aa, Emticicia sp.
MQKKTTKIPLSIVTLTLNNQRTLDSVLKSVADWADELLVLDCGSTDETESIARKYEANFLYRKFDNFGKQKAYAVSKAKNDWVFIVDSDEVVSDELREEILDVFQNASFEGYMIPNTLIFLGKPLRYGREYKMPHLRLFNRKHGNYNDKEIHEDVILNGKRGSLKNHVLHNSYADVTDFLNKINNYTTKGAVELHRAEKKVSVFNIIIKFPLKFFVEYLFRLNFLNGYRGFVWSFGQAFGSTMKYIKLHEINQNNFKSRY

SEQ ID NO: 836 - protein, 252 aa, Unknown
  Description of Unknown: Chryseobacterium antarcticum sequence
MLELKEKISGLIITFNEEKNIQEILDNFSICDEIIVVDSFSSDQTVEIARQNPKVKIVQQKFEDFTKQRNLALDQAKNDWVLFLDGDERITPELQTEIITELNKSDKKNAYYFYRKFYLGEKPIHFSGTQNDKNFRLFRKSKCRYVADKKVHETLDVQGSIGILKNKLLHYSFENFEQFKSKMLYYGLLKGNELADKGKKYSIITHWGKVALKFLKTYIIKLGFLDGIDGLKISYLQSLYVNETYKNLKVNK

SEQ ID NO: 837 - protein, 316 aa, Mastigocoleus testarum
MMSNKIPVSVLIPAKNEEANLPACLESLQKADEIFVVDSQSDDKSVEICESYGAKVVQFHFNGRWPKKKNWSLENIEFRNEWVLIVDCDERITPELWQEIAYSINNPEFNGYYLNRRVFFLGKWIRFGGKYPDWNLRLFKHKLGRYENLNTEDIRNTGDNEVHEHVILNGKVGYLKNDMLHEDFRDLYHWLARHNRYSNWEARVYYNLLTGKGDSGTIGASLFGDAVQRKRFLKKIWVRLPFKPLLRFILFYILQGGFLDGKAGYIYGRLLSQYEYQIGVKLFELRNCDGQLNTGNKTVNRDRSSSLTQKIEQTAT

SEQ ID NO: 838 - protein, 256 aa, Unknown
  Description of Unknown: candidate division NPL- UPA2 bacterium Unc8 sequence
MKVQKAPFSVAIITKNEEKRLPDCLKSVSFADDIVVLDSESTDRTVEIAKEFGCRVFVEEWKGDGPQKNSAVAKCRYEWVFVIDADERIPKETKNEIIKIVNYSHSADAYSFPRKNLFHGKWIKHSDWWPDYKVRLFKKNAGQFHFLTHEAWLTKGTVKKVTTPIEHFSFSNYSDMFNVLNERTTIMAKELFDAGKKATSFTPFLHGAGMFLRAYILKLGFLNGLDGFMIAATGAGGSFLKYAKLLELQWRRESTQ

SEQ ID NO: 839 - protein, 288 aa, Salinibacter ruber
MTDVSDEKSVPVSVLIPTRNEEANLPRCLDAVAGWADEVLVVDSQSTDGTIEIAGDYGAEVIQFEYDGGWPKKRQWALDTYDFDNEWILLLDADEILLPPIKSEIAEAIQTDAYDGYWLRFQLHFLGRPLRHGGFDLWKLYLFRHGTGRYERRFEGQDESMSDIEIHEHVVVDGEVGRLQHPVRHENWNSLYRYIEKHNEYSEWEARLYHEGDSGAVEPDLFGNQAQRRRWLKDLLVRVPGFPLITFLYHYVLRLGFLDGKPGFIYCVLKGVQRFHAKAKWYELELRE

SEQ ID NO: 840 - protein, 261 aa, Unknown
  Description of Unknown: candidate division BRC1 bacterium HGW-BRC1-1 sequence
MKPKLTVIIPTFNEERNIRQAVESASFADEVMVVDSFSTDATTSIAREMGVRLLEHEYINSATQKNWAIPQASHEWVMVLDADERITPDLREEILDFISAPQGDVGLRIFRANYFMGKPIRHCGWQDDSVLRVFPRDDARYLDREVHADVVLEGPIRIARSRMDHFTFDSFAQYMRKFDQYTTWAAGDRDRKTARVGYRHLLGRPLWRFFKQYILRLGILDGRAGLIVCMLSAFSVFLKYAKLWERRQATDDETAQTGTPT

SEQ ID NO: 841 - protein, 299 aa, Unknown
  Description of Unknown: Candidatus Woesebacteria bacterium GW2011_GWA1_39_8 sequence
MDKISVVINTLNEEKNLPRALASIKGFADEVVVVDMKSDDNTTQIATKFGAKVFEHPRAGYVEPARNYAISKTSGNWILILDADEELSADLKAEIARVIKSKEADYFRIPRKNFIFGKWIKHSRWWPDYNIRLFKQGCVSWSEVIHSVPMTTGIGKDFDDKEDLAIVHHHYETVEQYLDRLNRYTSEHAKNLVKEGYKFDWVDLIHKPSAEFLSRYFQGGGYRDGIHGLALSLLQSFSELTLYLKVWQLSGFTKSNPHIKDVVDELKNAESEVHYWEADTLLHEIGGLKHRIKRKLKIS

SEQ ID NO: 842 - protein, 256 aa, Cellulophaga baltica
MKEKLSVFIITYNEERILDKCLNKLSWADEIIVVDSGSTDATLEICKKYQVKLFHKDFEGFGTQKQFALEQTTHNWVLSIDADEILTDELIAEIQDVLASGTANNGYYLKRKHVFLGKVFEYGPESKEYILRFFKKNMGNFDGKKVHENVVLEGPSDKLKNDFLHFTTRSLDNYIEKLSNYASIFSEGKYLKNKRYGIAYIFIKVKFEFFKKYFLELNFLNGQEGFYWSYLAAYYMGIKYMKTNEQYKQVKKQLMF

SEQ ID NO: 843 - protein, 249 aa, Arcobacter thereius
MIKHISVVIIAKNSERTIKNTLDSLTGFEDVVVYDNGSSDKTIEIAKSFSNVNLAQGEFKGFGWTKNKATTYAKNDWVMIIDSDEVVNKDLFEYLKTKKLEDNTVYRLNSNGYYKNIRVKYCGWTLTVKRVFNRKITSFHKDVQIHEYIVSDGLKEEVLGGSINHYSYNSISELIIKADRYSTIFAQNNVGKKYSSPSKAFFNGLYSFFRTYILKQGFRDGYVGLLISFSNMVGSFYKYIKLYEANKEL

SEQ ID NO: 844 - protein, 251 aa, Unknown
  Description of Unknown: Candidatus Microgenomates bacterium sequence
MKISAVVLAKNEEKNIKECLDGLKWCDEIIVIDDDSVDKTAAIAKKQGAKVFKRQLEADFASQRNFGLQKASHDWIFFVDADERVGEDLAEEIKARLNQGSLPSGFFIKRIDFFGGKFLKYGETDSIKLLRLARRGSGEWKRAVDETWEIGGEKSELKSPLRHYSHLSLTDFLTSINERSTLNARVFYNEGKRVTFFEWLKPAAKFIRNYFFNLGFLDGTAGFVFAVLMSLHSFLVRGKLYLIWRREGGWK

SEQ ID NO: 845 - protein, 500 aa, Sulfurihydrogenibium azorense
MDIKVSACIIAKNEEKNLPRLLNSIKGKFDEIVLVDTGSTDKTVEIAKSYGAKVYHREWNGFADARQYAVDMASGDWIWFFDADTELEEEEYERFKRILLFIKDHPEYEGIGTVYKNLGLDGNIKSLSSTVHIHKKHPDIVWEGKIHERVVNKKTSTILIPPMKVHILHYGYAEINTQIEKAKRNLRLLFEELKSCKDNEKEYYVNIFYIIQSYSVLAAAIDLKKYSKKSLRYIKKFLRYKDNIPNESTFKKHFYVYATRTYISLENYKEAEKLLEDALNIDKFYPDYHFLLYTVYKAQEDTKKAVESLINFILSIDKTSKIYGVISDYISYKEKVISDLESYILSNEDRDYFKEIVKDHWNETKGENIGRVLFRILKDENQKEALKVIKKVATIHQSSEAYTDLGEYYYENQNMEDAFRSFLKAYDLNPFNIKANKYLSDLYFSFKDYERAFYHGLKYLNLSRDINFIKNLEDIVNLSQNLNLKESFEKLNKKLSQVVS

SEQ ID NO: 846 - protein, 345 aa, Unknown
  Description of Unknown: candidate division NC10 bacterium sequence
MAELTATIITHNEEHTIRACLESVAWAKEIVVVDSGSSDRTLEICRGYTDKVVINPWVGFIEQKNFAVSLATYDWILNIDADERVPEELRRAIERELCAPRYDGYRMARRNYFLGRWMRHGGWYPDRVLRLFDRRKGRFGGINPHACLVMPNGAVGSLDGDLIHLTYRDVSQYIRKQDAYTGTSVEERARTRRSGPVGRAELMLRPLVKFVQVYLLKRGFLDGMQGLIAALGAAYFNFVKYTKMRALGHDAPLNNHLVNPISEYLRRMDRDSTIAEAALEQEGRRTGPLDLLVRPLFTFLQACLRRGDILEGRRGLTMAGLHAGSTFAAYAKLWERHRLNREVEW

SEQ ID NO: 847 - protein, 285 aa, Unknown
  Description of Unknown: unclassified Achromobacter sequence
MKLSVIMITKNEAANIVDCLDSVTFADEFIVVDSGSTDNTVELAREMGATVLQTADWPGFGPQKNRALDLAQGEWVLSIDADERVTPELAAEICRKIGIDAGKGPGAAPGVSRDTDAKDAYEIPRLSEFCGRFIRHSGWWPDPVLRLFRRGMGRFTDAAVHEKVVPVGTWRAGRLQAHFIHYSYPDLDALIAKSNRYSSDAATMMYARGKRASIFSALGHGFWTFIRIYLIRRGFLDGRQGVVLAVTAAAGSFSRYAKLMFMGDEDKRLQDAAERRGDAGSHTRP

SEQ ID NO: 848 - protein, 259 aa, Prevotella maculosa
MNGNEKITVVINTYNAERHLNACLEAVKDFDEVLICDMESTDRTLDIAHSHGCKVVTFPKGEHRIVEPARQFAIDRAENPWVLVVDADEIVPCALRHYLYEAIQKPTGFAAIAIPRKNYFMGRMMHSSYPDYVLRFLKRERCHWPPVIHASPEVNGRVIKIPSARQDLAFEHLANDTVADIIAKNNTYSDYEVPRRRKKNHGIMALLCRPTFRFFKSYFLKRGCLDGLPGLIHAVLDAGYQFAIVAKLIEERQEKRHSS

SEQ ID NO: 849 - protein, 315 aa, Geitlerinema sp.
MSSSSSNSPAKVPVSVLIPAKNEEANLPACLESVARADEVFVVDSQSEDRSGEIAERYGAKVVQFHFNGRWPKKKNWSLDNLPFHNEWVLIVDCDERITPELWDEIDEVVRKNDRDGYYLNRRVFFLGVWIRHGGKYPDWNLRLFKHKVGRYENLHTEEVPNTGDNEVHEHVVLPTQAGYLKHDMLHIDFRDIYHWLARHNRYSNWEARVYYNLLTGQADDGTIGANLFGDSVQRKRFLKKIWVRLPFKPFFRFLLFYILRLGFLDGRAGYIYGRLLSQYEYQIGVKLYELRKFGGQLNKLEEKPKSTGATQSIS

SEQ ID NO: 850 - protein, 295 aa, Bordetella genomosp.
MNRIPVSVIVMTKNEERNIEKCLRALADFDEVFVVDSASTDRTVEMASRLGARVVPFQWNGRYPKKKQWCLENLPFSHDVVLYVDADEVMTPELAREIGDCLPRFSQGAGGAFVGFDYVFCGRRLNHGHRVYKLVLLARDRARFLDYNDLDVANMWEVEGHYQPQVDGQLFLLRNRMAHHDHDGLYHYFDKHNRYSDWEASLRVKGLLNDPREANIGLRGAMKRMFNAMPFKAPAAFLHCYVLRLGFLDGKVGLDYAVARAMYYWQIGLKSRELKAAMAAATPGGGTEPVRDGTH

SEQ ID NO: 851 - protein, 264 aa, Unknown
  Description of Unknown: Candidatus Roizmanbacteria bacterium CG22_combo_CG10-13_8_21_14 _all_34_12 sequence
MKLSAVVLTKNEEKNIDRCLGSLDFCDEIIIVDDYSTDNTKSKINPPAGGQNDRLNIKIFENHLNNDFATQRNFGLSKTANDWILFIDADEEISEELRKEIIGLDSRLRVNDTVAYSIKRRDYFWNKELKYGEVKKVRDQGIVRLVKKNSGKWMGTVHEVFYTAKNIGQLTGFLNHYPHPTLKEFINDINNYSSIRAEELFNRGTGTNVFEIIFFPFGKFVYNYFFNLGFLDGPAGFTYAFMMSFHSFLVRAKLYQHNHSKIVV

SEQ ID NO: 852 - protein, 248 aa, Elizabethkingia miricola
MEKVSGLIITYNEERNIAAVLSCFNFCDEIIVVDSFSTDKTVEIAQQNPKVKVYQQEFVDYTKQRNKALSLAENDWVFFLDGDERTTPDLEKEIIETINNKDSKDAYYIYRIFFVGQKKINFSGTQNDKNFRLFRKSKAFYTETKKVHETLEVQGSTGILKHKLLHYSFENFESFKKKMIYYGLLKGTELVEKGKKYSVFTRWSKVAFKFIKTYFLKLGILDGIDGLKISYLQSLYVDETYQTLKNKS

SEQ ID NO: 853 - protein, 262 aa, Unknown
  Description of Unknown: Candidatus Omnitrophica bacterium 4484_213 sequence
MNKFPLSVVIITKNEEEDIRECLKSVQWADEIIVVDDGSTDKTREIAREFTDKIIVKKMENEGRHRNWAYAQAENEWVLSLDADERITEELKEEIYQRLNEAGEFSAFTIPRKNFLGDYWLRFGGEYPAGQLRLFKKASFRFEEVEVHPRAFLEGKCGHLQKPMLHYSSKNFTDFLNKFNSQTTLEAKKWISTNRKVSLGHALRRTIDRFLRKYLFKKGYRDGFIGFMLALFAGLYQIISYAKYWEMKRQPTVNSLQSTAKN

SEQ ID NO: 854 - protein, 265 aa, Kosakonia radicincitans
MFKISVCLLTFNSARLLREVLPPLIFIADNFVVVDSGSTDATLEICREYGIDVHHRPFDIHGQQMNYAISIAAHDWVLCMDSDEILDEQVVNYILKLKAGEEPTPERAWQLPRYWYVLGKEVRTLYPISSPDFPVRLFNRQRARFNDRPVDDQVIGEMTCEKIPGRVRHDTFHTLHEMFNKLNSYTSRLIKYRDIRPSVLRGIISAIGAFFKWYLFSGAWREGKVGAATGLYATLYSFMKYFKAWYAHKEEKFSATTEDREKRTT

SEQ ID NO: 855 - protein, 259 aa, Unknown
  Description of Unknown: Parcubacteria group bacterium GW2011_GWC2_32_10 sequence
MNISAVVLTKNEEKNIKKCLESIDFCEEIIILDDFSTDKTIEIVHKILKIHKVYKVLQRKLNGDFAAQRNYGLSKATRDWVLFLDADEEISPELKKEIVSCIKDKDSIEAFYLKRRDFFWDRELKHGELSSVTKKGLIRLVKKESGKWMGNVHEVFHTAQNCKILNGYINHLPHQSLSEFIKDINNYSTLRAHELQRQGYETNLFEIVFVPLTKFILNYFLLLGFLDGAAGFTYSFMMSFHSFLVRSKLYQYTKLKSND

SEQ ID NO: 856 - protein, 257 aa, Unknown
  Description of Unknown: Candidatus Erwinia haradaeae sequence
MKKLQKLSAVIITHNAEEVLAECLESVSWADEIILLDFKSSDKTLDIAVRYGVMVYQSNTWPGYGKQRQIAQSYANYEMILMIDSDERVTTELQQSINLILQQPPAKIVYSISRCNVFLGQAMRHGGWYPDRVIRLYPSCYAYNNHLVHESLDVSAIPIRSLHGDLLHLTSRDFCTFQLKQCSYAKAWAKQRYQKGKHYSITKIIYRSFWSFIRTLLVRGSFLDGTRGWLLAIVVCQYTFNKYVALWDLNCTSRNRN

SEQ ID NO: 857 - protein, 252 aa, Unknown
  Description of Unknown: Chryseobacterium sp. Leaf405 sequence
MKDQKISALLIVFNEEKNIEEALESVEFADEIIVLDSFSTDKTVEIIKTKFPKVQLYQNKFEDFTKQRNLCISYAKNEWILFLDADERITPELKKEILKEIKKPVTKKAYFFKRKFFFMGEQVNYSGTQNDKNIRLFKKEVAHYDENKRVHEGLANVENPGTLQNYLLHFSFDSYEAYYTKVIHYSRLKAKDLYEKKTPYGLIKQLSKSIFNFFKMYFLKLGILDGKKGIILSYLSALSSFKTYEFLKEEYA

SEQ ID NO: 858 - protein, 250 aa, Unknown
  Description of Unknown: Candidatus Roizmanbacteria bacterium GW2011_GWC1_37_12 sequence
MRPKIAVLIITKNNQDTIGKTLESVKDFDEIVVVDSKSKDKTLEKSRNKSKIKIFRKEFNDIGKQRLYGLKQIKADWVLILDSDEVVSKELKKEIVKLLNGYIVKEKAFEIPYQNFFLGKPVNYGGENYKMVRLFRRDALEIKPSIVHNKLIVKHGKVARLKGKILHYSYRSLGQTYKKFTDYALKMAKIKAKNGEKSSLKKIFLYPVHMFWARFVKDKGYKDGMFRIPLDIGFAYMEFLTYFLLMLKTR

SEQ ID NO: 859 - protein, 312 aa, Nostoc sp.
MSSKIPVSVLIPAKNEEANLPACLTSLEMADEVFVVDSQSTDHSVAIAESFGANIVQFKFNGSWPKKKNWSLDNLPFRNEWVLIVDCDERITPELWAEIAQVIENDEYSGYYLNRRVFFLGKWIRHGGKYPDWNLRLFKHKQGRYENLHTEDIPNTGDNEVHEHVILQGKVGYLKNDMLHEDFRDLYHWLERHNRYSNWEARVYYNLLTNQDDGGTIGANLFGDAVQRKRFLKKVWVRLPFKPLLRFILFYIIQRGFLDGKAGYIYGRLLSQYEYQIGAKLYELRDCGGTLNTEKSQPLPSSLSQEMRQTAT

SEQ ID NO: 860 - protein, 259 aa, Unknown
  Description of Unknown: Acidobacteria bacterium sequence
MEALTATVITRDEEANIAEALERLRFADELVVVDSGSTDRTLEICRRYTDRIFHRDWTGFVDQKNFAVDCASHDWILSLDADERPSSRLEAEIRALRTSGFSRPGYRVPRVAYFMGRWIRHGDWYPDYQLRLFDRRRGRWHGGSVHESVRIDGSPGYLNGEIEHFTYRSLSDYLKRLEAYSSLAAADYHARGRRANALSLAAHPPLAFLKNYLWKRGFLDGVPGLMVAIMAATSVYFKHAKLYEIERAVRAGVKAQKCF

SEQ ID NO: 861 - protein, 255 aa, Capnocytophaga gingivalis
MQGLFSMKISVIINTYNAEKHLATVLETVKDFDEVVICDMRSSDRTIAIAEQYGCKIVYCERYPYVEPARNFAIAQAQYPWVLVIDADETIPTKLREYLYQITENPTIGGVYIPFKNYFIDQYMRSAYPDFKLRFFKKEGADWPKEIHSTVKVQGQVIKIPRHRTDLASEHLANDSVTTILSKNNNYSTQEVERRKGKRIGWGKLLFSPFFWFIKYYFIKKGCLDGKRGFIFAVLKAQYKFSCLAKIYEYQQLHR

SEQ ID NO: 862 - protein, 268 aa, Dysgonomonas sp.
MISIIILTKNEERDLPKCLDSLKWSDDVHILDSGSTDKTINIAEQYGAKLSFNPFKSFGDQRNFALDNLDIKYGWVLFLDADEIATTGFVEAIKEGINNADESVAGFYCCWKMMLENRWLKHCDNFPKWQFRLLRKGRASFTDFGHGQKEGEVKGDIMYIKEPYLHYGFSKGWAQWLDRHNRYSSLEAIDRLKKCPPLRNIFSKSKSIRNVALKSWLIRIPGWPFLRFFHAYVLNLGFLEGTPGLIYCANMAYYEFLIKIKIREAKFK

SEQ ID NO: 863 - protein, 253 aa, Geomonas terrae
MKITATIITLNEEKFIGDCLKSLDFADEIVVVDSGSTDRTEEICRENPKVRFVHRAWPGFGKQKNAAAELAQNDWIFNIDADERVSPRLKESILKVAEGGAPCYRVARENYFGDRWIRRCGWYPDFNKRLYDRRECAFSEKEVHEALECRGRVGELDGNLVHKTYSGLSDYVIRMERYSTLAARELVKKGKRPGLAHLLFKPLFTFFKMYVLKLGFLEGGMGFVLSTIYAHYTFYKYGKAIELNRAEKELRRG

SEQ ID NO: 864 - protein, 255 aa, Unknown
  Description of Unknown: bacterium TMED88 sequence
MKKPELRISVCVPTLNEDHNLRDCLKSVDFADEIIVVDSGSTDQTLGIAREFTDRIYSRDWQGIARQRQFAMEQARSPWVLHLDADERISDALAQEIQTALPKSPQKTAGFSMPRKTRYLGRWILHGGWYPDRKIRLVQREFSHCRGDGLHDHIDVSGEVKALAHPIHHFTYRHLSDHLQTMDEFSSVSQGDPAVQDIRLPALQMVVRPIAKFFSCYFLKQGFRDGIPGLVIAANSSFYVFLKHAKAWEKGSALK

SEQ ID NO: 865 - protein, 260 aa, Unknown
  Description of Unknown: Candidatus Gottesmanbacteria bacterium GW2011_GWC2_39_8 sequence
MAKKTEIKLSGIIIARDEEKMIGEAIKSLNFADEIIVADSGSKDRTLEKVSKTQRLKDSKIRTIRLKAEELNFSYFRSQGLKEAKGEWIFYLDADERVTKELAMEIKEAIRGSEFSGYKIRRVNYYLGKKWPKEEKLERLFRKDRLSGWYGKVHESPKYEGQLGELKNNIVHYTHRDLSKMVEKTIKWSEIEARVRYDAGHPRISWWRFPKLMFGQFWEYYVNQGGYKAGTVGLIESMYQVYSIFITYARLWEMQREERN

SEQ ID NO: 866 - protein, 264 aa, Maribacter orientalis
MVTNKEKLTALIITYNEMGYIEKCLDSVSFADEIIVVDSFSTDGTYEFLKSHPKVKVIQNPFENFTAQKSFALKQATNDWVLFLDADEIVSTSLQMEISETVSSDTEIAAFWFYRQFMFKNEKLNYSGWQTDKNYRLFRKSKASFSDCKIVHETLDVEGTSGILKEKLIHYCYKNHEDYKGKMLKYGRLKAIESFYREKKYSYAMMIAKTSWKFFNHYILRLGILDGKKGFIICHLNSLGVLERYRELKKLEQKNELAYYLVMP

SEQ ID NO: 867 - protein, 302 aa, Unknown
  Description of Unknown: Microgenomates bacterium 39_7 sequence
MKLSVVVNTKNAGNTLADCLTSVTFADELIVVDMHSIDRTKLIAQEYKAKFFLHDDLGYVEPARNYAISQATHEMILVVDADEVVSDGLKKKIQDILSKKTSADVYLIPRKNMVFGQWLQHTGWWPDYQARLFKKGKVSWSEAIHQPPLMLGKVVKLSPEADHAFIHHHYPTVHSYLERMNRYTNVQAEHSLKGFADKVSVDDVISSFYNEFFRRFFVLSGYKDGIAGIGLSFLQSTYELTVQLKKWERQTESNSSTDLDELAINSLELSRSSLNYWLADWRVKHSKGLLLLYWKLRRKFKI

SEQ ID NO: 868 - protein, 261 aa, Prosthecobacter debontii
MTPISFCCVTYNAERTLDATLSSLVGLADEIIVVDSFSTDSTLDIARRYTSKITQEPYLYHGVQMNKAIALASHDWVFCVDADESVNAELAQILRAWKEKGPVHHDAYRVHREWLFLGRSLHAFYPVSSPDRVVRLFNRQSVQFNDRPVDDKPVGFKSCSILPLPGLLVHDTTGSIHDLFGKVNHYTSRAARGTDQSEVTSASLGKVITRPWVAAFKWYLVKQGYKDGFPGVVLGMYAFLYTFLKYAKLYERKLLAKGKPN

SEQ ID NO: 869 - protein, 256 aa, Unknown
  Description of Unknown: Flavobacterium urumqiense sequence
MNLNLSKRISVLIITLNEEANMQALLTDLDFADEVVVVDSYSTDKTKSIAQSFCNVRFIQNKFENYSSQRNFAISYAKNDWILFLDADERLTPELKKEIKETLRTNEIFTAFLFYRKFMFKNSILHFSGWQSDKILRLFNKNFAKYKPEKLVHEKLGVSGKVGIFKNELIHHSYTDYKSYKIKMINYGKLKAQEKHIKNLKPIFLLPIFHPTYTFLYNYLVRLGFLDGKKGIIICYLNAYSVSVRYKELNLLWHKK

SEQ ID NO: 870 - protein, 282 aa, Winogradskyella sp.
MTKIKTPVSVVILTYNEEIHISRVINGVKDWADEVVVLDSYSEDKTVDIAKSLGVDVVFRKFDNYAKQRNYAIKEITLKNDWILFLDADELMTDELKVEITDTLRNPQKDGYEIKFRFYFMGKWIKYGGYYPTYILRLFNRKKASINRDINEHITVDGELGRLKHDFMDVNKKDFTFWVHKHNKYSTYEAEDLFKKNKTEDEKGFANFFGTQAQRKRWVRVKIWNRLPLFFRPLLYFLYRYFLKLGFLDGMVGLIFHFNHAFVYYMQIDVKYYQKKKNLFNE

SEQ ID NO: 871 - protein, 249 aa, Marinobacter sp.
MKLSAVLITKNAGEDFERCLQSLTFADEIVVLDSGSTDNTLAIAKRAGARIFTSQTWPGFGTQRQHAQQYAQGEWVFWVDVDEVVSDELALAVQAAIDDTPVNTVFEVSRLSWFFGRFIRHSGWYPDHIVRLYRRTEFAYNDALVHEKVHCDGAQVKKLSGELLHYTATDFQDYLSKSVRYAADWAEGRHRRGKKANLFDACSHSTAAFLRKYIFQRGFLDGRHGFLLAVFTAHYVFNKYAALWIKTRR

SEQ ID NO: 872 - protein, 286 aa, Pseudoflavitalea sp.
MNYSQLSPVAGSIPGIVVQVQTPTPTELKISAVIITYNEEKIIRKTLSQLYWCDEIVVVDSYSTDNTVAICREFGADVYSRTFDGYGSQKQFAISRATNDWVLCIDADEIPTDNLIREIRSINPNTAYAGFSFPMNMVFLDKEFHYGKESGRHFIRLFNREKGGVTADRVHESFHVDGPIKKLEHTILHYSYTSIHQCIEKLNRYSTLSSGISYSKGKNKSALAVLFGLPFNFLKYYLLERNCLNGMKGFYWSVFASYYHFLKYVKLKELKQPEKRPVIIPDTVYA

SEQ ID NO: 873 - protein, 304 aa, Unknown
  Description of Unknown: Candidatus Pacebacteria bacterium CG10_big_fil_rev_8_21_14_0_10 _56_10 sequence
MTSLSVVVNTKNAATSLEKALQSVKFADEIVVVDMKSDDGTVKIAKRYTDQIFSHRPLDYVEPARNFALSKANGDWILVIDADEEVPASLGKKIRQIITDDQAADCYYLPRQNIIFGQWIKHTGWWPDLVLRLFRAGHVEWLDEIHSVPITTGVVKELAAEPENAIVHHNYQSVDQYLDRMNRYSTVQARGELEVVKTKRVPEPIRFWQEFRAEWLRRLFAQRGVEDGAHGLALAMLQSCGEMAVELKKWQQFEFVPTQLSRSELSAELREFQRDLNYWLADWELRHSAASTAWWWRLRRKFKF

SEQ ID NO: 874 - protein, 283 aa, Unknown
  Description of Unknown: Comamonadaceae bacterium NML00-0135 sequence
MDRELPHPHAAPLAPGRAPAGAQRPRLTIAVLACNEERHIGQCLQSAAFADEVVVVDAGSTDRTVEIARSMGAAVHVHADWHGFAVQRNRLLEHASGDFVFFLDADEVISPAFQQELLAIVAQDDRQAVWCIRWQLVAFGRVLPRSMSRTRVVRLFPRQLIERFEGVVHEQALLRAPAPRKDIQALLVHYTNPDVSTSMAKVMQYAMLGATKRKAQGKRGGVLRGLAAALVAFVRYYLLRLGLLGGGAGFLYCFFKALESFLRYAALRYDYERLSDDVQRRRH

SEQ ID NO: 875 - protein, 260 aa, Unknown
  Description of Unknown: Sphingobacteriales bacterium UPWRP_1 sequence
MQQANKVSISAVIITFNEAKNIARCLNSLAGIADDIVVVDSFSTDDTPQICRSFANVRFIQHAFEGHIEQKNYANTQALYPHILSLDADEALSEPLRQSILEAKNNWQYDGYYMNRLNNYCGAWIRHGTWYPDRKLRLWNSQKGNWGGTNPHDRFIMDKTAKTGRLTGNLLHYTVHSIQQHIGQINKFSSIRAAGMFTKGIKPNFYRLYCKPVIGFVWSYFFRLGFLDGYFGFVISLNSAYSVFLRYAKLKELWKNNNPA

SEQ ID NO: 876 - protein, 273 aa, Dethiosulfovibrio peptidovorans
MKISLYTVTKNEEARLPLMLEAAAPLADEIIVVDSGSTDRTRDVAERYGAKFIHHDWTSIGHQVAFAESCCSNEWVLRLDADEVMSKELLEEIMKIKKNGPDCDGYKLRSGEMFPGYSKPNRWVKHYQLVRLYSRKAMRMSGKFGFDDVVFIKKTPQTRLLYNFINHYSFLSIRRTVEKRNVATDDQVKRALLEHKNYSPWRMVGCMVGNFFRYFILERYFLYGFWGFIHSVNVGYMRFLKFSKFYEYHQIREHGYMGCEKKNELYESEVGKG

SEQ ID NO: 877 - protein, 245 aa, Ulvibacter litoralis
MPTLTVIIPTYNEADYIKDALQSVAFADQIIVVDSFSTDATVEIAKPLASNFISRKFDNFSAQKNAALEHATGDWVLFIDADERVTRSLEAEIKCTLENPKHSGYKINFPHFFMTRFLYFQSNDVLRLVQRKGAHFTGLVHEKLHCNGSVGKLKQKMIHYTYKGLHHYITKKEKYAWFQAQQRFEKNKKTTYFHLFFKPSYRFFDSFIKKGGFRNGVPGLVLAAVDSYGVFSRYVKLILLQKGMK

SEQ ID NO: 878 - protein, 250 aa, Unknown
  Description of Unknown: Candidatus Amesbacteria bacterium GW2011_GWA1_46_35 sequence
MLTGIVLTHNEEKNIARCLESLKFCDAVLVVDSGSTDKTMSLAKKAGATVVNHPLDGNYAAQRNWALSQAKTPWVLFVDADEMVSVKLGEEITSAVKKIEYKGFLIPRIDYMWGKKLSHGDVGGARFLRLARRGAGEWHGAVHETWAIEGNIGTLKHPIFHYPHPTLVEFLQEINRYSSIRAQELHRAGQRANLFQIILYPSAKFLWLWIWKLGFADGTTGFVHAMTMAFYSFLVRGKLWLFQKGVTSPS

SEQ ID NO: 879 - protein, 344 aa, Unknown
  Description of Unknown: Candidatus Latescibacteria bacterium sequence
MEGDSGMGHWKRRQRPGDGGPRSVQDGRGNGGGVQSGLWCPQIRSGCLYAGLPSERERGPSGAFQTRQMRRKLSVCVVTYNEERNIERCLRSVSWADEIVVVDSFSQDRTVEIALKYTDRVYRHPWGGYGAQKNLALGYVGYDWVLALDADEEVLEELGRSIREVLEGKDDCDGYEVARRSFYLGRWIGHGGWYPDYQLRLFRKGKGKWMEVELHERVVVEGEVGRLKGDLYHYPYQDLSEHIRKMDRYSTIASREMARRGIKVRGWDLLVRPLFRAFKSYVLKAGFLDGVPGLVIALSGAAYAWAKYSKLWELQNGLKGSTRGHGPDVAGRGSPGALVDRGTP

SEQ ID NO: 880 - protein, 214 aa, Unknown
  Description of Unknown: Oscillatoriales cyanobacterium sequence
MTATSAKVPVSVLIPAKNEEANLPACLESVARADEIFMVDSQSEDRSEEICQSYGVNVVQFYFNGSWPKKKNWALENLPFRNEWVLIVDCDERITDASWDEIAAVIRADKHDGWYINRRVFFLGKWIKHGGKYPDWNLRLFKHAIGRYENLKTEDVQNTGDNEVHEHVVLNSKRGAGYLKEDMMHEDFRSIYHWLARHNRYSNWEAKIYYNLLT

SEQ ID NO: 881 - protein, 251 aa, Ohtaekwangia koreensis
MMKLSAVIITYNEEANIGRCLKSLIPVVDEVVILDSFSKDRTLEIISQHGLNFIQREWTDYSDAKNYANSKATGEFILSIDADEELSPVLQQSILTWKNNPSADAYQINRLTNYCGKWIYHCGWYPEYKVRIFKRGTQWKGLVHEDLVFDNEPKVEKLKGDLYHYSYPTIDSHLKKVLQYSKLTAEKKFKAGKKYTLLWHGILKPWVVFFKKYILQLGVLDGYYGFVISAFTSFFHFLRYIHFRALRKANR

SEQ ID NO: 882 - protein, 258 aa, Thermosulfidibacter takaii
MQEVGMREKLTVIIPTFNEEDNLEEAIRSVLWADEIMVVDSFSTDATLDIAKKYAHRILQHEYINSATQKNWAIPQATHEWVMILDADERVTPKLRDEILKVLENPQYDGYYIGRRNYFLGYPLDHGGWSPKEDRNIRLFRKSVSRYEDKEVHADVIVSTGKVGELKNYLVHHSYKSLKQYFRKMERYTDWAAKDIVKAGKKPNLFNLILRPIGDFFKFYVLKQGFKDGMPGLIIALLSSYYVMVKYVKAWELYHSKA

SEQ ID NO: 883 - protein, 257 aa, Unknown
  Description of Unknown: Nitrospirae bacterium sequence
MAERTDQKVSAVVIAYNDEPNMHGCLESLTWADEVIVVDSFSTDATAEISRKYTDKVFQHAFHGFGRLRNEAVAHASYDWVFSLDTDERATPEVRDEIRQKLREGPDADAYFVPRHNYFLGRRIKHCGWYPDYRQPQFFHRQRMRYTEDVVHESFEVQGRTGYFRSHVEQRPFRDIDHYLQKMDRYSTLRAKAMQEHGVRFRYHQLVTHPVFTFFKMSVLRLGMLDGMPGLILSGLYAYYTFVKYAKLWELEQAEAW

SEQ ID NO: 884 - protein, 282 aa, Erythrobacter sp.
MGSIPISVVIPVRNEEANLGQCLQRLGCFDEVIVVDSGSTDATCQIAANHGATVIQFEWNGRYPKKRNWVLLNQRLQNEWVLFLDADELVTEMFCNEVGAALAEDRFDAFWLKYTNFFLGQPLKHGDPQRKLALFKIGRGLYERIDEEAWSGLDMEVHEHPVIEGDVGEITAPIDHRDDRGVAKFIQRHKDYALWEAQRTRQLRSSGREVWAQLTDRQKNKYRNIDKWWFAWAYFAWTYVVKRGFLDGLPGFSYAFYKLWYFWTIRLLLKESENREVPASAS

SEQ ID NO: 885 - protein, 292 aa, Unknown
  Description of Unknown: Verrucomicrobia bacterium sequence
MNGWSGARVPLSVLVPVKNEAANLHDCLVSVSFAKEIVVVDSESTDGTAAIAEAAGAKVVQFVWNGKFPRKKNWALENVPWQHEWVLIVDADERITPELQGEIRKAICRRGVDGFYLNRRFWFLDGWINHCGYFPSWNMRLFRHWLGQYEHVETGDNFLSGDNEVHEHVLLHGQAEYLSTPMEHYAYPDVATFFEKHRRYAAWEAAASKKLHERTRERILRATPFGTAIERKRWLKKIVMKAPFRPSLRFLYHYVWRQGFRDGYRGWMLCRLLAAYERMIVSKEREFKDCSE

SEQ ID NO: 886 - protein, 259 aa, Winogradskyella pacifica
MIKLSAVIITFNEDRYIEECLKSLINVADEIVVVDSFSTDKTKAICTKYNVVFIEQEFLGYIEQKNFALSQASYDHIVSLDGDESLSETLQKSIIDLKSNWIFDGYYANRFNNFCGQWIKHSDWYPNKKLRVFDKRKAQWKGINPHDRIVIQSLGKTGHLKGDILHLTYQSYSEFNLKMESFSSISANAYFELGKTAPFYKLIWNPSWAFFKAYVLRFGFLDGFNGFMICYQTGHLTFLKYAKLRELKKEKQHLFPKLK

SEQ ID NO: 887 - protein, 275 aa, Unknown
  Description of Unknown: Candidatus Levybacteria bacterium CG22_combo_CG10-13_8_21_14_ all_35_11 sequence
MLSIVLATYNEEKNIKKCLSSNLVKQVANEVVVVDGSSTDETRKIATSLGARVIKTTNKLNFHINKQMAMNEAKGDLVLQLDADEVADEQLEIFIISINNKIEKLKVENSQWAVEWKKTNPVAWEIPRKNLFLSTWLKKGGQYPDPVIRLYINGFAKLPQKDVHEQMKVDGRVDPANGHLLHYANPKFGDYLRKFNTYTSFKAQQLKDDKLEITPFNALNYIFYKPIKTFFMLFLRHRGYVDGIAGFVFALMSGMHHAVSYLKLWELNQKEVIND

SEQ ID NO: 888 - protein, 254 aa, Halobacteriovorax marinus
MIKLSAVIITFNEEHNIERCLKSLEGIVDEIVVVDSFSTDKTQEICQKHNVRWIQNKFIGHIEQKNFALKAAKYDHVLSLDADEALDKQLKIEILKVKENFKADGYYFNRLTNYVDKWVYHSGWYPDSKLRLFNKNKGTWSGTNPHDIIKMQDGSTIKKINGDLLHYSYDSISDHVNQTNKFTTIAAKAAFKEGKRSNNFKIVSRPILKFVKDYFLKRGFLDGRYGFIICCINSLSALLKYSKLKDLQDGRSID

SEQ ID NO: 889 - protein, 252 aa, Thermovibrio guaymasensis
MSLSVAILTYNSEGKIEEVIRSIEGIADEVVVLDSGSRDRTLDILKSYGVKVYYRKFDNFVNQKNYLLSLATKDWVLFLDDDEVLTPELASSIAEELKSPSYDGYYLNRLTNYLGRWIRHAWYPDWQLRLAKREKCSWVGSEVHESLKVKGRIGYLKGELLHYSYSSVSDHLQKIDRYSTLFAQGALKRGKRFSLLKLLTSPAGAFLRRYILKRGFLDGFEGFVISVMASYYTFLKYLKLWELERSESSNRP

SEQ ID NO: 890 - protein, 283 aa, Legionella adelaidensis
MLSVIIITKNEEGNIRRCLESVKWADEVIVLDSGSLDKTVAIAHEYTDKVYLTDWRGFGIQKQRALSFASGDWVLNLDADEAVDEKLKKEIQHAITSGAADAYRIPIRMYFYGKPLRYSSSPTRHVRLFRKKGARYSDDIVHEKIMLPGGSKVSQLKNPLIHHSFRDLTHALYKINLYSSYTAKIRIQRGEKTNVVKIGFSTGWMFFRCFILQRGFLDGFNGLIFAGLNTLGTLFRGLKQLYPDRQLKDLPEVKKIEGERDKKLSLPDANKPGGKKLNEDGAK

SEQ ID NO: 891 - protein, 313 aa, Calothrix sp.
MSAKIPVSVIIPARNEEANLPACLTSLQRADEIFVVDSNSTDKSVEISESFGAKVVQFEFNGRWPKKKNWSLDNLPFRNEWILIVDCDERITPELWDEIALAIENTEHDGYYLNRRVFFLGKWIRHGGKYPDWNLRLFKHKAGRYENLGTEDIRNTGDNEVHEHVVIPGKVGYLKSDMLHEDFRDMYHWLERHNRYSNWEARVYYNILNGKDDNGTIGASLFGDAVQRKRFLKKIWVRLPFRPFLRFILFYIIYRGFLDGKAGYTYGRLLSQYEYQIGVKLYELSSCGGQLNTTSKPTNTTQKFTTEASQTAT

SEQ ID NO: 892 - protein, 293 aa, Synechococcus sp.
MNNKEMTQLHLKVIILTFNSEDSIAQVLDSCLQISSDFLIVDSFSTDKTLDIAQAYNCQIVQHEFENYAQQRNWAQSYANLEDNQWVLHLDSDEIISEQLVISIQKEFSDKSQDFDGYLFRRLPHFLGQPIRYGHLHPNWHLRLFKAGKGKCENRLYDQHFIVNGSIKHLSGWLLDLQLTSLERWTATHNRWSSLEAREIFNRTKHQSNDSTLQAKLWGDSRMQKRWLKNKVWYRLPLLLRPFLFFVYSYFIKLGFLDGRIGLIHSVLQAFWFRFLVDVKILELNKKSRWTNL

SEQ ID NO: 893 - protein, 245 aa, Olleya marilimosa
MDAITVIIPTYNEEAYIAQAIQSVDFASQVIVVDSNSTDNTVQIAKQMGCEVYLRAFDNFSNQKNHALQFAKGEWILFVDADERIPYALQQEIFEAIKSNKHAGYKLNFPHYYMNRFLYHHSDNVTRLVKRNNCKFEGLVHEKLIIDGTIGQLKNPVLHFTYKGLLHYISKKDSYAWFQAEQMLKKGKKATYFHLAFKPFYRFFSSYILRRGFMDGIPGLTVASVNAYGVFSRYVKLMLLQKGIR

SEQ ID NO: 894 - protein, 270 aa, Larkinella sp.
MSTLPQSGSPPVSAVMITFNSARILPTVLNALTWCDEIVVVDSGSTDQTLPIAREFGCRILHRDFNGFGLQKGFAVEQARNAWVLVVDADEVVTQELRAEIQLRLAEVEAGTLPFRGFEVPISLLFLGRLMRYGGEYKMPHLRLFDKRFGAYNSARVHEDVVLNGSVGRLTHHMLHDSYGSLHEYFEKFNRYTTAGARDLQSRGRHGSAAQVVFRLPITFLKEYLLKRNFLNGYPGFVWSLFSAMYPVVKYAKLRELENSPQNRPVPEER

SEQ ID NO: 895 - protein, 252 aa, Sediminitomix flava
MTLPKITAIIPTKNEEHNIREVLESVSFADEIMVVDSFSTDRTVEIAKEYTDFILQREYENSASQKNWAIPQATHEWIVLVDADERVTKELELEIKEILKGDKLKAGYWIYRRNHFLGKEVKYSGWQNDRVIRLFQKSKCRYEDKHVHAEIIADGEVGKLKNRLIHNTYVSFDHYLAKLNRYAAWQAEDYSDTQKITFYHLGIKPAVRFFKHFILQRGYKDGMIGFIIAYCQSYAVASRYIRLWISRNTNKK

SEQ ID NO: 896 - protein, 266 aa, Robiginitalea biformata
MNKAEGNTRLTALIITYNEIGYIERCLESIAFADEIVVVDSFSTDGTYEYLLEQPNVRVIQHPFENFTLQKSFALTQASNDWVLFLDADEVVPGALRREIQDTIAGNTDHAAFWFYRQFMFAGKPLRFSGWQTDKNYRLFRRSKARFTDRKIVHETLEVDGSSGILQERLIHYCYKNYEDYRSKMLHYGRLKAREDFFREKGFNYFFMMLKPLWKFFNHYILRLGILDGRKGMVICYLNALGVLERYRELKKLEQKNELAYYLLMP

SEQ ID NO: 897 - protein, 261 aa, Niastella sp.
MTPFSVVIITFNEEKNIGRCLESVKDVADEIIVVDSLSTDGTKSICASYGVTFIEQPFLGYVEQKNFALDRASHDYVLSLDADECLTDTLKKSILAEKQKGFAFDCYRMNRLSSFCGQWIKHGTWYPDRKIRLINRQKGKWGGVNPHDKIVMNEGSCLKQLKGDMLHYTYESIDQIMEQTNKFTTIQSKAMYERGKRSNVIKIVLNPLVSFISGYIIKRGFLDGYNGFIIARYASHATLAKYAKLLQLQRKMKQQAGATHR

SEQ ID NO: 898 - protein, 302 aa, Unknown
  Description of Unknown: Acidobacteria bacterium sequence
MNAPRPRLTVIVPTFNEEATIRDCLQSVRFADEILVVDSYSTDATLSIARAAGARVLQHEYVYSARQKNWAIPQASHEWVLLVDSDERVTPGLRDEILDLLASTPRHDGYWILRANHFLGRRIRHCGWGTDRVIRLFRRDLARYQDREVHAEIELPGPLPVLTHPLEHHSFRSFGQYWRKLQLYSEWGAAQLYKEGRRAGALEIFGRPVTRFFKMYIVRRGCLDGLHGLVLSMLGAFTVYLKYARLWEMRVLEGAARVPTQVEAGGALAREQIGRMVDEDRRPRPASAAARAGRHDESAQPR

SEQ ID NO: 899 - protein, 254 aa, Unknown
  Description of Unknown: Candidatus Marinimicrobia bacterium MT.SAG.3 sequence
MKISTLIICFNAERTIRKTLKSIGWSDEIIVIDSFSTDKTPEICKEFDLKFIQKEWQGFGKQRRWAVEQANNDWIFFIDTDEEVSIELKNEIVNIKKEGAESDVYAFPRKVYYMNRWITHSGWYPDHKARLFNKHKASWDESNIHEILVYEGEAIKLKGDLYHYTYRDIEDQLDRVNRYSTIAAEELISKGIKPSLIRSILGSIWRFNKLYFLKLGFLDGLAGLTIASMESYYVMVKYFKHAYKYNSDKTDSER

SEQ ID NO: 900 - protein, 306 aa, Unknown
  Description of Unknown: Candidatus Pacebacteria bacterium CG11_big_fil_rev_8_21_14_0_20 _34_55 sequence
MKLSVVIFTKNAETFLEAALKSVKFADEIVVVDMMSTDSTVKIAKKYTSSIYAHEDVGYVEPARNFGISKAQGDWILILDADEEVPQELARVIKGILKSDEKGQSTADCYYIPRKNMIFSKWIEKTGWWPNYILRLFKKGHIEWSDEIHSIPITSGEVREFPAIKEIAIIHHNYQHVDQYITRMNRYSNIQAEEISNSKDLELDSKFIFRKFSSELLSRLFSQRGINDGSHGLSLSLLQAISEASVAMKVWDQRGFPETDKFQEEELIGEIIQFKKELAYWIADWQVENNTGFTKFIWQVRRKLYI

SEQ ID NO: 901 - protein, 250 aa, Unknown
  Description of Unknown: Sphingobacterium deserti sequence
MEQKLSALIITYNEEKNITGVLSSLDFADEIIVLDSFSTDSTVTLAKAFPRVSVYQNKFEDFTSQRNLAISYANFDWVLFLDADERLTKEAKKEILDTINSLESKAAYFMYRTFYFCNEKIRFSGTQNDKNYRLFRKSKAKYDDKKKVHETLIVNGDTGILKNKILHYSFASYGLYRKKMVHYGVLKGQELSAKGKRYNLLTHIAKTAFKFFKAYFLKLGVLDGKRGIQLCYLQSLSVHETYKSLKKEGG

SEQ ID NO: 902 - protein, 252 aa, Unknown
  Description of Unknown: Comamonadaceae bacterium CG2_30_59_20 sequence
MQLSVIIITRNEEANIAECIQSVQFADEVIVLDNASTDNTVQVARSLGANVHISADWPGFGPQKNRALALAKGDWVLSVDADERVTPTLREEILQALALGKTAQAYEIPRRSSYCGQFIAHSGWSPDYVLRLFRRGSAKFSDDLVHEKVVFAGRPEKLVQPLLHLSFPDFESVLDKLNRYSSAGAQSMARSGKTASLASAVGHGLWAFFRTYVIRRGFLDGQIGLALAISNAQGTYYRYAKRWLMLRSDVKR

SEQ ID NO: 903 - protein, 260 aa, Unknown
  Description of Unknown: Candidatus Omnitrophica bacterium CG12_big_fil_rev_8_21_14_0_65 _45_16 sequence
MTTKTPITIAVMAKNEAHRLGACLETVRWADEVVVLDDMSTDQTVEIAKSYGAKCLKRQMDVEGRHRNFLYAQAKHEWVLSLDADEHVTPALADEISAVVKKNDPNFAGYSVPMKIYIGERWIRGAGYYPSARLKLFRRDKFKYEEARVHPRVFLDGKCGHLKGELMHYSFRDLNHFITKFNRETDLEADKWVKDGRRMSLGLALFKATDRFFRAYFTKKGYRDGYLGFLLSCFSSWYQLVTYAKYSEFKQSHTDARKKE

SEQ ID NO: 904 - protein, 269 aa, Unknown
  Description of Unknown: Candidatus Collierbacteria bacterium GW2011_GWF2_42_51 sequence
MKKISVIILAKNVANEIIPALKTSQFASEIIVVDTGSTDNTIEICRKLGAKIVHTTGDSFAKWRNDGAKEAKGEWLLYLDSDERIPVKLAREILSTLEAPQHQAYTISRYEIFLGKHLQHWGDPRVLRLMKKTALKRWEGKLHEQPKIEGKIGNLHHQMVHLSHKNIDEKVPNTLNWSKFEAKMLLDAGHPQMKGWRFIRIMFTEFWYRAVKQGLWKDGTEGWIEIIYQMFSKFMTYERLWEAQRKPSLSETYKKVDDDLLQEWQQENK

SEQ ID NO: 905 - protein, 492 aa, Centipeda periodontii
MKISACVIAKNEAENLPRWLASMRVFADEMIVVDTGSADATVEIARTGGARVYHFDWINDFAAAKNFALDQAQGDWVVFTDADEYFTEESASRVRPLIEEYDKKETMDGFIVHLVNIDMDTGALLGTTAQVQRIFRRAPHIRFVGSIHEHVENLSGDPGREMMMAPGLTLYHTGYSPRIIKEKSKRDLDLLLARRARGVYKKLDEYHLMDCYYTLEDYPKAVHYARLARDSKDRPVGSENRPHAVLLQGLILMGAPDAEIEDAYQVARQAFPEQADFPLIYGIYAWEAGYFARAREAYTEGVRLHEEYYRAGDFSGILAPRAYACLGAAAVLSGNVEGAVALYERAIELRPHDASALVGFVRLLGAVGADDATLIETLNRLYDETADAAFLSSILAGTDFPLASLYYDRRADIHFSERRRFLLAGDVSSAAASLIEDMERAAVVAAARGARFAPTQQGALAFLLPHVCRGESAAPEAQRVIRRIGRLARGTE

SEQ ID NO: 906 - protein, 271 aa, Thiothrix lacustris
MTNTHPQRPTLAVALIVKNEADNLAACLASVADWVDEIVVLDSGSTDATVSIAESLNARVFINADWPGFGKQRQLAQSHVQADWVLWLDADERVTPELRDEILAILQNTDTDTDTDTDTDTVFAMPRLSWAFGRFIRHSGWYPDYVLRLYPTQLTQYDDSLVHEKVLLPPNSKVHTLKTNLLHYTYRDMPQYLAKMSQYSNLWAEQKAHEGKSSSIGQAITHGIGCFLRMYIIRRGLLDGVQGFLIAVTNAYFTFAKYADLWVKRNNNAHP

SEQ ID NO: 907 - protein, 259 aa, Flexistipes sinusarabici
MSEEITGIVLTYNGEKYLDPCLNSLRACVEELVIVDSGSGDRTLEIAEKYSENVIHHNFENYGKQCIYAIGQASNRWIFILDQDEILENKLISEINALKKSGFAHDAYSIRRRNFLFNKEIKHGGWGNDFVIRLFDRNKAFPTDNNFSVVKTEGNVKRLKNRIIHYPCDSIDKYFAKMHSYASISAKEMLGKNREFRLYNLLFNPLYRAFKKYVLQKGFLDGMYGVILAVISYYFVFLKYLKLWEITNINHENKNNGDI

SEQ ID NO: 908 - protein, 257 aa, Unknown
  Description of Unknown: Candidatus Erwinia haradaeae sequence
MQQIQKISVVIITHNSEEVLVKCLESVNWADEIILLDFKSSDQTLDIAVRYGVTVYHSNVWYGYGKQRQIAQNYATYGMILMIDSDERVTPELQKSINLILKKPPEKIVYSIARCNLFLGRAMRHGGWYPDRVIRLYPSFCVYNDNLVHESLNVPEIPIQPIYGDLLHITSRDFCDFQFKQCAYAKAWAKQCYQQDKHYGIIKIIYHSLWSFIRTLIVRRSFLDGTRGWLLAIVVFQYTFNKYAALWALNCTSRDKN

SEQ ID NO: 909 - protein, 258 aa, Unknown
  Description of Unknown: Chryseobacterium wanjuense sequence
MPLSLAVITYNEEENIVRLLDSLKNTVDEIVIVDSFSTDKTKEICTQKYPQVKFFERKFNGYGEQKNHALDLCSHEWILFLDADEVPDEDLKNSIKKITSSDHPEFSVYKTKFNNHLGIHLIKFGGWGNVYRERLFRKDCARYSNDKVHEYLITNKKSGILGGTLNHYTYKSIQHHITKINKYSDLMAEKMFERGKKIKRFKIIVSPIYEFIKVFIFKLGFMDGFPGYYIAKTMSYYTFLKYIKLYEKIRLREIENTQ

SEQ ID NO: 910 - protein, 292 aa, Mucilaginibacter mallensis
MISVIILTKNEEADLPVCLESLEWTDDVHVLDSLSTDKTCEIALQYGANVLVNPFQSFGKQRNFALKNIDVKYDWVLFLDADEVASPEFVNEIQSATDNADDDVAGFYCCWKMMLEGRWLKRCDNFPKWQLRLLRKNRVTYTDFGHGQKEDKVLGNVLYIKEPYIHFGFSKGWSHWIERHNRYSTLEAIARLDKCPPLKNIFSKHGSIRNPALKSWLIKVPGWPLLRFIHTYIFKLGFIEGSPGLTYSINLSFYEHMIVIKRREILSGRKSNYNNVNQEVMINDNVQVGVNS

SEQ ID NO: 911 - protein, 253 aa, Flaviramulus basaltis
MIKLSGVIITYNEERNIEKCLQSLVPVVDEIVVVDSFSTDNTKAICQKYQVKFIEQSFLGYIEQKNFALNQASNDFIVSLDGDEALSETLQKSIIKLKDNWNFNGYYSNRFNNFCGQWIKYSDWYPNKKLRVFDRRKAMWKGVNPHDNVVLNNTRKNTGYLKGDILHWTYQTYSEFNLKTEHFSNISAKAYLKLGKKAPIWKIVFNPIWAFIKSYFFRLGFLDGLNGLVICVQTANITFLKYTKLRELIKNKN

SEQ ID NO: 912 - protein, 261 aa, Unknown
  Description of Unknown: Gammaproteobacteria bacterium CG_4_10_14_0_8_um_filter_38_16 sequence
MRRYYAQTEQKMKPSISIILITKNSEKTVEKCLESIQWANEIIVLDSGSTDQTLSICLKYTDHVFQTDWPGFGIQKNRALAKATSNWVFSIDSDEWITDALREEMIKTIKNPTALVFQLPRLNQYCGQWIRHGDVGKDKVTRLFKRGFAHFSDDRVHEKIMTSEKIGKLTFPLCHNTYDSIDALLQRMNLYSSLSAKMRFDRGKKTNLLKAIISACWSFTRAYFFRAGFLDGKMGFIVCAAAAQSSYYRHVKLMELMKQRC

SEQ ID NO: 913 - protein, 249 aa, Alkaliflexus imshenetskii
MKISVVINTYNAEQHLDKVLESVKSFDEVVICDMHSTDRTIEIAQKYGCRIVYHAKEKYVEPARNFAIQQAQYDWILVVDADEVIPAALKEYLYNQLDKKDCPAGIFIPRKNYFMGRFMRIAYPDYNLRFVKKDATFWPPYIHSHPIIEGKIIKIPAKYVGLAMEHLANDRIEQILTKNNVYSSAEVVRRANQKVSIGHIIVSPFFRFIKLYFFKGGFRDGMPGFLFSIYKAQYKFDTLAKMAESQYRN

SEQ ID NO: 914 - protein, 256 aa, Legionella israelensis
MLSVIVIAKNEQENIRNCLSSVHFADEIIVLDSGSTDNTVQIAREYTDKVFETDWQGYGVQKQRALSHATGDWVLNLDADEYVDDKLKKEIQKAIGADEADGYRIPIRMNFYGKPLRFSSSPKRHIRLFKRKNACYSEDIVHEKIVLPATARIRQIHAPIMHHSFHDVSHALYKINRYSSYSAKIRIAKNQNPSLIKTLLSTLWMFCRCYFLQRGILDGKPGFLFAVLNAQGTFYRGIKQIYKDSDLDNLPPIERV

SEQ ID NO: 915 - protein, 289 aa, Pedobacter xixiisoli
MNPVFSFIILTFNEEQHLPRLLNSITKLNAPVFILDSGSTDQTLKIASDFGAVLQQNAFENHPKQWDFALKNFEIKTPWIIGLDADQVVTPELFNQLANFREEDYQDINGIYFNRKNIFKGKWIKYGGYYPKYQLKMFRNGIGYSDLSENMDHRLLVSGKTIIWKKGHILEENLKENDISFWITKHNRYSDLVADEEIERMRNLRGQTVRPKLFGDPYQRTAYFKNLWWKLPLFIRPFIYFGIRMTFQLGFLDGRTGILFHFLQGFWFRLIVDMKISEKLDKNKNEQIK

SEQ ID NO: 916 - protein, 286 aa, Unknown
  Description of Unknown: Silvanigrellales bacterium RF1110005 sequence
MEVKEIYEQYQKSQNYDISTFVPEPEKLTAIVITKNEEKNIARCLSSLDFVDEIIIVDSGSTDKTIEIAKKFSKVCVIQTKWYGFVENKRIAVEKAEHDWILWVDADEVVPVDLAKEWDERVAEGTFHETAGIDVARKTFFLNHWVKHSGWYPGRVTRFFHKKRAYFNDNILHEGVVAKQGYIVESFKTDLLHYSYTSIYQYFDKMNKYGFAGANEIKRKRKIVFLPQLFLQPMWTFFRFYFLKKGFLDGRIGLIVCIGASFSNFIKYANYFFLKKYNYVEINEKE

SEQ ID NO: 917 - protein, 449 aa, Unknown
  Description of Unknown: Lachnospiraceae bacterium MD308 sequence
MGKKAGQIKISQCMIVKNEEQNIRRALSWGKGVVHEQIVVDTGSTDNTVKIAESMGAKVYHFEWCDDFSAAKNYAIEQAGGNWIAFLDADEYFSEQDAKKIPGILKKIENVSVKSGRIHMLRTAMYHLNDEGETFSAGQHDRIFRNMRGLRYKNRIHEVLSFSSGQTLRYALTDLTIMHTGYSDSVRDKKGNRNIPLLKKSVEEDPENYDLWSYLGESYAVGNQIEEAIDSMEHVIERITEGASIRICDDRLFAAFAVWFSAVSFLPEDALGCYEEKARRYYDIFLKQDKLFPDVEFYMGRFMLRTGKQTEGVDFFELALAKLEEYKGSSSLKLPSRLDMVYNVLMYHYEQHGDASKCVYYGTLSLRVDRYQEAPLEVLVRLLKADPNTAATQAYDFLARLYLFVNLKDKLFVLKTAMKLGYSELVEKIRLEMTEQEKGWLDGQEEFGK

SEQ ID NO: 918 - protein, 256 aa, Chlorobium sp.
MANYISVTVLTKNSEAYLCECLEALKPFSEVVILDNGSTDKTLDIAGSFENVRVYEHPFTGFGPMKNLAVDKASNDWILSIDSDEIVSSELARDILSRDLEGNCLYTVVRDNYYHGRLIRGCGWQNDHLYRLFNRKNNRFNNKLVHEGIEIKEGMKTALLKGRLKHYSYDNASQLLQKMQYYSTLWAEENQNKKKASPFKALMYGMITFFKSYVLQNGWLNGYEGLLISITEANGVFYKYIKLYEAVRFSSHKSRT

SEQ ID NO: 919 - protein, 304 aa, Unknown
  Description of Unknown: Candidatus Roizmanbacteria bacterium CG_4_9_14_0_2_um_filter_ 36_12 sequence
MLSAVVLTKNEEKTIERCLKSLMFCDEIIVVDDGSTDGTVEHVYKVNKCRDRSRPVRTKVFQRKLARDFAGQRNFGMSKTSNEWVLFVDADEEVTRELQREIEVTLRQAQGDNSRVMVSLTNHDKDAYYVRRRDFFWGKELKYGEVRQIRLIGLIRLIRKDSGKWLGNVHEEFKVKSQKSKVKSLNSFLNHYPHQTLKEFIKDINDYSSIRAEELYNQGKNVNVIEIMFVPAIKFIYNYLINLGFLDGAPGFAYAFLMSFHSFLVRAKLYMLKSSMPFFSPSSPRHKPTAGPQEIGEKKVSSLL

SEQ ID NO: 920 - protein, 249 aa, Bordetella genomosp.
MKLSVIIITKNEAKHIVGCLESVAFADEFIVVDSGSTDNTVELARDFGAHVEVTSDWPGFGPQKNRALDLATGDWVLSIDADERVTPELAREIQAVLAVPKADAYEIPRLSEFCGRFIRHSGWWPDYVLRLFKRGTGRFTDAAVHERVVPQGPVLQLKGHFEHYPYPNLDALINKINRYSSDAAAMMYARGKRATVFSAMGHGFWTFVRIYLIRRGFLDGRHGLVLAVTAAAGSFFRYAKLSFLSDQRK

SEQ ID NO: 921 - protein, 249 aa, Unknown
  Description of Unknown: Chlamydiae bacterium CG10_big_fil_rev_8_21_14_0_10_42_34 sequence
MPIFNKITVCILTKNAESTIEETLDSTHLFSEVLILDNGSTDATLAIASKYPNVVIHKAPFIGFGPLRNRLAELATNDWILALDSDEIVSPPLSQELDQLTLDPHFTYNFPRHNFYDGKQVRGCGWDKEYVARLYNRNATRFSDALVHESLITLKPLTLQYPLLHTPYRSTTEFLAKMQHYSTLFAEQHRGKKSSSFSKALLHGIYAFIRSYFFKKGIFCGKRGFIISLYNANTTFYKYLKLYEVNRNG

SEQ ID NO: 922 - protein, 361 aa, Clostridium tunisiense
MISISLCMITKNEEKCIDNCLKSVCDIVDELIIVDTGSTDSTIEIVKKYSDKVYNFQWINDFSAARNYSFSLATKEYILWLDSDDILSEEDRLKLLELKDSLDKSVDFVGMMYDYSFDDTGKCTYSFRRNRLVKNFKGFYWDCFMHERLNVWGNWKDYNIHITHTRKHDNNERNIENFRKKMLENYYLNPRETYYYGGELYAGGYYDDAIRVLEDFLTRDYDDNYDKVNALTRLADCYSVKGEYNKAIDSCIKSFKYEIPRAEICYKLASYFQHLKRYNEAIFWFKTTLSLKSSTDGNLMVVDDGWIDYLPHQQLCCCYYEIGDIESSNKHNELAARFIPNNPYVIQNRKLFNSLGYNLKS

SEQ ID NO: 923 - protein, 279 aa, Verrucobacter flavum
MSLPVSICIPVRNEEKNLPDCLASLGEFDEVVVVDSGSSDRTVEIARAAGATVLRFEWDGGFPKKRNWALRNHVFKHPWVLFLDADERMNTAMVNELGKTLPNTTHSGFWISFTNWFMGRPLHHGDVFHKLSLFRVGHGEYERFPEEFWSRLDMEIHEHPVLQGSVGELRTRLEHYDYRGLENYFARHNEYSTWEANRYQWFKRQASAEDWAKLNTRQRFKYRHLDKWWLGTFYFLMAYLAKKGFLDGYRGWIFNRLKQRYFADIRLKILEMESGKSSN

SEQ ID NO: 924 - protein, 267 aa, Flagellimonas eckloniae
MSELHTPRQKISALIITYNEMGYIEKCIDSVSFADEIIVVDSFSTDGTYEYLQKRDKVNVIQNPFENFTAQKSFALRQASNDWILFLDADEVVNTKLQEEIVETVNNPKACEAYWFYRKFMFQNTKLNFSGWQTDKNHRLFRKSKARFTDKKIVHETLEVDGNSCILKEKLTHFCYKNYEDYKGKMLHYGRLKAKEAFYKEKHFNYLFMIVKPFWKFFNHYILRLGFLDGKKGIIICYLNALGVLERYRELKRLEKKNQLTYYLVMP

SEQ ID NO: 925 - protein, 256 aa, Unknown
  Description of Unknown: Flavobacterium sp. ABG sequence
MILPEKQLLSALLITYNEESNIKEALLNLSFADEIIVVDSFSTDQTVAIASSFKNVKVFQHTFDNFALQRNYALSLASNQWILFIDADERITPKLQQEIKAIINEADSCPAYFMYRNFIFENKKLRFSGWQTDKIIRLFKKENAIYNIEKIVHEKLIVNGKTGKLKHKLIHHSYSNYEDYKQKMIFYGKLKAQEELLKKTNPNFFHFYIRPLYQFLNQYLLRFGFLDGKKGIIICYLNAMSVAIRFQELKKIRMTS

SEQ ID NO: 926 - protein, 261 aa, Unknown
  Description of Unknown: endosymbiont of Galathealinum brachiosum sequence
MHTLSAIIISMNEEDRITPCMESLKNYVDEIIVFDSGSTDKTVDIVKRYTDKVWVTETWPGDGFQKQLALDQASCDWVLMIDADEYLDIEMKSAITDILSQDMITETAFKLPWGNIILGKQLRYGRSARAPVRLFKRIGSHITQVVVHGQVVTEGKISTIKKGFLMHNSLRNFEHLLEKNRSYSWETTLKYFSQKKRSFGIEIAVLRALWTFIHIFILRLGFLDGHRGLLMAVMFAQASFNKYAGLWYLENEEKNKTNPDL

SEQ ID NO: 927 - protein, 247 aa, Unknown
  Description of Unknown: Candidatus Shapirobacteria bacterium CG09_land_8_20_14_0_10_39 _12 sequence
MISAIILTKNEEKNIRECLLSVSFCDEVLVIDDNSTDKTAEIADKFGAKVIKHSLDNDFGQQRNFGLEKAKGNWVLFVDADERVGSESQDEIKEKTKTNTVNGFCLKRIDFFMGRWLKHGEISSIKLLRLGRKNCGRWERTVDEIWKIKGTVGTLNKPLLHYSHPDLTQFLENINQRSTLNADYLFNEGKKNTLLEWLKPLAKFIRSYFFNLGFLDKTAGFVFAVLMSMHSFNVRVKLYLLIKRHEK

SEQ ID NO: 928 - protein, 235 aa, Campylobacter mucosalis
MKLSIIILTFNSEKLLSEVLTSTMFADEVIIVDSGSNDDTLAICAKFENVRVLKQSWLGFGAQKQYGVDNAKFEWIFVLDSDEVITNELKTELLDELKSPKFKAYKVARLNYFFGKSIKSMGLYPDFSVRFFNKNYAKFDGREIHEKVVLNDKNGDFGTLKNHFIHYAYDSVEQFINKQNRYSSLGAKKNVLKAIFNPFWTFFKLFILKGGFKDGWRGYVIARLYAQYTFWKYIK

SEQ ID NO: 929 - protein, 285 aa, Unknown
  Description of Unknown: Chloroflexi bacterium sequence
MGLVPLSVIILTYNEELNLPSALNSVVGWAEQVFVVDSFSTDNTLKIAEDYGVPVYQNPWTDWATQRNWALDNLPIRNEWVLFLDADERISSELAEEIKETLKNVPHQVSGFYINRRFIFMGCWLKYGGYSSNWVLRLVKKDKTRVLPAGDSEYFQVDGKVLRLKNYMIHEDKKDLHFFTHKHNKISDMAARKLFNKERVNFDSNNKRKGLEGKYRVWIKENILANLPLFVRPFVIFSYKYFLKLGFLDGKEGLVYCFLHDFWYPFLVDAKILELKKMKNGSEEI

SEQ ID NO: 930 - protein, 247 aa, Unknown
  Description of Unknown: Pelagibacteraceae bacterium TMED195 sequence
MTISALIVARNEEKRIEECLSSLTFVDEIVVILDRSTDQTFKICKKFSNKIFSGKWTCEGKRRNFGIEKCSSEWIFEVDADEIITKSLALEVKKKIKLNKYDYFYIPLMNHIYSTPVKYGWMACLAPDGKFCLFKKKNKLWHEGLVHPSYSLKGVKGPLLENHINHFMSKDISELLLRFNRNSSLHAIELKNKNLKKYFSFRKVFSRFLKSYFLRKGYKEGQLGLLICIFNALYPMVSAIKSKQDLT

SEQ ID NO: 931 - protein, 302 aa, Unknown
  Description of Unknown: Microgenomates group bacterium GW2011_GWA2_37_6 sequence
MKHKLSVVISAYNEESRIKDCLDSVTWVDEIIVVDNSSTDKTPDIARKYTSKVYLQPNDPFKIDLQKNTGFEKATGDYILNIDADEKVSRELKEEIQRLMVKANLKEGYFIPRYNFMFGKKIEHSGWYPDHQLRLFKRGKGKYEDSVHKGIELDGEAEYLKEHLIHNNYENIVQFINKNMIIYAQIKAGDLLKKNYSLRPGDLIRVPSKEFLSRFFAREGYKDGLHGLFLSLFMAASELAVLGYVWEKGGFKEGSREEILKDTESELKEFNKNLNFWFLSIKIKESKNPLRKLSLKLRNKLK

SEQ ID NO: 932 - protein, 273 aa, Flagellimonas pacifica
MAGLSAPKQKISALIITYNEMGYIEKCIDSITFADEIIVVDSLSTDGTFEYLQSHPNVKVIQKPFENFTAQKNFALKQAENDWVLFVDADEIVGHKLQNEIVQTVNDPNALEAYWFYRKFMFQNRPLHFSGWQTDKNHRLFRKSKVKYTNTKLVHETLEVDGSSGVFKEKLIHYCYKNYQEYKSKMLHYGYLKAKEKFDNGVSFNYLNLLIKPTWKFFYNFIVRLGFLDFQKGITICYLDALSVLERYRKLKQMHRSAVIKINLFMPASPEAR

SEQ ID NO: 933 - protein, 252 aa, Unknown
  Description of Unknown: Flavobacteriales bacterium CG_4_9_14_3_um_filter_32_8 sequence
MQIQLSVVIITFNEEKNISRCIDSVIAVADDVVVVDSFSTDKTKQICLEKKVRFVEHHFNGHIEQKNWAITQAKNQCVLSLDADEALTKELAIEIIKIKKNWQYDGYSFNRLTNFCGSWIKHCGWYPDKKLRLWDSTKGKWGGVNPHDKVIMNQGTKIKHINFDLLHYSFYTIEQHLKQIDYFTDISAKAAFEKGKKSNAFIIFYKSKFKFIRDYFLKLGFLDGYYGYIVCKNSAFATAQKYRKLLILINSK

SEQ ID NO: 934 - protein, 270 aa, Rudanella lutea
MQQSYLSVVLITLNAERTLPRTLASVANWADEIVLVDSGSTDATLDIAHSYGCRVLHRSFDGFGTQKQFAVDQATHDWVLLLDADETPDEALKGSIMDVLRQRPDPQQGFCLPRSLVFMGQLLRHGGEQNRPVLRLFNRQHAHISPALVHESVVTTGPVTVLQGTLWHDSYGSLHEYITKMNQYTSLNARQMGGRQRKQGALEVSVRFGFKFVKVYLLKGSFRDGLPGFVWAFFSAVYPVLKYTKLYEATQKKTKKEWMSGSKRLSVSGF

SEQ ID NO: 935 - protein, 245 aa, Aequorivita antarctica
MPKLTVIIPTFNEQAFLEDALFSVSFADEIIVVDSFSTDKTPEIAKKYATKFLQRKFDNFSNQKNFALKEATGDWILFVDADERVTHSLEAEIKETLQNPKHSGYKINFPHFYMNRFLYHHSDDVLRLVKREGAKFSGSVHEKLQCEGRIGKLKNKMLHFTYKGFDNYISKKESYAWFQAQQQFDKGKKTTWFHLLFKPTYRFFRSFILKGGFRDGVPGMTVAAVNAYGVFERYVKLMLLQRGMK

SEQ ID NO: 936 - protein, 254 aa, Unknown
  Description of Unknown: Candidatus Omnitrophica bacterium sequence
MPLLSVIVITRNEEKNIKEFLDMLSWVEEIVLVDDESTDRTVQIASTYPNVKIFKRRMKNGFGPQKQYALEQATGEWVLVLDCDERITEKCKEEILKKISFHQYDGFYFLRKNMIFGKFISDYKPRALRLFRRRKGKFTDAGVHENVIVKGKIGVINEPIIHYSRSTENIENYIDTLNLYTLFSAQEMFAKGRKVSSFGFFLYFILYPIYIFLRVFLFKKFYAKGIVGIVLATLRMFEGVIGYFKLWELSRKDI

SEQ ID NO: 937 - protein, 256 aa, Unknown
  Description of Unknown: Acidobacteria bacterium sequence
MSGKLTALVPTFNEEEVIRDCLESVRWADEVFVVDSFSHDQTVTIAREIGARVVQHEYVNSAAQKNWAIPQACHPWVLLVDADERVTPELRDEIRGLLAQGPSYDGYWIRRSNHFMKRRMEHGGWETDKVIRLFRRDCARYEDREVHAEINLPGRLPVLEHPLLHFSFRSFSQYWKKMQLYSDWSASQMWKEGKRAGWISIGLRPVQRFLKMYLVRRGFLDGLHGLVLSMLGAFTVFLKYAKLWELGLRHGRESEL

SEQ ID NO: 938 - protein, 265 aa, Metakosakonia massiliensis
MFKLSVCLLTCNSARLLREVLPPLLAVADDFVVLDSGSTDATLDICQEYGLTVHHHPYAMHGAQMNHAISLAAHDWVLCMDSDEILDEQTLNFILALKAGEEPAADQAWRLPRYWFVLGQEVRTIYPVSSPDFPVRLFNRRCARFNDRPVDDKVEGFSRSVKIPGRVRHDTFYSLHEVFNKLNGYTTRLVKYQKVRPSIGRGITSAIGAFFKWYLFSGAWRYGKVGVVTGLYATFYSFLKYFKAWYAHSDTKEVATEEKKKTRTI

SEQ ID NO: 939 - protein, 267 aa, Unknown
  Description of Unknown: Candidatus Daviesbacteria bacterium GW2011_GWC2_40_12 sequence
MLTVIVITKNEESRIKACLESVKFADEIIVCDNGSEDNTIRIAEKYTDKIFQTRLQDFAEIRNFATEKASGEWMLFVDADERVTEALRSEIETMISFSDFSAYALSRKNIVFGQEVKYGPFWPDWVIRVLKRTDFQMWVGKVHEMPHFSGKLGYSKNSLLHLTHRGVDQFMKKVLDWSAIEARLRLDANHPKMTKWRFVRIFITELLNQGFKRRGFFGGTVGIIDSFLQTFHLYITYVRLWEMQQPKSLTQTYDDLDQQLIDDNFKY

SEQ ID NO: 940 - protein, 252 aa, Unknown
  Description of Unknown: Candidatus Rokubacteria bacterium 13_1_40CM_2_68_13 sequence
MTTRPRLSAVVITLNEEARLRSCLESVAWADEIVVVDAESQDKTVQIAREFTEHVLVRPWPGFAAQKNFALEQATGDWLLSLDADEEASPELRDEIARILVQAGAADGYAVARRNVFLGQWIRHGGLYPDWQVRLFRRGRGRFVDRDVHESVEVDGRVARLSGHLVHRSYEGVSDFFDRANRYSALAAQELVRGGGRARARELVLRPLGRFLSMYLAQRGFLDGRKGLLLAALYAYYVFMRTARVWEATRAR

SEQ ID NO: 941 - protein, 257 aa, Marivirga sericea
MKIKLSAVVITFNEEKNIRRCLSSLTKVADEIIVVDSFSSDRTEEICSEFHCEFKKNPFEGHIQQKNFAVQQASNEYVLSLDADEELSEELIDSILSVKTNWEYDAYFFNRLSSYCGKFFRHGSWYPDQKVRLFDRRLAEWGGTNPHDKIILSSSSKKHLKGDLLHYTYHTIEEHLKQVNYFSTVAAKAAYDQGKRFTLFKLIFKPFWRFFRDYFLKHGFLGGYRGLTICLLTAVETYLKIIKLWEIERAKKTNSQH

SEQ ID NO: 942 - protein, 261 aa, Prevotella histicola
MEKKEISVVINTYNAEKFLQRVLDSVKDFDEIVVCDMESNDHTVEIAKRAGCKVVTFPKGNHTCAEPARTFAIQSASSPWVLVVDADELVTPELRTYLYQHINKPDCARGLYIPRQNRFMNILKKGFSKDYQLRFFIREGTVWPPYVHTFPQVQGTLEHIDNHLHNVQLIHLAENYLADMLEKCNRYTTDEVLKKKGKNYGVGALLFRPFWRFFKSYVMNGEIRNGITGFIDSVMTGFYQFILVAKVIEAKIKKQTEEEQE

SEQ ID NO: 943 - protein, 264 aa, Thalassospira sp.
MVQTEAVKTGISTPAVKLSAVIVAHNEEDRLASCLTHVAFVDEIIVVCDKCNDQTEQIAIDAGAKTFAGSWHIEGERRNFALAQASGDWILEVDADEHVSAELADEIRQVIATTNYDYHQLLVDNYIGDRLVRYGWGASFGKPGYAGLFRRGAKHWGPQRVHPAVKFQGRKGFELKYRVRHYVDRNISDMIRRLDSYSTARAADLRESGNIGSFSNNLRRMFSRFFKCYVRRKGYREGGMGFLVAICAALFPMISYLKARYEDN

SEQ ID NO: 944 - protein, 616 aa, Paenibacillus sp.
MTISLCVICKNEEHNITRCLEGVREAVDEMIVVDTGSTDNTVAMARELGAKVYYYEWDNNFANARNYALKQAKNDWIIFLDADEYFLPEHAKLIAEMIGRLRAQRNLTDAIMMRHISIDEGRGGVVVETNRLVRAFRKSTLEYERPIHESLTKKTGKIHLLDATDSKAVVYHTGYTLEWMKHKAQRNLELLLKDEQDGTGDELTQLYLSDSYMGLGQLEKALDYGIRYIDKGRVVYGFNAKPYSNVIRCLISLGKKHELIIDWIERAIERFPGHPDFVWLKGLQFLREQRYSTALGYLLEADQLKDNYDGSESVRITFSLAEIYNNIAAIYVLMHDHLTALEYYVKSLKIKKYEVNAFDGLFTITKPYPREELIALLNSIYGHADEDLTFLINRFCELREGQLLLYYAKRSEWIQRHKSEGQIPYYILYLNGKYEEAYHMLDKSTMDTAPDDVVQVYMVVNAMLSLSEDIIAMALRRVAPSFQRILGVYAGVSKQLFTEDTHSLIAIFSEIARVCSDEQLQAVFMIEQMIEVDLSQQMAAILVQRRRYKLALHYFNSVQQPLDGEAWFQRGICYYNEGLYTHALQAFDQAKLKGIDDNRVEEYITWTEGHIKTKRV

SEQ ID NO: 945 - protein, 245 aa, Unknown
  Description of Unknown: candidate division KSB1 bacterium sequence
MEKFSAVIITLNEEKNIERCLKSLTWADEILVVDSGSTDRTLEICKRYGAKVVQTEWRGFGRTKQFAVEQAGHEWILSIDADEEVTTALRERIRNILQHPDPAIAYRIKRQAFYLGKAVKYSGWQNDFPLRLFNRKNGNFNDKPVHESVQFKGQVQRLYEPLNHYTYPTISSHIRKMDRYTNLSAAGSERKSTIGGSLVRALFRFFKMYIIKGGFLDGRIGFVLCFNSAFGIYLKYIKLWEKTRK

SEQ ID NO: 946 - protein, 349 aa, Paenibacillus sp.
MNISVCLIVKDEELNIERVLKSIPSPFEVIIYDTGSRDRTVQIAEKYNAVIKQGEWNDDFAQARNQSVSWATGEYILILDADEELPPDAEAKLSQFITEHPGQAGTVVLENIMENDSARHRMIRFFPNRPSFRFKGIVHEQLYENDLPASFKDTGLLVKHYGYTKKEYHEKDKFNRYLTLYQKALDERQDEGYMLYQIGKLYNSLEQYKEAEHYLKRSLTYKEENQLYHPPMLVLLGYTLKELGRSKEAADLLARYGDVYKDFPDLFFLLGLLAMDTGEIHIIEPSFKEALRIGETPKYTSVLGTGSFKAAYNLGVYYEILGFKDKAKEYYRLAASWGYDPALIRLKNI

SEQ ID NO: 947 - protein, 310 aa, Thermogutta terrifontis
MSEGIVAERSNIAEEPDRPKQDTLPISVIVPVLNEEQNIAACLESVRFADEVFVVDSGSTDRTAAIAESMGAKVVQFRFVPGGPRKKNWALENLPFRNEWVLLLDADERVTPELEREIRQEFVQGPRFDGYYLNRKLIFMGRWLRFGGNYPSWNLRLFRHELGRYEKLDTEELESAGDVEVHEHVVLQGKAGYLREPLLHLDYKDLSRWIVRHNNYSTWDAKLRLNLLQGKDLSHSIPARLLGNPVERKRWLKKLWIRLPCRPLLRFIYMYVIRLGFLDGKPGFIYAVLKAIQEFHINAKMWEMRTKLSE

SEQ ID NO: 948 - protein, 356 aa, Unknown
  Description of Unknown: Firmicutes bacterium CAG:534 sequence
MPPISICVIMKNEQKNMENFLSAIQKHFKDYPHEIVLVDTGSTDNTISIAQKYTDKIFHFDWIGDFSAARNFSLQCAAYDWVLVLDCDEYIIDLDVRGFDALITYYPQCVGMLSRKNHYEMNGTDSVYTDDVERFFNKKLFHYEAIIHEQVRALDGTEYKRVALPLTVDHCGYNGTIEDLRKKAERNNELLLKMLAETPDDPYLYFQIGQSYNMLRDDEKACYYYGKGLEYDVDPNAEYVQMMVIGYGYALLHLGRFDEALQFQNIYDEFATTADFVCLMGLIYLRKGMLLQAMAEFLKATSFETSKTEGANSFIPTYNMACINEVLGDIETAKVLYKKCGDFKPARERLNELSCS

SEQ ID NO: 949 - protein, 256 aa, Capnocytophaga haemolytica
MILLEPKISVVINTYNAEKHLQTVLETVKDFDEVVVCDMQSTDRTIAIAEQYGCKIVYHERLSYVEPARNYAIQSAANEWVLLIDADEMVPTTLKDELLRRLQTEEFDALAVPRKNYFMGRFMRSTFPDYNIRFFKKSKVNWLPAIHSTPTIDGKLLYLKKDKRFALEHLANDSFTDVLRKIQLYTDAELLRRKPKRVSLFKFVCAPMIAFCKTYFIKGGFLDGKEGYLYAKIDAYYKFFMLAKLNEAYHQAHQNV

SEQ ID NO: 950 - protein, 264 aa, Arenibacter sp.
MIHNTERISALIITYNEMGYIEKCLESVSFADEIIVVDSYSTDGTYQFLLNHPKVKVLQKPFVNYTDQKSFALKQASNDWVLFLDADEVITEPLREEIKITATRDSKHSAYWCYRKFMFQNRRLYFSGWQTDKNYRLFRKSKVRFCDKKIVHETLIVNGSSGVLHKPLMHYCYKTYTDYKMKMMKYGRLKAKEAFQQKKTFNYFSLIVKPLWKFSYNYIIRLGILDGKKGIIVCYLNALGEGERYMELKRLWKKRQHVYSPSFR

SEQ ID NO: 951 - protein, 298 aa, Unknown
  Description of Unknown: Acidobacteria bacterium sequence
MSLSPFPHFPRFGRDDNAVNESREKLSAIVTSFNEAVNIKECLESVAFADEVLLVDSFSTDSTLDLARQVPGVRILQREYFGSAAQKNWAMDQTVCSWVLIVDADERVTPGLAREIRDLLVRGPEASYYSIRRRNLFLDRLIRHSGWSTDRVVRLLRRGAARYPRRRVHADIQPEGAAPTLRNPLLHYTFRSLGQYLEKLHRYAEWGAADAYRRGKRSGALQLFFRPAWRFVRMYVFQAGFLDGRHGLVLCTLQAYGVFLKWAKLWEWRRFDQNGWRFELPAYDESDETWEGAASAAD

SEQ ID NO: 952 - protein, 310 aa, Microcoleus sp.
MAFATSKIPISVLIPAKNEEANLPACLESLSRADEVFVVDSQSSDRSVEIAEQYGATVVQFHFDGRWPKKKNWSLENLPFRHEWVLIVDCDERIPPELWEEIEAAIQNADYDGYYLNRKVFFLGTWIRHGGRYPDWNLRLFKHKKGRYENLKTEGIRNTGDNEVHEHVILSGVSGYLKNDMLHIDFRDIYHWLERHNRYSNWEARVYLNLLNSKDESGTIGASLLGDAVQRKRFLKKLWVRLPFKPTLRFVLFYIIQLGFLDGKAGYIYGRLLSQYEYQIGVKVYELQKFKGQLNISQTSSVMPTPSIEG

SEQ ID NO: 953 - protein, 245 aa, Unknown
  Description of Unknown: Microgenomates group bacterium GW2011_GWA2_47_8 sequence
MKLSAVVLTHNSAAVIGDCLQSLRFADEIIVIDSGSTDNTLALASTARIYKRKLVSFAAQRNFALGQAKYPWVLMIDSDERVSAALAKEIRAVIQIGSFSAYRMKRLNYFFGRVMKHGGYWPDWQTRLFRVKDFLKYAGTVHESPHFNGPLGSLKTHLIHFSHNNISECLEKSIVWTKKEAEQFIKAGHPPVTWWRIIKVMVWEFCYRYFKKMGFLDGYVGLVESLLQAMNRFFVYQQVWEMQQS

SEQ ID NO: 954 - protein, 245 aa, Aureitalea sp.
MQSLSVIVPTFNEEAYIVDALRSVAFADEIILIDSYSTDNTVALAKPYITKLLQREFDNFSAQKNYALEHVSSDWVLFLDADERVTHSLEDEIKRTISHPKHGGYKINFPHFYMNRFLYHHSDDVLRLVKRAGAHFTGTVHEKLQCEGRIGKLKNHMLHYTYKGLEAYIEKKETYAWFQAEQLYKKGKKASWFHLWIKPSYRFFRSYILKGGFRDGIPGLTVAAVNAYGVFQRYVKLRLLHKGMR

SEQ ID NO: 955 - protein, 289 aa, Nibricoccus aquaticus
MTTTAKVPVSILIPIKNEASNLPRCLAALAWADEIFVVDSHSTDGSQAICEKTGAKVVQFDFNGIWPKKKNWALENLPFKHEWVFIVDADEVLPPETGPEFAALIAADGHGKNGYWINRRFMFMGQWLKHAYYPNWNLRLFKHKLGRYERLVAGATGSGDNEVHEHIVVQGETGRLKSEMDHYAFPSIDVFVEKHNRYSNWEAALDTQEGAHAAQHLQMGGTKFKRKLKQFVRRLPFRPTLRFVYVYFFQLGILDGRAGYYFAKLHGFYEFLSVAKAQELRRRKKSATS

SEQ ID NO: 956 - protein, 322 aa, Mesorhizobium sp.
MKSSRRAHRVRLVARGEGINPSALRAQRRTEDIVMRKMPPAKIEITVVIPVKNEEKNLENCLAALGRFTEIVVVDSGSTDRTRDIAQAAGARTIDFNWNGRYPKKRNWVLSSQTLVNEWVLFLDADEVVNDRFCDEVAAAINSGHHVGFWLNYTNYFIGRRLRYGVPQRKLALFKIGLGFYERIEEESWSSLDMEVHEHPVVDGSVGEIVAKIDHRDFRGVDKFLLRHIDYAMWEARRYLKLRAESDSRSSQLTFRQRFKYRNLERPWYSTFYFCFAFFFRAGFLDGGAGYAYAFYKAWYFYTVRLMILELRGRETSFLTRS

SEQ ID NO: 957 - protein, 277 aa, Unknown
  Description of Unknown: Candidatus Contendobacter odensis Run_B_J11 sequence
MIDRTQLSVFITTYNNGRTLMACLESVKWADEIVIVDSFSTDDTLAIGQRYGTQITQHEFMGYGPQKRMALAATTHDWVLLLDADEALSPDLQTEIRRLLEHKPTADGYEIPRQEQMFWRMYNPATRMNHYLRLFDKREGDIDDRPIHAAPKVQGRIARLKAPLYHYGETDIHTKVEKINAYSTGLVADKLKKQRWGIPLIMLFYPPLFFIRSYLFKRNFMNGWAGLINSVIAAFYVFLKYAKLYEHHQFAKHGTRLLPDDAPPLPSEYQSESADKP

SEQ ID NO: 958 - protein, 262 aa, Desulfonauticus sp.
MSVKATGLVLTFNGEKYLEKCLQSLSFCQEILVVDSESTDATREIAQSLGARVLVNPWPGPGKQFEYAFKHIKTQWVVSLDQDEILSPELQKEIIAHLQNPRDYVGFYCPRRSFYFDRFLKHSGWYPDYLLRVFSLPQTNLHISEPHYGFKPQGKTKKLKGDIIHFPYTNLSEHLNKINYYTQEAAKDLASKGVSSGLFKALGHGLARFLKIYLFKQGFRDGQAGFILALNSFFYGFLKYIKILEIKEKNLKKNIDNSQANI

SEQ ID NO: 959 - protein, 268 aa, Unknown
  Description of Unknown: Microgenomates group bacterium GW2011_GWC1_44_10 sequence
MKLSVIILTRNVEDEIIPAIKSSQFADEIIAVDTGSTDATLDICRKNGVKIVYTTTNSFSKWRNDGAKAAKGDWLLYLDSDERIPVKLAQEILATIDHPKHSGYTISRYEVFLGKHLNHWGDSRVLRFMKRSSLKCWEGKLHEQPKIDGTVGDLRQQMVHLSHKNIDEKLPNTLLWSKTEAIMLLNAGHPPMVGWRFVRIMFTEFWNRCLKQGLWKDGTEGWIEIIYQMFSKFVTYERLWEMQRQPSLKETYKDIDKQILSEWEKQAK

SEQ ID NO: 960 - protein, 314 aa, Chlorogloeopsis fritschii
MSLSKIPVSVLIPAKNEEANLPACLASLERADEIFVVDSQSSDQSIEISQRCGAKVVQFNFNGQWPKKKNWSLENLPFQNEWVLIVDCDERITTELWEEIAQAIQNPEHDGYYLNRRVFFLGKWIRHGGKYPDWNLRLFKHKQGRYENLNTEDIPNTGDNEVHEHVVLEGKVGYLKNDMIHEDFRDLYHWLARHNRYSNWEARVYLNLLTNQGNNDTIGASLFGDAVQRKRFLKKIWVRLPFKPFLRFVLFYIIQRGFLDGRAGYIYARLLSQYEYQIGVKLYELRHCGGKLNTKSTPVTTSPSLSQVVKQTVI

SEQ ID NO: 961 - protein, 261 aa, Unknown
  Description of Unknown: Alcaligenaceae bacterium 429 sequence
MAEDIYAHITPVIIVKNGAAHVRRTIGALKPFRQVVVYDNGSTDDTLSLLSEYPNVKVVQGSFMGFGPTKNAAASHAETDWILSLDIDEQVNQKLLDALADWPLEEESKVGEVLRNNYFCGKHIRTNGWGKDWLCRLYNRRQHRFTDSQVHEKVKLDGRSQVVRLKGGLEHEAVTDVGQLLVKTQYYSELYANSERARLYAFPVVVFKAAFRFFRSYFLQLGILSGSRGMMIAVGEATGVFFRYSKVYQRKKFTQKSDKNT

SEQ ID NO: 962 - protein, 251 aa, Flavivirga eckloniae
MIKVSGVIITYNEEEHLEKCLKSLVDVVDEIVVVDSFSTDRTLEICEAFNVVLIQNKFEGYIEQKNYALSRAKYDYILSLDGDEALSDTLKESILKAKENWEFDGYYCNRLNNYCGQWIKHSDWYPDKKLRLFKKGNGEWKGINPHDRYTLKKGLKAGKLKGDLLHWIYRDYDEHNIKVQNFSSIAAQAYFDLGKKSSLWKIIFNPSWAFFKAYFLRRGFLDGLNGFIICVQTFNVTFLKYIKLYRLHKNK

SEQ ID NO: 963 - protein, 313 aa, Calothrix sp.
MSSKIPVSVIIPAKNEEANLPACLASVQRADEVFVVDSQSTDQSAEIVKNYGANLVQFHFNGRWPKKKNWSLENLPFRNEWILIVDCDERITPELWDEIAEAIQNSENEGYYLNRRVFFLGKWIRHGGKYPDWNLRLFKHKLGRYENLNTEDIRNTGDNEVHEHVILPGKVGYLKNDMLHEDFRDLFHWLERHNRYSNWEARVYYNILTGQDNNATIGASLFGDAVQRKRFLKKIWVRLPFKPFLRFVLFYIIQRGFLDGKAGYTYGRLLSQYEYQIGVKLYELRSCNGQLNTAKNTEKTQQKFNQEARQTAV

SEQ ID NO: 964 - protein, 549 aa, Unknown
  Description of Unknown: Gammaproteobacteria bacterium sequence
MSTGKKHHRPYRLSVVMIVKNEAENLSISLPAVANWADEIVILDSGSSDESQAVAKQYGAKWHVNANWPGFGKQRQIAQSYASGDWILALDADEEVSDTLKQSILSVIDQTPGNVIYGIKRLDCIFGHQIDCPFWPVKAHWRLYPRQFQYNDNKVHESVDLKNAQTRSLKGFLHHHTAPDPHFWLSKRLEYAKTWAKERAEKGKKTNVLTIVFKTFWALIKQYVIDGRFIQGKYGFIYACLFTQYTFNKYALLYDMGRQPQTYSPDFEPHSINRHNLFNRPLPEKITGKKHSISVVMIVKDEQKHLPACLYNIYDIVDEIVILDSGSTDSTRSIAKYFNAKWHVNNDWLGFGKQRQIAQRFASGDYILMLDPDELLNETLKASILAIANTENMEKAAYSIRYANIFCGQAAHGNAWYFDQIVRFYPNRYFEYHDYEVHESLNYGSATVHNLKGYIEHFTNDNLYHFLFKNVRYSHDWAKEKYEKGGKSSSVISLPFRTFFSFFREFVIRGAFLGGAYGFFLAVSASGYNFNKYLMLFEKKSCDKNKKDK

SEQ ID NO: 965 - protein, 252 aa, Arcobacter sp.
MNISVVVLAKNNENTIERTLKSLLEFDDVVVYDNGSTDKTMEIAKSFSNVNLVQGEFKGFGWTKNKASSFALNDWILVIDSDEVVDNELLNELKNKNLDEKTVYRLNFKAFYKDIQVQYCGWNNQKIKRLYNKKTTSYNSNDVHEDIITDNLKMGELKGNVEHYSYHTISQFIIKADRYSTLFAQNNVGKKSSSLPKAFFNGLYSFIKTYIFKQGFRDGYIGLIIAFSHMVTNFYKYIKLYELNLEEKKSKK

SEQ ID NO: 966 - protein, 248 aa, Unknown
  Description of Unknown: Candidatus Collierbacteria bacterium CG_4_9_14_3_um_filter_43_ 16 sequence
MKISVVVLSKKSELNHFLLESLSFVDEILLIIDSSSVIPGSDPESISTTSRLKIFYRPLNNDFSAQRNFALQKAKGDWVLFVDDDEYIGSELRKEIIEVIDHAQFSGFLLKRQDVVYHLPLRHGETGNIKIIRLGRRHSGRFNRQVHENWDIEGRVGELKSPLYHNKDHFISEFISRVDQYGRIDSKLLVLEGKPFSWFRLLVYPMAKFKLNYYFRVGFLDGLVGLFLAYLMAVQSLSIRVFQWENKN

SEQ ID NO: 967 - protein, 270 aa, Zobellia uliginosa
MNGPNEKISALIITYNEIGYIEKCIESMVFADEIVVVDSYSTDGTFEYLENHPKVKVIQRPFENFTDQKSFALRQASNDWVLFLDADEVLTPKLQNEIQHTINSGTKKNAFWFYRTFMFKDEKVFFSGCQTDKNYRLFRKSKVAFAKDKIVHETLNVIGESGTLKTKLIHYSYKDYSDFKGKILKYGRMKAIESLRKGRRFSYGKLVIKPIWKFFNYYIIRLGLLDGFKGLVLSYIHARGVVEHYKALKALETETRTSTAPIKTILERAA

SEQ ID NO: 968 - protein, 253 aa, Unknown
  Description of Unknown: Candidatus Gottesmanbacteria bacterium GW2011_GWB1_43_11 sequence
MSEPTSITAVVLTKDEVDNITRCLKSLLWCEEIILVDDSKDKTLELARTIVSDKKLRIIKQSSTSDFAALRNMALKQARHVWVLFVDADEEVTPGLAREIKEAICDEGENGYFLKRRDHFLGRWLKFGETAEVRLLKLGRKDAGKWVRRVHEKWEITNPTGELVSPLLHYPHPTVAEFIARINRWTTLDAQEFYDQGVRSNWAKILIFPLGKFLRNYFIKLGFLDGLPGLIMAINMSFHSFLTRAKLYLLQTS

SEQ ID NO: 969 - protein, 251 aa, Unknown
  Description of Unknown: Flavobacteriales bacterium CG_4_9_14_0_2_um_filter_32_27 sequence
MQLSVVIITYNEQRNIARCLDSVLPVADEIIVVDSFSTDDTEKICSQYNVKFLQHPFKGHIEQKNYALAQAQFDYVLSLDADEALSETLLQEIKNIKTHCEKDAYSFNRLTNFCGQWIKHCGWYPDKKTRLWNKNKGNWGGANPHDKVMMQQNATTQHINADILHYSFNSIDEHLKQIAYFTDISSKAAFEKGKRSTNFKIAYKTGFKFLRDYLLKLGFLDGKYGFIICKNSAYAKFLKYSKLKKLHQNNF

SEQ ID NO: 970 - protein, 260 aa, Unknown
  Description of Unknown: Alphaproteobacteria bacterium sequence
MSSPPPPDPATGPKLSALITVHNEEAQLGECLDTLRFADEIVVVLDKCTDGSKEIAADYTTHLFEGSWEIEGERRNYGIGHCSGEWILEVDADERVPEALAREIRETIKDAAGGYFLIPFDNYIGKRLVRFGWGAYWGVSATVRLFSKGAKSWGGQRIHPSLELTGTRGRLETPMIHYVDRNISDMIARLDRYSTARARDLRDQGDIGSFSANLRRIFSRFFKCFIIRKGYREGIYGFLIALFAGLYPIVSYLKARIEEE

SEQ ID NO: 971 - protein, 366 aa, Brevibacillus parabrevis
MTPPLISLCMIVKDEADQIEACLGSVHSVVDEIIVVDTGSTDGTQELCRKYGAKVIEAPWENSFSKARNIGLKEARGEWVLWLDADERLEEADQEALRQAAIASKSDVLFLKLLHYQGPKKETASLHLASRNAQIRLFRNKKGFQFARDIHEVLQWPETVPQDGAIPLIPVRLHHYGYIEEVVTKKNKARRNLKLLLEERENPDRDPWCDYHLASEFYRAQKWEHAFILVNQALEGFLGKSQLPPSLFYKLKYEILFRHGSMRGAWPGIECAIRLYPDYVDLHFYKGVFLMEHGLYAEAIQSFERCLEIGEEHWEHLSQQGMGSFHALHYLGRCMERLGKSKEAHVYDQTSANMVRTCAHTPSTKG

SEQ ID NO: 972 - protein, 297 aa, Unknown
  Description of Unknown: Candidatus Pacebacteria bacterium CG10_big_fil_rev_8_21_14_0_10 _44_54 sequence
MKLSIVVTTKNAARTLERTLKSVRFADEIVVVDMMSSDETQLIARRFTDKVFTTADVGYVEPARNFSLSKAKGEWVLVVDADEVVSATLRDQILQVIELDSNVVCYAIARKNILFGKWVQTAGWWPDFQPRLFQRGCVEWSDAIHSKPKVTGESVHFPADEALAFEHYNYESISEFVSRMDLYTTIAAQNKVGRDTIVEGPVDVFRREMLQRLFPLRGIDGGYRGLLLAFLQGFSEVVQAAKFWQLQRSEEIETKPETLLALAELRAQLAYWIADEQMRNSNGIAALTWRFRRKLRL

SEQ ID NO: 973 - protein, 264 aa, Unknown
  Description of Unknown: Flavobacterium gilvum sequence
MTNSNAYKLSVLIITLNEEKHLKALLSDLDFADEIVIVDSFSTDKTENIAKSFHKVSFIQHKFENFSDQRNFAINQSKNDWILFLDADEVLTPELKQEIIETLQNNQTYSAYFFERIFMFEDSVLKYSGNQTDKIIRLFNKNLARYDEKKLVHEKLIVNGKIAFLKNKLIHYTYLSYQDYREKIIFYGKLKALEKFSEKTKPTVLHQLFHPVYNFLYNYFIRLGFLDGKKGVIICYLNAYSIVIRYQELKKLWNQNRRLISSKT

SEQ ID NO: 974 - protein, 574 aa, Hyphomonas sp.
MLDVLIITQNEEANIGRCLEALTGWTRRIFVIDSGSTDGTRGIVESHGAEFVHHDWAGYAAQKNWALDTLPFEADWTLIIDADEIVTPELRVEIMEVLDRNVDEVEETAFYLNRLFYFLDDPIRHCGYFPSWNLRLFKRGKARYEDRAVHEHMVVDGKTAYLEEPMIHDDRRGIEHSIAKHNSYSSLEAQEILRGREAAGPPASGLASSFFGNALQRRRWFKQRIYHLLPAPWLFRFLYMYVWRRGFMDGSTGRRFSLFISAYEFLISLKIKELRIDRAQRMPEPMTEGSPRGDLPVTVVVPVLNEEKNLPICLSRLGRFSKVVVVDSGSTDRTVEIAQEHGAEVVDFRWNGQFPKKRNWVLRNHEFDTPWILFLDADEYVTDDFCDELASTLATSPHDGMWLSYHNYFMGRYLRHGAAFTKLALIRTGSGEYERIDEERWSHLDMEVHEHPVLAGTTGRIGATIDHDDYKGLKSYIRKHNEYSSWEAKRYMKLVEGGGPGQSYFTRRQRWKYGAIRRWWLAPGYFFASYLFRFGILDGYPGFAFALLKWIYFFQIRLKIIELERAEHRGDAVA

SEQ ID NO: 975 - protein, 273 aa, Niastella koreensis
MRPMYFTETIEKPAPRNVIIRKAEPKNCPVFKVSAVIITYNEEKMIERTLAQLQWCDEIIVVDSYSTDRTAEICSSKGCKVLFRQFDGYGAQKQFAVSQAKNDWVLCVDADEVLTDELVKEITSLTEADKQYSGFAFRMNLVFLGKEFLYGKESGRYFLRLFNRQKGGITADKVHEGIHLEGPVKKLKHIVKHYSYTSIYQYLEKFNRYTRYAAEMGKRKGKHKSTFIILLAVPFNFTKYYLLERNCLNGLKGFYWSVFSTFYHFVKYAKINE

SEQ ID NO: 976 - protein, 249 aa, Sulfurimonas denitrificans
MLIENISCVIIVKNAASTLGSTLDSLADFRDVVLYDNGSTDETIEIAKKYKNVTLVIGEFLGFGPTKNLACSYAKNEWVFSLDADEVLSDEFIKNISNLELNDRNIYTILRENYYKSTQVKHCWGNDIIVRLFNRSKTSFSEEKVHEKVIEEGFKTILISGAVKHYPYNTITDFILKLDRYSTIFAQDNVGKKKSSPSKAFFNAAFSFFKTYFLKKGFLDGYAGLVIAFSHMATNFYKYIKLYELNKKL

SEQ ID NO: 977 - protein, 255 aa, Unknown
  Description of Unknown: Methylococcaceae bacterium NSP1- 2 sequence
MKSVLTLSVIIITKNESTHIGGCLQSVAWADEIIVLDSGSSDDTVNICRTYTNKVYSTDWQGFGIQKQRALDRATGDWVLSIDADEIVTAELKAEIMQAMQTNDINGFEIPRLSNYCGRQMRHGGWFPDYVLRLFRRECGQFTNHVVHERIIVTGKIARLNTPFLHDAFVDFEEVLHKVNHYSSLGATVLYEKGVRSSLPKAIVKGLWTFIRTYFLKAAFLDGQQGLMLAISNAEGAYYKYVKLWALQHLKTTQK

SEQ ID NO: 978 - protein, 250 aa, Arcobacter ellisii
MIKASVYIICKNEEKHIKRVLESVKDFDEIVVVDSGSTDNTLNIAKEYTNKIFHQDWLGFAKQKEYAKSLCQNEWVLNLDADEQLTEELKKEIEKVIEENKIDGLDIKISSQFLGKFNSEKSKFNRRIRFFRKSVGHYPDKLVHESILVKGKINKANGFIYDYGTMDLKTHLSKINEYSSLRADEKFAKNKKASFAKLLFVFPLSFFKSFIIKRGFLNGMRGFIAAMNNSFYAFLKEAKLYELNNKSEEK

SEQ ID NO: 979 - protein, 250 aa, Unknown
  Description of Unknown: Gammaproteobacteria bacterium sequence
MPQLSVIIITKNVATHIEACLSSVAYADEIIVVDCGSTDNTVALCRPFTDNVFITDDWPGFGQQKNRALAKATGDWVLSIDADERVIAALQQEMKQIIADTPYTVFRMPRQSQYCGRWIKHSGWSPDYVTRLFRRDSARFSDDLVHEKVLMLHGNMGTLKTPLLHYSFNSLEEVLDKVNRYSSANALRHYQQGKKSSLKKAIFHGLWTFIRTYFLQAGFLDGREGFMLAVSNAEGTYYRYLKLIYRCSEK

SEQ ID NO: 980 - protein, 272 aa, Unknown
  Description of Unknown: uncultured bacterium sequence
MGKVSGDIENKNNKEPFRYIHYGKMSKGMISAVILTHNDEKTIEKTLESVRFCDEVVVIDDDSKDKTVEIAKKFTSKIFTHEVKDDFAAQRNFGLSKAKGEWVFYIDSDEVVSDKLAKEIKKSIKIGDGYYLKRNDFVFGRFLKHGETSRVRLLRLGRKGTGIWQRPVHETWNITGAVGTLSEPLLHFPHPNVAQFIEEINTYSTINAHFLFNQKIQCPWWHIIAYPKAKFFLNYFWYLGFMDGTAGAVSAIMMSMHSFLTRAKLYLLWHKK

SEQ ID NO: 981 - protein, 276 aa, Unknown
  Description of Unknown: Epsilonproteobacteria bacterium sequence
MKKKQSLLLLKHRKNIKIKRILKRGSKEKKLSIKQMSVVMMAKNAEDTIAQSLDSLSAFDEVLLYLNHSTDATKTIVQNYANVKIVEGEFLGFGKTKNVAASHSKHDWILSLDSDEILNEKLIAEISQQDFSDITKLYQLKRDNYFLGHKTQSADLIVRIYNKNHTGFNDNNVHEKIIVPKLSQVMTLKHSFVHLNITNINQTLTKIIQYTDLGAENKKTCFFSVLIFKSMFAFFKTYILQGNIIRGWVGFALAVNSANKRYYKYMKQFINCQEKE

SEQ ID NO: 982 - protein, 256 aa, Unknown
  Description of Unknown: Flavobacterium sp. ov086 sequence
MILPEKQLLTALVITYNEEQNIKTVLDHLAFADEIIVVDSFSTDKTFEIATSFKNVKVVQHAFDNFAAQRNYALSLASNSWILFLDADERLTPELQKEISFIINQKNSASAYFMRRNFMFENKKLRFSGWQTDKIIRLFKREKASYNINKIVHEKLIVNGKIGKLKSKLIHHSYSNYEDYKQKMVFYGQLKAQEEILKETSPNYFHFYIRPAYQFLNQYLVRLGFLDGKKGIIICYLNALSVAVRFQELKKIKAKN

SEQ ID NO: 983 - protein, 260 aa, Unknown
  Description of Unknown: Candidatus Enterovibrio luxaltus sequence
MNQSKQRASISAIIITKNEEQILPKCLASLDWFDEIIVVDSGSTDNTIVIAEQAGANVYVSTKWAGFGKQKQLAQHYATKEWILAIDADEVISESLKNSILEVLAAPPERTIFSLWRTTWVFGRFLKYSGWYDKIIRFYPRKFTGYNDAVVHEKIIEPKGSQKQILDGDMLHYPYRDLHQYLEKSAFYAKSWADVCHAQGKKSSIIQGIIHATSCFLKMYILKCGFLDGKEGFLIAVLSAHSTFVKYADLWIRKNDRLAN

SEQ ID NO: 984 - protein, 254 aa, Unknown
  Description of Unknown: Candidatus Microgenomates bacterium sequence
MSQMKLSVVTIVKNEEKIIEKFLDQLNWVDEIVIVDNGSIDNTVTLAKKYTSNVYTFSQKHFGKLKQFALSKATGDWTLVLDADEFISKNLENEIRNVLKLKSKYIGYQILRVGYFLNHRLYARGFREYKVRLCKQGSGVITQVPIHEELIVRGKIGRLDGEIRHYSYRSLHQTIVKLTSYACSESTLSSSEKIRVGIKNFTLYPLHMFWTIFVDDKGYKDGIWGIGLALCFAYYEFARYYFLLKHKFLSNPTQ

SEQ ID NO: 985 - protein, 259 aa, Prevotella amnii
MKAMPQENKISVVINTYNAEKYLREVLESVKCFDEIVICDMESKDNTLAIAKEYNCKIVTFPKANHLSAEPARTFAIQSASYKWVLVVDADELVTTELRTYLYNIIKQEACPKGLYIARRNRDMNVLDKGRLRDFQLRFFIRKGTIWPPYVHTFPQVQGRIGKLTDSNGAVLIHLDENYLHERIEKINRYSDGEIDKRISKQYGLGALLWRPIWRFFKAYIMDQQYKKGLPGFISSCLSGFYQFLIVAKSIEKRKYKKT

SEQ ID NO: 986 - protein, 247 aa, Smithella sp.
MKLSIIIITKNEEKNIRKCLDSVTWADEIVVLDSGSTDDTIAICKQYTDKVYETDWIGFGHQKNRALKYASGNWILSLDADEWITPELKAEILMTIQNPGNYVAFDMPRLSSCCGQYIHHSGWWPDYITRLCRRDKARFSEQIVHERMIVDGCVGRLSNHIMHASYKDLGHVLTKLNRYSTDGADLLLAEGAKSSLLKAISHGLWSFIYTYIVRIGFLDGRMGFILAVYNAECTYYKYLKLMMLNKK

SEQ ID NO: 987 - protein, 282 aa, Robiginitalea myxolifaciens
MKDSRKDTGLSVLMITYNEISNIARCLNAVDFATEIIVVDSGSTDGTYEYLLNRPGVRVIRKPFRNFTEQKNFALDQARQPWVLFVDADEEVSPELAREIREVIARNDQSVSAYWFYRKFMFKNIPLQFSGWQTDKNIRLFRKDCARYSTNRLVHEKLDIKGKTAALKNQLLHYCYRDFASYKQKMVLYGRLKAQEVLEGKRRPKMALLLLKPIWKFCYNYLFRLGILDGMRGVTICYLDAYGYLVQFRMLRGARARKTSTSTTVRRPLPASQVPYPLPKAS

SEQ ID NO: 988 - protein, 270 aa, Unknown
  Description of Unknown: Desulfobulbaceae bacterium sequence
MKKLSVFITTLNNAKTLPCCLESVKWADEIVVLDTFSSDGTVAIAEKYGAKLFQHEFLGYGRQKQSALEKTTNDWVLLLDADETLSDQLQDEIKQILSTEPTYDGFELPRQEQLFWRMSSRFTRFNYQLRFFRKSVGALSTDAVHAAPKVSGRVGKLQHPFLHFGEINIHTKVEKINAYSSGMVEDKAKKGKQGSLLTLILYPPIAFIQSYLFKRNIVNGSAGFIASVTMAYYAFLKYAKLREYHKFQKYGNSLLPDNAPDFLSEPEVPK

SEQ ID NO: 989 - protein, 255 aa, Unknown
  Description of Unknown: Desulfobacteraceae bacterium sequence
MTISVCIICFNEEPSIKRCLESVAWADEIVVVDSMSRDRTLDIARQFTRSVHQRKWTGYADQKNYALSLASGEWVLSLDADEEATVELSREIIDIANSKEALEGYLIPRRSFYQGRWIKHSGFYPDRQLRFFRRNKALWTGKRVHEKVHVEGRVGFMKGEILHYPYGGILEGQLATVNSFSTLMALDLHEQGKRFHLILLLLRPFFKFLEVYFLRLGLLDGIPGLIISVTSAYAMFARYVKLRELEQGLAKRSSL

SEQ ID NO: 990 - protein, 249 aa, Unknown
  Description of Unknown: Candidatus Omnitrophica bacterium CG11_big_fil_rev_8_21_14_0_20 _41_12 sequence
MAKLSVVVLAKNEESCIAACLESVKWADEIIVVDDESTDKTMEIVKQYNAKVFHRKMDIEGKHRNWAYAQAANTWVLSLDADETVTPELKVEIEKAIESNEFVAYDIPLRNFISNYWVKYGGWYPASKVRLFKKDKFKYEEAEVHPRAFADGACGHLKSDIIHRGYPDLEHFLNSVNRQSTLEAVKWINTGRKMTLLWATWRTVDRFFRRYFGKKAYKDGMYGFVIAYFDSLYQILSYVKFREMKNKKL

SEQ ID NO: 991 - protein, 253 aa, Neisseria meningitidis
MKKVSVLIVAKNEANHIQECIESCRFDKEVIVIDDYSTDNTAEIAEGLGAKVFRRHLNGDFGAQKTFAIEQAGGEWVFLIDADERCTPELSDEISKIVQTGDYAAYFVERRNLFPNHPATHGAMRPDSVCRLMPKKDSSVQGKVHETVQNPLPQTPSEAFYVPLHVRQLGTIFQQVQQIYFHFSRKIPRAGKSPCVSLGTLSSARFGGFSKFISLNKGFLDGKMGWIMSVNHSYYTMIKYVRLYYLYKSGGKF

SEQ ID NO: 992 - protein, 235 aa, Campylobacter corcagiensis
MNKLSIVILTLNSQKYLKEVLESAKFADEILIIDSGSTDKTKEFCYKFNTKFIYQPWLGFGKQKRFGVNLAQNEWVFVLDSDEIITQKLKDEILKTIKNPKFMAYKVARLNFFFGKAIKKMGLYPDYSVRLFNKNFANFNQRDVHESVVFFDENMAFGTLKNHFIHKAYENIDEFIAKQNRYSTLGAKKNVLKAIFSPCWTFFKLYILKGGFMEGWHGFVISKLYSQYTFWKYIK

SEQ ID NO: 993 - protein, 257 aa, Unknown
  Description of Unknown: Rhizobiales bacterium sequence
  MOD_RES (15)..(15): Any amino acid
  MOD_RES (23)..(23): Any amino acid
MNEEAYIVNCIESLXCCSEIVIXDSGSTDATVKTIKKYQKDGWPIKFLHNDWPGYAAQKQFALDQCTQEWCFNIDADERLDEALKAALPALLNTDKDMVGWRIARRPYLIGYGYTPQWATERKNLRLIKKDKGFYDLSLKVHEGITPNGKVGSSKKGSLLHFRPLPIAEQILKENKYSSLKTEMRIEKGKKPNLLKLLFNPPLYFVRLYLKTGLWKCGVPGFTQAMYGAIYSFMTEAKMFEASALKHMPPKDDLDRK

SEQ ID NO: 994 - protein, 255 aa, Mitsuokella sp.
MRLAVIILTKNEEHNIEGAVKSASFADEVVVLDSGSTDRTREFAERLGARFVVHLMGEDGFAGQRNAALDETDADWVFYLDADERITDEAAKEMMRCVKANEWFAYRIKRMNILFGQVMRHGSHAPDYVMRLFPRTMVRWKGVVHESAITELPVRALKGVLCHYTYTDWDRYFVKFNQYTTLMAKKMEEGGKRASFLDILLHPSFAFFQSYILKLGFLDGKQGFIFALNHFFYTMIKYVKLYYATTRVREDRKGC

SEQ ID NO: 995 - protein, 249 aa, Sulfurovum sp.
MNISAVVLAKNNEKTIGNTLQSLTDFSDVVVYDNGSVDETINIAKSFPNVNLIEGEFRGFGWSKNKAASYAKNDWILIIDSDEVVDGELLEVLKNKVLEKNCVYKLNFKAFYKDIQVKHCGWNNQKIKRLYNKTVTSYNSNDVHEDIITDGLTMEVLAGNVEHYSYHSISEFIIKADRYSTLFAKNNAGKKKSSPSKAFFNGIYSFIRTYIFKQGFRDGYVGLIIAYSHMVTNFYKYIKLYEANKELTQ

SEQ ID NO: 996 - protein, 585 aa, Thermoanaerosceptrum fracticalcis
MNNTITLTMIVRNEAANIENCLNSVYKQVDEIVIVDTGSTDNTVEIARSFTDKIYFYPWQGDFSAARNFALDKAKGEWIIYLDADEELLCASDELKSLVSRDKATEAYLLPLNNPTTDFTGVYNRFFVLRLFKNNGSYRFKGKIHEQVIVPPKNAVGIAESPVINHKLLPAKERNRKRGRNLALLKQALAEDPHNNFLQYYLGVEWLMLGKPAQALSYFKSAYNNLTDEYLLFRGPALRYLLVCLQSLGRLDEAICLCLEADLKYPEYTDIYYLAGHLFEEKEEYELAIKWFTQAVKCGTPPPLFSHLAGTESFLAYYHLGFCLEKLGETEKAVDYYVMALKANEKYIYPIYNLFVLLLTKYGAHRTLAYFQEHKYLNNVELALAVAHLFFQAGFRALAIECLESCNIRGNKDEEVKFYLGKYSIFSGRLLSGLQNLSEISPTSPFYTQAQLQRTIAFLLGGSFPEARILALELWKNHQTRCHGYVLLNLIRFLERDEMITPPQKIRGMDVLKPVLELLNESSCCLPDPRLRQCLHYWKLRQGLEIFLKNISPEGYLRLVEHYQDKSSDLHNLVEYKFGCGGTKV

SEQ ID NO: 997 - protein, 255 aa, Methylomusa anaerophila
MTLTVLILAKNEEKNIRECIESAKFADEIIVIDDFSTDDTKAIAESLGAKVYQRAMNGDWGAQQTYAIQLARTEWIFFLDADERIPPALAVEIRNAVKLNEKYTYKVSRLNHIMGQALRHGGWYPDFGIHLLPREGSYVEGFVHPRIHHNYPEKQLKNHMLHYPYTSWEHYFNKLNLYTRLAAEKNRKNGKKANFFFDIMIRPHVAFFKMYILKAGWRDGKVGFILASFHYCYTMAKYVKLYYLQKTNKDNYSPL

SEQ ID NO: 998 - protein, 249 aa, Unknown
  Description of Unknown: bacterium BMS3Bbin11 sequence
MNTHLSAIIITYNAARQLVDCLNSLSFVSEILILDSGSDDETRNIAQQYNARFIHQDWLGYGPQKQKAVELAEHDWVLCLDADECISEELAVSIQSVMESPQFQAYQFPRCNRFMGRWLRHGEGYPDISLRLFNRQHALWSNDAVHEFVQTDVSTGTLKGDLLHDSAASLASYLEKQNQYTSLQAEKMYQAGKTAGVGKILLNPLFRFFKFYLFRLGFLDGVPGLVHICIGCQNTFIKYAKLITLQRTQ

SEQ ID NO: 999 - protein, 262 aa, Selenomonas sp.
MKLAVIVLTHNEEQHIEACIRSAAFADEILVIDDMSTDRTAELAQSLGARVVTHPLAGDFAGQRNFALSQTDADWVLYVDADERVNEGTEAELRRIMAADARAVYEIKRINIVFGQRMYYGGHHPDYIRRFFPRDAAHWTGLVHERTASELPVRRMGGSFLHYTYESWEQYLRKFNLYTTLMAERRYTEGQHTSFLKILFDPPFAFFRFYVIQRGFLDGRLGFIMAMCHGFYTMIKYVKLAVLWQMHGAESTAAGERAKNDD

SEQ ID NO: 1000 - protein, 247 aa, Selenomonas sp.
MQLAVIILTHNEEDNIGACVKSAAFADEILVIDDRSTDRTREIAEASGARVVVRPLAGDFAGQRNFARVQTDADWVLYLDADERVTEETGREMRAVMAAGTRAVYAVERVNVAFGQRMYYGGHRPDYPRRFFPRDAVRWEGLVHERVVSDLPVKRLRGSLLHYTYTDWGRYFQKFNQYTTLMAARRHAEGKRISFAKILLDPPFSFFRFYILQRGFLEGRLGFILSVFHGFYTMVKYVKLYYLQSRE

SEQ ID NO: 1001 - protein, 254 aa, Capnocytophaga sp.
MEISVVINTYNAEKHLATVLESTKDFDEVVICDMHSTDNTIAIAQKYGCKIVYCERYPYVEPARNFAIAQATHNWVLVIDADETVPEKLKNYLYQLAEKPELGGVYISFKNYFIDKFMRSAFPDFKLRFFKKEGADWSAEIHSTVKVKGEVIKLPRGRKDLASEHLANDSVATILNKNNNYSTQAAERHKGKKIGWIKLLFSPLFWFVKYYFIKKGCLDGKRGFIFAVLKAQYKFSCLAKIYEYQQTHYSGNAS

SEQ ID NO: 1002 - protein, 267 aa, Unknown
  Description of Unknown: Candidatus Shapirobacteria bacterium CG07_land_8_20_14_0_80_39 _12 sequence
MNKAKISVAMITYNEEGNIRDCLNSVRWADEIVVVDGSSQDQTREIAREMGARVIKTANKLFFDTNKNLAIKACSGDWIFLLDADERVSPELAKEINKTVQSWSPGQPEAYWLPRKNYFLGRYLRKGGQYPDPVLRLFKKGRALLPEESVHQQPSVKGKTDWLKNDLIHWATPEFSRYLMRERRYSTLEALQMGDDKVSLNLLNWLKYLIFRPKRTFFLLFIRHKGFMDGWPGFVFAFFSGFHHAWAFGKYLKMRMTKKKITMGEDW

SEQ ID NO: 1003 - protein, 249 aa, Unknown
  Description of Unknown: Flavobacterium reichenbachii sequence
MSKRKIKLSVIILTYNEELYIEDAINSVSFADEIIVLDSYSNDTTAEIARRLGAKLIYRKFDNYCRQRNFAIEAATGEWILFLDADERVSTPLEFEILNSINSNTYDAYRIWFPHFFMDRFLFHYTDKVTRLIKNNDISFENEVHEKLILKSKPGLLKNHMIHYTYRGLFNFISKKDKYAWFQAKMSFEKGKKATLFLLFFKPLYRFFHTYFVKRVYLDGVPGLAAAAIDAYGVFSRYAKIILLEKQLE

SEQ ID NO: 1004 - protein, 258 aa, Unknown
  Description of Unknown: Candidatus Shapirobacteria bacterium CG03_land_8_20_14_0_80_39 _12 sequence
MSQKISAIVLTRNEEEIIADCLESIKWVDEIVIVDNASTDDTLKITKKFKVDKIVETGDKNTFSERRNQGAKEAKNDWLLYVDSDERVTPVLRNEIEKTIEDKESGFAAYAIPRRNIRLTKELHFGGWWPDYVVRLIKKDKLKVWKGDLHEQPEIEGEIGYLKEALVHFSHRGSLENKLQNTINWSKIEAQKLYEAGHPPMTIPRFLSATWREFYFRMIKKQAFRDGTEGVIEAFYQVFSVFISYARLWELQTKKGKI

SEQ ID NO: 1005 - protein, 313 aa, Leptolyngbya sp.
MSTATKVPVSVLIPAKNEEANLPACLESVAQADEVFVVDSHSEDRSVEIAESYGAHVVQFDFNGRWPKKKNWSLDNLPFRNEWVLIVDCDERITPELWTEMAEVITADTLDGCYLNRRVYFLGKWIRHGGKYPDWNMRFFRHVKGRYENLNTEEIQNTGDNEVHEHVVIEGGNVGYLKNDMLHIDFRDLFHWLARHNRYSNWEARVYYNLLTGMGDDGTIGANLFGDSVQRKRFFKKIWVRLPFKPFLRFVLFYFIRLGFLDGYPGYIYGRLLSQYEYQIGVKLYELQFGGSLNLTDKDKTKENPKAALVGDV

SEQ ID NO: 1006 - protein, 245 aa, Unknown
  Description of Unknown: Candidatus Amesbacteria bacterium GW2011_GWA2_47_11b sequence
MLTGIVLTYNEEKNIARCLENLKFCDTVLVVDGGSTDKTVSLAKKAGATILNHEFVDFSSQRNWAISQAKTPWILFVDADEIVSVKLGEEIVSATKKIEYKGFLIPRTDYMWGKKLTHGDVGGVRLLRLARRGAGAWHGAVHEQWLIDGNVGILKHYIHHYPHPTLVEFLQEINYYSTLRAQELYTAGQHASFFQIVFYPLIKFKYLYFLKLGLLDGTVGFVHAMTMAFYSFLVRGKLWLLWRSR

SEQ ID NO: 1007 - protein, 259 aa, Unknown
  Description of Unknown: Microgenomates group bacterium GW2011_GWC1_43_11 sequence
MNNKSILLSAVVITKNEETRIAKCLESLGFCDEIIVVDNGSTDKTTDIAKRYNTSIERFTETDFSALRNFGKDKSKGIWILYVDADEIITKDLEKEIFQTIDPHPQSDNVNGYYLRRQNYYLGYKWPVQDKMQRLFVKDKLIRWKGKLHETAIIDGKMGVLTNPLIHNTHRTLEEMVAKTNEWSDFEAQLRFNAHHANIAWWRLIRVMMTGFFQSFMREGGWRMGTVGWIESLYQAFSMFITYAKLWELQRDEHVKKNT

SEQ ID NO: 1008 - protein, 245 aa, Unknown
  Description of Unknown: Flavobacterium enshiense DK69 sequence
MSTLSVIIPTYNEIDYIEDAVKSVDFANEIIVIDSFSSDGTKEKAISLGCKVLERKFDNFSNQKNHAIKEATGDWVLFIDGDERVSQKLKLEILDVMASGKHSGYKINFPHFYMNRFLYHKVDRVVRLVRNNNIHFTGDVHEKLNVPGSIGQLKNFMLHYTYKGLFHLLQKKDSYAWFQANTSVQKGKKVTYFHLFFKPLYRFFSSYILKRGFMDGVPGLALASVNAYGVFSRYAKMILIQKGLK

SEQ ID NO: 1009 - protein, 257 aa, Unknown
  Description of Unknown: Candidatus Shapirobacteria bacterium CG10_big_fil_rev_8_21_14_0 _10_38_8 sequence
MLSVVILTKNEERNIEECLESVKWADEIVLVDDCSDDKTLEIVRSEMREAGCEKIKIFSRSLDGDFARQRNFGLEKAKGDWILFVDADERVSPELRREIESVTSYKSPLVTGFYLKRLDMIWGRELKHGEAGSVKLLRLGRKEAGKWEGKVHERWEIGVKDLGELENPLVHLPHPTMTEFLEEVNFYSTLRAKELYDQGKKTNLLEIICFPLGKFFQNWIFRLGFMDGMPGFAVALLMSFHSFLVRSKLYLLWKQGK

SEQ ID NO: 1010 - protein, 257 aa, Unknown
  Description of Unknown: Flavobacterium tegetincola sequence
MELQPHEKISVLIITLNEEAHMYELLSDLEFADEVIVIDSMSTDQTKSICESFSNVRFVVNKFENYTSQRNFAIDQAKNNWILFIDADERLTPALKAEIIETVSQNQEISAYLFYRKFYFKKKVLRFSGWQTDRIFRLFKKDKCRYTHKRLVHEKLDVDGKITYFKHRLIHYSYADYESYKKKMITYGKLKAREKYQSGFKPTVFHYYGHSIYNFLYQYLIRLGILDGRKGIVICYLNALSVTARYKELERLYKENQ

SEQ ID NO: 1011 - protein, 355 aa, Unknown
  Description of Unknown: bacterium 1xD42-87 sequence
MLPVSVCMIAKNEDNHIEECLKRLRPCRFEIIVVDTGSVDRTVEIAHKYADKIFHFAWCEDFSSARNFSVQQAANDWVLIIDCDEYLENVNLAQLEDSLTGRREAVGMITRNNPYTVQGSRSIMSERIGRLFNKNYCHFEGSIHEQVRTMQGREPDTFPIPLTFYHEGYVSESDKRMRATRNLEMLLHDLALKGPSSYIYFQLGQNYISLNDMEKAAHYYKLGLDLNADPNSDFVQSMAETYGYCLMDLAKYDTAMTLRDKYDLLSHRADFVFLMGMLYQKKGEYAKAIDEFKKATTLTAYSRTGVNSYRANFHIAEIYECMGELEQAKAYYKKCRDYAPAVRRLRELSAGENAS

SEQ ID NO: 1012 - protein, 301 aa, Mesorhizobium sp.
MTREHAISLIVHTRNSEATLPRLLDSTRWAAERILIDMQSRDATIEIAQAAGCRVLNTPVVDAVDPIRNQYLGEASQEWILVLDSDEYLAADAHEALQQLIREHGANFDAFALPRFNSVAGHIMRGSGFYPDHQVRFFRKGTVAWQSGHHHLPTVLTGPLRLRRLEPPHCLHIHHENYVDVASFLERQLRYALTDDYDADPANFDFGSYVAEAYAEFARRHEPLQDGELSTAVATVLAWDRIVRGLIHWERLGRQQPLNGAFSLPIALAVPGKQTWKTVPMRNVPREISRWIRRRVSRRRH

SEQ ID NO: 1013 - protein, 257 aa, Pontibacter mucosus
MPVKLSVVVITYNEERNIARCLESVKRVADELVVVDSYSTDRTREICLSYGARFMEHPFEGHIEQKNYALTQATFQHVLSLDADEALSPELEQAVLAAKNNWQSDAYSMNRLTNYCGKWIHHSGWYPDTKVRLFDRSKAVWGGENPHDKIILSQGATLQHLRGDLLHYSYYTVTQHLGQINKFTDASSRALIRDGKTVSLPMVILKPLFRFFRAYILKRGFLDGPEGFIISVSSAESVYYKYLKLYMHNRQQKRGEV

SEQ ID NO: 1014 - protein, 252 aa, Unknown
  Description of Unknown: Candidatus Levybacteria bacterium CG10_big_fil_rev_8_21_14_0_10 _35_13 sequence
MKLSVVILSKNEEKNINNAIESASFANEILVIDDNSTDDTTTIAVKAGAKVIRRKLNNNFSSQRNYGIQEAKGDWILFLDADEIISKELQKEIGKTLNNSKNSVYYIKRRDIFWGRGLKYGELWNSYRKGFIRLVKKDSGLWKHPIHETYDYKGSFGRLDGFINHYSHNGIKDFIQKVNKYSSIRAKELNNRGNSTNIFKIFIYPIGKFKVNYLFKLGFLDGIPGFIYAFMMSFHSFLVRAKLYQYTKLSSK

SEQ ID NO: 1015 - protein, 261 aa, Pricia antarctica
MGDRKKKITAVLITFNEIFHIDGVLDNISFADEIIVVDSYSTDGTAEKVRERPHIKLIQRPFENFTDQKSFALDQASHDWVLFLDADERVTEALKDEIIETVNLEKPPANAYYFLRTFMFKDKVLHFSGWQSDKNYRLFRKSKVYFSEERIVHETLVINGKSGTLKNKLIHYSYKCYEDYKGKMIKYGQMKAFEEMDKDYSPNLYHFWFRPFYKFVNHYIFRLGILDGKKGIIICYLNALGVHARYKELARLREKNVRSEK

SEQ ID NO: 1016 - protein, 261 aa, Vibrio xiamenensis
MNKPTLAVALIVKNEQKHLQACLETVHDWVDEIVILDSGSQDQTESIARQFTDKFFTNLDWPGFGKQRQLAQSYVSSDFVLWLDADERVTPELKQSIQDAIANHTPQTVYRVNRLTTAFGKQIHHSGWSPDWVVRLFKTNETQYNDALVHESVKVPQGFNTASLSGRLKHFTYEQLHEYTRKTHQYMQAWADQREGKKSSSLLGAILHGFFRFLKMYVLKKGFMDGKHGLLLAILSANTTFTRYADLWLRDYVKKHRKDQE

SEQ ID NO: 1017 - protein, 309 aa, Anabaena cylindrica
MSSKIPVSVLIPAKNEEANLPACLTSLAVADEIFVVDSQSSDRSIEIAESYGAKVVQFNFNGSWPKKKNWSLENLPFRNEWVLIVDCDERITPESWAEIAELIQKDECNGYYINRRVFFLGKWIRHGGKYPDWNLRLFKHQKGRYENLNTEDIPNTGDNEVHEHVILEGQVGYLKHDMLHEDFRDLYHWLERHNRYSNWEARVYFNLLSGKDNANTIGANLFGDAVQRKRFLKTVWVRLPFKPLLRFILFYILQRGFLDGKAGYIYGRLLSQYEYQIGVKLYELSSCGGQLNTANISESTSSTLSQEVG

SEQ ID NO: 1018 - protein, 351 aa, Paenibacillus dauci
MIVKNESAKIQRCFDSVKLLVDEIIVVDTGSEDNTKDIALSYNAKVFDYVWNDNFAEARNFALEHSTGEWNLVLDGDEYIQRESWEEIKAFTKGPLRIGRIKQINIFEQDGELKESQALISRLLPRNIRYSGSIHEQVESQGLQRVNTNINVYHDGYFQTNKTERNVQLLKTALKSNIKDAYILYQLANEYRINTEYKKAEIYFERSYALVRPEDGFKPVLVVGYLYNIIAMKDNIEQGLTIIEKEQHHFYDYPDFYFVCGFYYMELVFSNIQKYISYFSYIEKFYLKCLEIGETNKYDSVKGTGSFRAAYNLGVYYETTGNLENAINYYQQSAALGYEVAMQRIIKLKGN

SEQ ID NO: 1019 - protein, 259 aa, Vibrio ishigakensis
MATIGILLITKNADKTLNKCLSSIQDWADEIVILDSGSTDQTLEIAKRYTQNIHVKTDWEGFGIQRQTAQSYLSADWVFAIDSDEVVTPELKESILNAVKTSDLKTCFSVNRLTWAFGKFIRHSGWYPDRIVRLYPRNHTTYNNSQVHEKVIVPNNTKIIKLNGDLLHYTIDSLTQYTSKTNLYIRSWADQREGKKRSSLGKAISHAFFRFFKMYFIKLGFLDGKHGLLLAVLSANTVFTRYADLWVREISKRNENINL

SEQ ID NO: 1020 - protein, 258 aa, Unknown
  Description of Unknown: Candidatus Omnitrophica bacterium sequence
MNKLSASIITYNEEKDIRGCLEGLSWVDEIVVLDSFSNDKTIEICKEFNKVKIYQVEWHGHIKQKNIALSKTSHEWVISLDADERLDPELKQEIVEIMRKDVSKFNGYCMPRISYYLGRWIKHSGWYPNYQLRLFRKSQAYWGGRDPHDKIILNGGCEKLKGHILHYPYKDLDEHLQKISNYTFIMAKSDYECGKKPNLLKIIFLPVLKFIDMYILKAGFLDSTPGLIAAFMGGYYVFLRHAKLLTMDVKLEDNIVAK

SEQ ID NO: 1021 - protein, 273 aa, Unknown
  Description of Unknown: Candidatus Pacebacteria bacterium GW2011_GWB1_47_8 sequence
MKVNVTAIIIARNEAAMITECLRTLSWCREVLVIDDSSTDQTAQQAENLGARVVEFSHPSFARKRNEALKHAQGDWLFYIDADERVTPTLAKEILVHIETDAAPVLRLARENFAYGHLFQHGGWQRDFVTRVFKKNALQRWTGEIHESPQFIGAVKTLRSPLLHLTHRSTEENLRKSADWTKLEAELLYKAGEKPVTFFTLLRKGGMEFFRRAIIQRGYRDGLAGLIEALAQGINRVTVYIQVWELQQKPPLSERYQKKDQELRQWWRKEKGI

SEQ ID NO: 1022 - protein, 245 aa, Aequorivita capsosiphonis
MPKLTVIIPTFNEEAYLEDALFSVSFADEIIIIDSFSTDKTPEVAKRYATKFLQRKFDNFSNQKNFALKEATGDWVLFVDADERVTHSLEAEILESIENPKHAGYVINFPHFYMNRFLYHHSDDVLRLVKREGAHFTGTVHEKLHCNGSVGKLQNKMLHFTYKGLRNYINKKESYAWFQAENLFEKNKKTTWFHLVFKPGYRFFSSYIIKGGFRDGIPGLTVAAVNAYGVFQRYVKLLLLQKGMR

SEQ ID NO: 1023 - protein, 262 aa, Unknown
  Description of Unknown: Chryseobacterium sp. G0201 sequence
MPLSLAVITYNEEDNIVRFLDSLIDTVDEIIVVDSFSTDKTKEICTQKYPQVKFFEKQFNGYGEQKNHALTLCSNEWILFLDADEVPDEDLKKSIKKIISSDSPEFNVYKTKFNNHLGIHLIKYGGWGNVCRERLFKKSCAQYSDDKVHEFLITDEKKGLLEGKLDHYTYKSIQHHITKINKYSDMMAEKMFEKGKKIKRFKIIVSPIFEFIKVFIFKLGILDGFPGFYIAKTMSYYTFLKYIKLYEKIRLIEIEKKHGKIL

SEQ ID NO: 1024 - protein, 232 aa, Unknown
  Description of Unknown: Bacteroidetes bacterium CG_4_9_14_3_um_filter_41_19 sequence
MTKLSVVIITLNEERNIARCLNSVATVADEILVVDSISTDRTKEICQQYRVRFVEHPFEGYIGQKNYATRLATHNHILSLDADEALSDTLKHSISEAKKHFDADGFTMNRYTNYCGKWIKHCGWYPDVKLRLFNRTKGLWGGINPHDRFIMEKGSTFSHLEGDLLHYSYHTESDHHRQIDRFTDIAARAYYEAGKKPSFIKQWASPLAKFMRDYYFNLGFLDGEAGLKICLL

SEQ ID NO: 1025 - protein, 258 aa, Bacteroides helcogenes
MKISIVINTYNAEKHLKEVLESVKGFDEILVCDMESTDHTIKIAQEYGCKIVTFEKKNYNIVEPARQFAIEQTSHSWVLVVDADEVVTKELRDYLYANISREDCPDGILIPRKNYFMGKFMHCYYPDHILRFFKKEKTYWPPIIHVSPEVKGTLYKIPPKRKELAFEHLANDLVSDIVRKTNDYTENEVTKKAHKHYTVFALLHRPLFRFFKGYILKQGFRDGVPGFIRACLDGYYQFVMVAKILERQHRKGITAKQR

SEQ ID NO: 1026 - protein, 253 aa, Unknown
  Description of Unknown: Syntrophorhabdaceae bacterium PtaU1.Bin034 sequence
MRIPLSVYMITYNNGATIEKALASVADWASEIVVVDSESTDGAKGIISKYTDRLYQLMTTNQAEKYGYAQSLCTFPWVLFIDADEWLTAEIKQEIARIVTEGTEYDGFMVNRKNFYLGRVIAHGGWYPDHEIRLYRREKGRWEGGIHAKVHVDGKLGRLKNYYMHTPYNDIAHQIRTVDRYSGAFADDLRASGHTFHLFNMLGRPVFRFFRDYIFKAGFLDGVPGLIIVASTMYYVFMKHARLWELERKNGKV

SEQ ID NO: 1027 - protein, 309 aa, Planktothricoides sp.
MTLTPSKVPVSVLIPGKNEEYNLPACLESLKPADEIFLVDSQSSDRSQEIAESYGAKVVQFHFNGFWPKKKNWSLENLPFRNEWVLIVDCDERIPPELWQEIAQVIQNSDCNGYYLNRKVLFLGKWIRHGGKYPDWNLRLFKHKKGRYENLGTEGVRNTGDNEVHEHVILSGQVGYLNHDMIHEDFRDIYQWLERHNRYSNWEAKVYYNVLHGEAQNESIGANFFGDAVQRKRFLKKLWVRLPFKPTLRFILFYFIQLGFLDGKAGYIYARLLSQYEYQIGVKLYELIKFGGQLNRPQLTPNNSPTDAQ

SEQ ID NO: 1028 - protein, 251 aa, Unknown
  Description of Unknown: Chryseobacterium piscium sequence
MKLSVAIITFNEERIIEKNLSAVHNLADEIIIVDSFSTDSTQEICSKFPKVKFIQQKFLGFGKQKNFAIEQCQSEWILFLDSDEIPNEELINSIRKIISEPKPEFNVYNVEFNNVFLGETLKYGGWGNIKRERFFKKGHGKYSEDIVHESFITTENKGKLKGKINHYTYKDIYHHIEKSNKYTSMMAEKMYRNGKKSNIFKILFKPMFQFFKSYFLRLGFLDGLVGYYAAATAAFYTFLKYKKLHEIYKFK

SEQ ID NO: 1029 - protein, 264 aa, Maribacter forsetii
MITKKEQLTALVITYNEIGYIEKCIESVSFADEIIVVDSFSTDGTYEYLKGNPKVKVIQNPFENFTAQKSFALKQAKNDWVLFLDADEIVSDALQNEITETVSSDTEIAAFWFYRQFMFKNEKLNFSGWQTDKNYRLFRKSKAVFSDCKIVHETLDVDGTSGILKEKLTHYCYKNYEDYKGKMLKYGRLKAIESFYKEKKFSYSMMVVKTGWKFFNHYILRLGILDGKKGFTICYLNSLGVLERYKELKRLEQKNELAYYLVMP

SEQ ID NO: 1030 - protein, 258 aa, Unknown
  Description of Unknown: Candidatus Erwinia haradaeae sequence
MSTRQKLSVVMITKNSEELLSECLESVEWADEIIILDANSNDATMTIAAKYGVKIYQSNIWSGYGKQRQMAQNYASHPMIFMIDSDERITPQLRRSIDFVLTQPPAKIVYSVSRCNLFLGRWMRHGGWYPDRVIRLYPRCFQYNNNLVHESVECFHAKIKPLYGDLLHLTNQDFCTFQWKQCTYAKAWAMQHYQQGKHYGLLNIFYRTVWAFIRTLFIRASFLDGKQGWLLAVVISQYTFNKYTALWALNYTSRHKNT

SEQ ID NO: 1031 - protein, 262 aa, Unknown
  Description of Unknown: Nitrospirae bacterium sequence
MERNRVSAVVIAYNDEPNIRACLETLTWADEIIVVDSHSSDATEKISREFTDKVYQHEFKGFGRLRNEAVAHATHEWVFSLDTDERMTLELRDEVRGVLASGPRADAYFVPRRNYFLGRWIRHSGWYPDYRQPQLFHKDRMRYREEIVHEGFDLEGKASFLKEHVVQYPFRDVDHYLQKVNRYAGLMAHRMVEQGAPFRTHQLVTHPLFTFAKMYVARLGILDGMPGLILAGLYAYYTFLKYARLWEMSVDRTLSVPGRRAL

SEQ ID NO: 1032 - protein, 455 aa, Unknown
  Description of Unknown: Lachnospiraceae bacterium MD308 sequence
MGKKAGKIKISQCMIVKNEEQDIRRALSWGKGIVSEQIVVDTGSTDNTVQIAEEMGAKVFHFEWCDDFSAAKNYAIEQASGDWIAFLDADEYFSEQDARQIPGLLKKIENASLKSGRIHLVRTALVDLNDEGEIFSVGQQDRIFRNMKGLRYKNRVHEVICFSSGQLPRCITVDLSIMHTGYRQSISAEKGNRNISLLKKSVEEDPENYDLWAYLGESYAGSDQAEEAIESMEHVIEHIAQNNASQIATSQNTTLNISEDRLLTAFAVWFSAVSFLPDTAVSSYEEQARRYYDVFLQIGKLFPDVEFYMGRFLIRIGKQDEAVKFLELALEKLEQYKGSASLRLSGRLDFVYNLLRLCYAQRGDAAKCVYYGTLSLRVNRYQEDTLTALTSLLQGDPNTAATQAYDFLAGLYKFDNLKDKLFVLKTAMKLGYSELEEVIRQNMTDEERGWLDGKR

SEQ ID NO: 1033 - protein, 279 aa, Prosthecobacter fusiformis
MMGLPVSVCIPVKNEEVNLAACLAALAEFDEVVVVDSGSKDATVRLAREAGATVLQFEWNGKFPKKRNWALQNHRFKHPWILFLDADERMNPSFVAELKDTLRNTTHVGFWITFNNWFMGVPLRHGDVFHKLSLFKVGAGEYERFEEDSWCHLDMEVHEHPVLDGTTGEMKVRLEHQDYRGLKHYLSRHNEYSSWEANRYLWLQSAGEDEWKNLTGRQRFKYQCLGRWWLAWLYWGISLWAMRGFLDGRLGFRFAELKRRYFQEIRLKIMEAKRTGKPA

SEQ ID NO: 1034 - protein, 248 aa, Parachlamydia acanthamoebae
MISVTILTKNSEKYLREVLEPLSPFDEVVIFDNGSSDQTLEIAKQFSNVSIHQGIFSGFGPTHNHASHLAKNDWILSIDSDEIVTPEMIAEIKQTPLSDTCVYSFPRHNYFNGKFIRWCGWYPDRQYRLYHRKKTSFTNAQVHEAIQTDQLTKIALQSPLIHYSYGSLSDFLSKMQSYSELFAKQNQGKKSSSITKAILHSSFAFFKSYILKRGFMGGYEGFVISTYNANTAFYKYLKLYEANKSDKC

SEQ ID NO: 1035 - protein, 258 aa, Unknown
  Description of Unknown: Microgenomates group bacterium GW2011_GWA1_48_10 sequence
MTKLSAIVLTRNEETNLARCLASLHWCDEIIVLDDFSSDQTPLLAAKSRKAKLFRRHTNGDLAAQRNFALDKASGEWVLFVDADEEVSPVLAKEINGVLSGNKNMSGYFLRRRDSFWGRWLNYGETGNVKLLRLAKKSAGRWRRRVHETWHVSGRVGEMQNPLWHYPHPTIHDFLASINRWTEIDAGELTTEGKSFRFFRVFVNPTGKFLQNYILKLGFLDGLPGFVSAFMMSLHSLIVRVKQYDLATKPANPAAKTP

SEQ ID NO: 1036 - protein, 267 aa, Unknown
  Description of Unknown: Proteobacteria bacterium CG1_02_64_396 sequence
MSKMPISVAIIAMNEEEKIDECLASVAWAEEIVVVDSGSTDRTLEIARTYTDRVVHRDWSGHIDQKNYALSLCSHDWVLSLDADERVGPELREALLQLREQGPGDFQGFEFNRVTWYLTRWIRHGEWYPDPKLRLVRQDVARWEGTNPHDRLVVEGKVGRLEGDLYHQSFSNIEEHLDTIQSFSSIAAREAIARGRDATVFTMLGHGLFAVFRYYVLQQGFRDGIPGVIIAVLSGCAAFTKYAKIWAYRRASQGVMPQEKGGSGVEQ

SEQ ID NO: 1037 - protein, 256 aa, Hanstruepera neustonica
MPKLSAVVITYNEAPNIDALIENLAFADEIVVIDSFSSDDTLQKLQNFKHIKTYQNTFKNFPNQKNFALSKATYDWVLFLDADERLTNELRDEILKEISKPNNPIVAYYGLFQYFFGKKPIKFSGFQSAKSFRLFKKSVCKYDESRPVHEHLIVKGKTEVLSNKILHYSFRSYDHYKEKMTQYAILKANKLHKQGKTANPLIKYIKIYYRFFNHYIMRLGILDGKVGYQISKLNAYEVKKRYDELKRLNKMSLSKK

SEQ ID NO: 1038 - protein, 249 aa, Chlorobium sp.
MAEKITVTVLTKDSEATLRECLEALRRFDEVVVLDSGSRDRTLEIARSFPNVVVYEHPFLGFGPMKNLAVEKASNDWILSIDSDEVVSDELAEEILGMQLDEACVYAVGRDNHYHGRLINGCGWDNDRVERLFNRNGVRFNDKMIHEGLEIGDGVRVVMLGGRLKHYAYDNASQLIAKLQHYSTLWAEERKGKKRVTALQAFLYAAFSFFKYYVLKRGWLYGYEGLLISVSNANGVFYKYIKLYEANRR

SEQ ID NO: 1039 - protein, 352 aa, Thermosipho africanus
MKKCLLSVAMIVKDEAHNIRRALESIKDIADEIVVVDTGSTDKTPEIVREYTDKLYFHPWEGNFSKARNQSLKYPTCEWVLIFDADEEVKEDFKGIRNFLENLPNDVNTVYLPTLSYLDWDFKKTEIASTPRLFRNGTVYYKNIVHNQPVYKGKVINAPFTVYHYGYIWTRKLRMQKYNRTRTLILKHLENKDLNPVEKIYYLVQLYKTENISKYKNRKIEVGWKTLKEIEKIGQIPAIGLEFLFLFGMDALNKENLELAENLFNKAIEAVPKYPDPYYGLTGVYEKKDDLESQYKYAKLFLEKIEYAEKHPEEFEWTVIGFKHKGAANAIITKYFLKNKDKKTLNIILEKQ

SEQ ID NO: 1040 - protein, 249 aa, Helicobacter brantae
MKKKISVTIIAKNAQKTLFECLKSVERFDEVILLDNQSSDDTLKIAREFSNVKVYQSEFIGFGALKNLAISYAKNDWILSLDSDEVVEEDLLNEIENLNFELGKYYSFSRKNYFHGKWVKCCGWYPDRVKRIFNKTEIGYREKLVHEGLQTGKAKEIKLKGSVKHYTMENIDNILSKMNRYTSLSAKEMKERGKRGSAIGGIGRFVFVFVKDYFFRMGWRYGYRGFVIAWCNASGAMFKYLKLYEMEQK

SEQ ID NO: 1041 - protein, 257 aa, Unknown
  Description of Unknown: Chitinophagaceae bacterium IBVUCB1 sequence
MPKLSVVVITLNEEKNITRCLDSVKGIADEILIVDSHSTDNTVTIAKQYGANVISQHFLGHIEQKNFAAQKAQYDWVLSLDADECLSTELADSILAVKKNPTYDAYKFPRLNNFCGKWIRHCGWYPDAKIRLFNRTKGNWTGENPHDKWILNNKEKEGDLRGDLLHYSFNSISDYVKKVDKYSEIAARARADKGVKYSIFKIIIVPKWKFFADFVLKLGFLDGYYGWLACRLSAMETMIKYAKTRQYAQWKKDGKSY

SEQ ID NO: 1042 - protein, 523 aa, Unknown
  Description of Unknown: Bacteroidetes bacterium sequence
MPLNNLKKISAVIIVKNSEQVIARTLDSLKDFDEVIIYDNGSMDKTLPIAGHYKNVKIILGEFTGFGNTKNVAAEFAHNNWVFSIDSDEVISSQLYESINNVDLDNNSVYWCYRYNYYRKRRIKYSGWGKEEVSRLYNKNVTHFNKRLVHEGLELKNFNHVKLKGELRHYSYFNIADFNKKRDFYSDLFALENKGIRKSSPLLAFISGSFDFLNTYITKLAFLDGYRGLLIAISNAHETFLKHLKLYEANLKNNYKVSLIITSCGNKDALELCLKSALNQFILPNEILIINAKKDKESHELITEFAKKSFIPVSYFEDESQNNIASLRNKAISKTRHDYLIFVDSNSILHKDFIIDHISCAKRGAYIQGKLVKIKEELSLQLINTKQIKLPGLFSGNYKNIFKGVRLTFLSKFYCLVKKKRPNGVGVYNFSLFKEDIIKVNGFNEDYNEWSLIDREILERLCNKGVRRIDVRFRAIQYHLSKSDVGSESVNKLKTQIENEKNIWCNNGLDKYLPEILKESKMF

SEQ ID NO: 1043 - protein, 315 aa, Unknown
  Description of Unknown: Acidobacteria bacterium sequence
MILEDADIPARAPVSVLVLTRNEEANIAECLESLRWAAEVLVVDSLSTDRTAEIAEALGAKVCPHAFAGYADQRNWALQNLPFAHDWVLMIDADERIPGALAHEIRKAVSRSNDTYSGFYISRRLFFMGRWLRHGGLYPTWLLRLFKRQLARVEERPVNEHVIVNGRVGYLGQPLDHVDRRPLSDWVAKQNRYAGLQAAEYLREKSRKGFESSIRASLRGSQAERKRWIKLHVWNRLPLLVRPFLFFARNYFLKAGFLDGRAGFIYHVLWSFWVKFLIDVKVIERQSGVGRPGDTAWSLDHLGRGDSKSEKVTAS

SEQ ID NO: 1044 - protein, 276 aa, Unknown
  Description of Unknown: Bacteriodetes bacterium sequence
MSKLSVILITYNEEKNIERCLNSVSWADEIIVVDSFSTDATISLTKKFTSYIIQHKYDGDINQRERGFAAAKGDWLFYIDADEEVNDELREDILNVMRNGAATDGYYAQRRNKIFGRWMYNGGWFPDLTFRLFNKEKYLAEHEEVHGGFTVRGAKGTLNGFLNHYPYETIEQYLAKMNDYTSLQVSNKLKQPDGVNISWIKIIFSPLSHFIRKFISNKGYKDGLHGFVLAMLGAIYTFSLYAKCKEYEIRLREEKGILPPITNLELLIYKRPGFKE

SEQ ID NO: 1045 - protein, 253 aa, Unknown
  Description of Unknown: Chryseobacterium sp. ERMR1:04 sequence
MPELTEKVSGLMITYNEEKNIREVLECFDFCDEIVIVDSFSTDKTLEIAQTFSNVKIIQNTFEDFTKQRNLTIDNAKNDWILFLDGDERITPELRQEIIEELNKTDKKDAYYFYRKFFFAGKPIHYSGTQTDKNFRLFRKSKSRYISDKKVHETLKVEGTIGELKNKLLHFSVNDYESYKKKMIHYGVLKGQELSAKGKQFNLLTQYSKTLFKFFKAYILRLGILDGKEGYQLSYLQSLSVFKTYESLKNVQN

SEQ ID NO: 1046 - protein, 252 aa, Halanaerobium sp.
MNNLTALVLTYNEEDNIAACLDSLMWVPRVVIVDSLSSDKTEEICLRYNNVKFFERQFDDFASQRNYGLEQIDTEWVLVVDADERITNSLQEEIKKTLSNPEAEGYNIARKNYFLGKWIKYCGWYPDYTLRLFKSVYRYRGLVHESPEIKGEIGKLDNDFIHYTYSNLKEYVDKMNQYTSLDAKKKYQKGKKIGVSYILTRPILEFIKKFFLKKGFLLGVQGLILSLLSSYYQFLKSIKLWELNNIFEDEIK

SEQ ID NO: 1047 - protein, 259 aa, Desulfohalobium retbaense
MNRERVTGLVLTFNGERVLEQTLASLAFCDEILVVDSGSTDRTLAIAEAAGARILTRAWEGPGPQFAFAFEQVRTNWVVSLDHDEYCTPELQEEIQGVLANPGEMAGWYCPRRSFYFDRFLAHSGWYPDYLLRVFRLERMELKISMPHYSFHPQGPTGKLQGDIVHYPYSGLAEHLEKINSYTQSAAEDKFARGERAGLGKALGHGLARFFKIYVLKRGFLDGRAGLILALNGFFYVFHKYIRVAELGKEEKKKGSVKF

SEQ ID NO: 1048 - protein, 309 aa, Leptolyngbya sp.
MFSIYILTYNEEIDIAACLESALLSDDVVVVDSCSSDRTLEIAAGFAERHPVRIVQHAFESHGKQRTWMLESIPPKHPWIYILEADERMTPALFQECCRVIQSDERVGYYVAERVMFMNRWIRRSTQYPRYQLRLLRHGKVWFDDYGHAEREVCNGPTGFLQETYPHYTCSKGFSRWIDKHNRYSSDEAAETLRQLQQGTVNWRSLFWGASEVERRRALKDLSHRLPGRPLLRFLYMYVGLGGWRDGGPGFTWCVLQAFYEYLILLKVWELQHAAAPPQAESGFAKSRVDAAMQQPEAVESGDRPSPRI

SEQ ID NO: 1049 - protein, 248 aa, Unknown
  Description of Unknown: Candidatus Rokubacteria bacterium sequence
MKRLSVCLITANEEDRLRPSLESVAWADEIVVVDAESTDKTVMIAREFTDRVVVRPWPGFAAQKNFALDQATGDWILSLDADERVTPELRARVEDILRADGPAAGYAVPRRNIFWGRWVRHGRLYPDRQIRLFRRGRGRFVDVEVHESVRVDGPVERLEAPLLHASYRDLSDCLTRFDRYSTLAAEDWIRRGRRVTIAGIALRPPGRFLSMYVLHRGFLDGWRGFVLAALYAHYVFVRSVKVWEKTKA

SEQ ID NO: 1050 - protein, 962 aa, Selenomonas ruminantium
MRISACYIVKDEEQNLGKSILSLQGIYDELIVVDTGSTDNTIAIAQKYGAQIDYFTWQNDFSLARNFTLSKATGDWIIFLDADEYYDCSLSIRDYLQEVDAKYPQKDAVIVPRYEAHQMKNPPIHVPRIFRNRPDIYYQGVIHEQLKKKDGDIDYIFAENMIFIHTGYHPDNMERKSQRNLQLLLADVEQNGERDAYYYYIAESYFGLQEYEKAIDYIKKAIASPVRHYREEANYYHILLESMRQRKYPAEEMTLVAEQAIKKFPDMPEFYGEQGIILSSMGRYGEAYRMLSQCIDKYEFTEREKNDYGYFNAESMGIIYARYARIAMMKGRQDAAKIAACYAACISKEKWGGAEKTEIARATGIAPDQEVIICIPVYKKELSPFEKASLKQLNHVLGKYPRVFVAPASLEFDYQEYAAGVGIERFPDYFFNNVTSYSALMLNVEFYQRFTQYKYLLIYQTDAFVFSDRLKEFCAMDYDYIGAPVSRFNPVWHAIDAQTGNGGLSLRKIASAIRMLRQWNDIMKGSPFVNLFMQWEDLFWGYCGRQKTLFFKTAPLKIAAEFAVQANVAHAHKRMQQGWRPFGCHDWYNLDYDFWQEIIESYGFDFSKIPHSGKEAYPRMKLYLATRSTVNMRILWGAYRNGTLNKALSLLDDWLLRYKEGHSGWYHNMEELVCMWRAVEYEDKYNKLWKELYLRKLSIGINRGINDNNFSPILWNLLVTLIPHLCKYDYVEMKTLIAEIESGWWKFWTGNSCYQKCIPEANKKIIAVVTVADESDVVESFIRHTLTFTDAIIIDERFATESVQNILHKLENEGLPLILHKKSLNIHDFDADVDYILKLKATDFILPQESMNYVRQIIEKLPAKQTYAIATGLFAPYQPYANRDKFILARPLVRLDKKPVITEAINIQKENGGDIAIADKLYIARFGQIDTKGLDYGIIPADTELLDISAYIVNQHLQYTGG

SEQ ID NO: 1051 - protein, 392 aa, Rhodopirellula sp.
MNPGRVHVLIWGQEYCWDAGLWQALAPWSPRALSLGKWSRAIRLRFSRSENSAMSSSETAWRYGAAETRPQAVAKTNPDERLLSSETPRAETLDSQRHIATVRNGLSAVVLAFNEARNIRRCIESLSWCDEVLVVDDCSTDATREVAESLGARVVQHRFESFAKQRNWALQNADLQQPWVLMLDADEVATPGFANEAQIAVNEAASDLQAICICRKTVFMGKTLHHADGFPVWIMRLVRNGMAAFEDLGHGERPVPSGVGTPKLIREPLLHFAFSRGMDDWWNRHVRYAKREAIRESNEGRDRCWRDLFAADSWKRRRQLRALTACLPGRGWMRFLYQYIYKCGFLDGTAGLQFCRMMACYEAMISVRRAETHLLSDSEQHSDFFSEPVTRA

SEQ ID NO: 1052 - protein, 304 aa, Unknown
  Description of Unknown: Candidatus Pacebacteria bacterium CG10_big_fil_rev_8_21_14_0_10 _36_11 sequence
MTNKLSVLIHTKDVAETLEKTLSSVKFADEIVIVDMESSDDTLKIAKKYTNNIFHHEDVGYADPARNFAISKATNEWILVVDADEVISEELREIILETINNKDSADIYHLPRKNFVFNKWIMKTGWWPDYQPRLFRKGTVSWQVGVHRLPDMTGTQEKFPAEEKYAIEHANYIDTSHFIKKLNHYTSIQAIERLDTNKQNKEQYSTNKLFEIFANELAKRSLMMNGTEEGLHGTSLSFLQATYEAVIYLKQWGETGYKETKPEDFGATLNHIQKIWRYWWADYKVRHSSGLTSIYWRIRRKLYL

SEQ ID NO: 1053 - protein, 268 aa, Desulfuromonas sp.
MNLSVAIITFNEENNIQACIESVQDVADEIVVVDSFSTDRTEEICGGFPKVSFHKNPFDGHVQQKNVAIEKCGGDWILSVDADERVTPELRDSIMEFLRSSPSKEIAGAKFPRLTIHMNREIRHCGWYPNARYRLFRRGRAHWGGENPHDKLLLDGSGVMLKGDLLHYSFDDLAHQVQTINSFSSIAALTRFNKGRCFRLWRLLFKPVSKFVEIYLVKRGFLDGLHGVIIAVSSSYSSFLKEAKLFELDQVGADKPSNLPDRYRKLRK

SEQ ID NO: 1054 - protein, 260 aa, Hydrogenivirga caldilitoris
MNRFTLSVAIITYNEEDIIGKTLESVKDIASEIVVVDSGSTDRTREIAESYGAKVYIEEWKGYAAQKNSALEKCTQEWVLFLDADEVVSEELRRSIIEELKNPKAEGYLINRRTYYLGKFLKYAWQPEWRLRLVRKEVDPIWESEPHEFLKIKSENIAKLEGDIYHYSYRSLRHQAEKGISFAIDAAVVKYSKGKKVSAVDIVFRPFWAFFRELFFKRAFLEGYRGIIISFMASFYTFLKYAFLFELEMKEKEGKNLWGR

SEQ ID NO: 1055 - protein, 254 aa, Lewinella cohaerens
MARSLSVIITTYNEADNIARCLESILELANDILVVDSFSTDKTVEIARRYPVRVLERKYLGPANQKNWAIPQAKHQWVLLLDADEMATPALCAEIKRLLVADQAPAADAYWIGRDNYFLNQQIRFSGWQGDRVIRFFHRDRARYNELQVHEEIATDGITVGSLNERLDHYTFRSLDHYLDKTRRYAHWSAQDHSKRTARVGYFHLLGKPFFRFFKHFVLQQGFRDGKVGLMVSAIMAWGVFLRYAFLLEQQKNK

SEQ ID NO: 1056 - protein, 266 aa, Unknown
  Description of Unknown: Candidatus Magnetobacterium bavaricum sequence
MQDNKAPDKLPVSVVIVTKNEELNIAGALQSACMAQEIVIVDDYSTDRTIDICRAYNARIYQNHWQGFAPQKQFAIDHAQGPWVFLLDSDERLTPELVQELHQVIAEAGAHFEPGAALSRGSLTPRPSCSGKEAAYDGFYVPRKNFFLGKWIRHSGWWPDNTLRLFKKDRAHMHQRQVHEKVLLDGRAGNLRNPIEHYSYRDISDFIKRMDRYTTLAAEELARTTVKSYTFAFKISLRLIWDFLAKSTAPSDLWTAYRTPLYMMML

SEQ ID NO: 1057 - protein, 258 aa, Unknown
  Description of Unknown: Sphingobacterium sp. ML3W sequence
MNYNRTTVDQKISALVITYNEEKNIQDVISCLDFADEIIIVDSFSKDNTINIARQNSKVRVYQHKFEDFTKQRNIAISYAKHDWILFLDADERLTKPLQKEINETINNPRALDAYYVYRTFFFCNKKIRFSGTQNDKNFRLFKKSKAKFCTLKKVHETLNVNGTTGILEHKLLHYSFSDYKSYKDKMIHYGVLKGQELYSNHKRYNILTHFGKTSFRFFKAYIIKLGILDGKHGLDLSYLQSLSVHETYVSLKRKEQV

SEQ ID NO: 1058 - protein, 272 aa, Unknown
  Description of Unknown: Verrucomicrobiaceae bacterium TMED86 sequence
MLPISVCIPVLNEEKNLPGCLESLKGKFSDVVIVDSGSTDATLSIAEKANLTVLSFKWNGAFPKKRNWALQNHSFKHEWVLFLDADERITLAFLDELKSKLDSKMVGFWLRYDNWFMDRQLHHGDVMRKLALFKPEAGEYERFPEDFWSHLDMEVHEHPVLDGPTEEIFSPLEHHDFRGLESYIAKHKEYAAWEAKRYQWLQSDPEAWTSLNKRQQFKYRHLNKWWLGSFYFLISYFLKKGFLDGRVGFRFSWMKKGYFEDIRRRILTSKTS

SEQ ID NO: 1059 - protein, 299 aa, Unknown
  Description of Unknown: Candidatus Parcubacteria bacterium sequence
MAQEVAGCPVSAGKVSVYVLTYNEEKNLRECLESAKLVSDDIHVVDSCSSDKTLEIAEEYGCYIHQRKFDTFARQCNWALETIPFKHEWIIRLDADERIPGSLAEEIQEYAHTLGEDVTGVMFKKRLYFMGRWIRYGRMYPMLRLAMFRKGSGYYEDKEEEQYVLTRGRYITAKHDFYECNQNNTLPFFTMKHLDYAEDEVKEALDEELDHEITPKLFGNKIERTRWLKVHVYSHVPLFVRPWLYFFYRYFFCLGFLDGIPGLIFHTLQAFWYRFYVDARIYEMRSNWREKRLNFEDIR

SEQ ID NO: 1060 - protein, 288 aa, Lysinimicrobium flavum
MIRLPISAIVLTKNEAEGIAECLRRLENFDEVIVVDSHSVDDTAAIAQEFGAKVVQFSWDGTYPKKKQWALENSGARNNWVLLLDADESPTAELIDELHARTDELQAGTFGAYDLVLHYKFAGRFLDHGHRVVKRSLLDTRVCRFPEVDDLDAPGIREVEGHYQPQSEKPIGRLRGRLSHDDKDPVGTWFDRHNRYAEWEAHLLATPGTGEHVAANRSTLGRVWARVPAKPLVFFVYSYVIRLGFLDGRAGRDYAIALSGYYWQIGVKYREQTRLRSTQVVAHVGAEG

SEQ ID NO: 1061 - protein, 262 aa, Legionella taurinensis
MLSVIIIAKNEAANIQRCLESVKWADEIIVLDSGSTDQTVEIAKKYTDNIYLTDWQGYGVQKQRALSVATGDWVLNLDADESVSEGLKFAIQQAMDLNEADAYRIPIYMNFYGKPMRYSSSPKRHIRLFKREGARYSDDIVHEKVVLPPEAKVEKLKQSILHHSYQDLSHAIAKMNRYSSYTARSRRKEGKPPSFISILFSAGWMFFRCLILQRGFLDGKEGYILAVLNAEGSFYRGVKQLYPDRRISDLPDTKEIKKEENG

SEQ ID NO: 1062 - protein, 309 aa, Paludisphaera borealis
MNTPCLDETTDQDRAARPRTARAPVSVIVPVKNEAENLRRCLPALDWADEVIVVDSQSTDDTCDVAVELGAQVVQFQFNGVYPKKKNWALENLPFRNEWVLIVDADEVVVPELAEEIATRIESGEAEGYYLNSKYFFLGRRIKHCGYSECWNLRLFRHRLGRYERMPDHTGGRSGDNEAHEHVELDGRVARLTHELDHHAYPTIAAWVEKHNRYAVWEAAMYERFLNEPVPATIGRGKALKRRLKKLYLRLPMRPFIRFVYAYIFRLGFLDAKPGLVFCTLLSFYDFLAWANVYEQKIARANELKSSGR

SEQ ID NO: 1063 - protein, 660 aa, Carboxydocella thermautotrophica
MNNSTITACLVVKNEGKYLERCLSSIKPAVEEIVIVDTGSSDNTLEIARRFTEKIYIQPWQDNFSQVRNFALQQATGDWILVIDGDEELHPDSIACLRNKISATEVEGYLLKIINYFNSGSEVLTAADVVFRFFRNRPQYRFTGAVHEQICDNILAVNPTAKIEIAEDIVLYHYGYLDEEIENKDKRQRNLRLLLKEVDSNPDHLLNRFHLGVEYFRAREYTEALSQFRLVQSRLAPQALYAPKLYRYIASCLLHLKNYQELLDFIEQEWRPLFPQQGDLYFIHGLVLKELKQPALAITSFRQCLQLPPQPAFYANVYSCQVDKVNYHLGELAEYFQDREGALKYYLTALQHNPNLVPALARIIAILEPRKYPQETMTDLEKVFDFSEPSARLLLGRLLFNEKAYQLALACFEQALSQLEDGPENIIWLAGLCQLKLGNILAAQSLFGRLSPAGSLFLSAQYHLILWYWVYGHRKHALQTLRNLQQFLSPTACLLHLLVYGYLPPTSSAAIEGEWQQAAWELLVQIAEYQKLKKFWQARKRLKPWLPPEPDLAWVELYLQQGWGAQAEKQARQLVSQSPDPYLKYLLAKSCWLQGKLAEAEQFMVKAYQQGYNEPRVARELARLYQELALSVLRTELAISPQHQECAQLLARIEACLIEV

SEQ ID NO: 1064 - protein, 257 aa, Mariprofundus sp.
MADLSVYIIAYNEEEKIADAVNSVLWADEVIVADSSSSDRTAEIASALGARVVQLEFTGFGKLRNDAIASCTHEWIFSLDADERCTAEAAEEIRRIINADDSADAYFTPRKNWFMGRWIRHCGWYPDYRQPQLFRRGALLFETGDKVHESYRVNGTTAHMQAAIWQFPFRNMAQALDKANRYSSLGVDRLEAKGARAGMGHALLRGLWSFFRIYILKLGFLDGWAGFVIAFSNLEGVFYRYAKLCERKYGWDRPPQS

SEQ ID NO: 1065 - protein, 295 aa, Achromobacter sp.
MQKIPISVVVMTKNEERNIVKCLKALADFDEVFVVDSNSTDATCVLAESLGAKVCNFQWNGKYPKKKQWCLESLPFSHPVVLYVDADEEMTPALAREIRDCLPRFAAGAGGAFVPFDYVFCGRKLEHGHRVYKLALLARERSRFLDYDDLDVANMWEVEGHYQPQVQGETFALRNRMVHNDHDTLFHYFDKHNRYSDWEANLRTKGLMNDPREANVGARALLKRIFQAMPFKGPVSFLHSYVFRLGFLDGKAGFDYAIARALYYWQIRIKTEEIRKERQAALGRAKGETVAGAAK

SEQ ID NO: 1066 - protein, 254 aa, Unknown
  Description of Unknown: Fusobacterium mortiferum sequence
MKLSVAMITMNEERILEKTLESVKDIADEIVIVDSGSTDRTEEIAKKYGAKFYVESWKGYGPQRNSAIDKASGEWILNIDADEEISPELQKKILEIKSSTDDRSVFNVNFTSVCFGKKIRYGGWSNSYHIRLFKKSVGRFNGNTVHESFETNEKIYTLKEEIYHHSYSTLGDYFTKFNRYTTEGAIEYYKRGKRCNIFQLAFNPVFKFLRMYLLRLGFLDGKEGFLLACTSSLYTMVKYYKLYEITKNGSYIKK

SEQ ID NO: 1067 - protein, 269 aa, Unknown
  Description of Unknown: Candidatus Roizmanbacteria bacterium GW2011_GWA2_35_19 sequence
MNISAVVLTRNEVKNIKKCLDSLDFCEEIIIIDDFSTDKTTEIIQNLKSKVKIYSRKLGGDFAAQRNFGLSKAKSDWILFLDADEEITPELKKEIANNIKSENSTEAFFLKRRDYFWGRELRHGELAKVTSKGLIRLVKKDSGKWMGNVHEVFHTARNCKTLNGHINHYPHPTLSEFIKDINKYSTLRAHELQRRGYETNLFKIVFMPIIKFIFNYFIMLGFLDGAAGFTYSFMMSFHSFLVRSKLYQLNYLGHPESSEGSSDEGSANN

SEQ ID NO: 1068 - protein, 246 aa, Unknown
  Description of Unknown: bacterium BMS3Abin06 sequence
MFPVSVVIVTKNEEINIEDALKSVADAKEIIVIDSFSSDRTVEICRKYTGRVYQHEWQGFAGQKQMAVDYAEGPWVLILDADERVTPELKAEIMENIANTDCSGFYMPRENYFIGKWIRHSGWWPDNTLRLFKKDKGHLEPREVHEKVVIQGNTGYLKNPLRHFTYRSVSDFAERMDRYSTLAAKEIRKNSGRSGLFSLTIKPFATFIKMYVLRLGLLDGTRGLMLAVLYSYYTFLKYAKTWEKQG

SEQ ID NO: 1069 - protein, 264 aa, Unknown
  Description of Unknown: Cellvibrionales bacterium TMED122 sequence
  MOD_RES (13)..(13): Any amino acid
  MOD_RES (51)..(51): Any amino acid
MRRPISCFVITCXEVDRIEQCLQSVVGWVDELLVIDSGSTDGTLEIARRYXDRVYETDWPGFGPQRNRALNWCTHDWVLSLDADEVVTEALQKEVDKVLSEADLNDNFLKFPWHTYLFGKPLKHGRYATPQGKLFEKTGAQFKDRSVHETLLLPDYRVRALKSPLIHHSWRDYQHVIEKHLKYGVLGAQEKSKVGRKSSILYAFARSIIDFLHQYVVRGGFMDGQRGLLMAVILSQYAFHKYAALWTLDQALIHENSTSDSSTS

SEQ ID NO: 1070 - protein, 348 aa, Longicatena caecimuris
MIVKNEEDVLARCLDCVKKFADEIIIVDTGSADKTKQVAKKYTDKLYDFSWCDDFSKARNFSFSKASMEYCMWLDADDVVENEDIEKIQKLKKELDKKVSIVMMKYHTAFDEDGNPSFSYYRERMVKREELHLWEGEIHEVIPLTGRLLYTDIGICHRKVHVSDANRNLRIFEAMLDKGKKLNPREQFYYARELYYHKRYKDAVKAFKKFLKEDSGWIENKIDACEMLGYCYYALHKEEKALESFLCSLQYEVPHAELCCDIAKHFMDRAKYKEAIFWYECAMKVPMNETSGAFIREDCYGYIPAIQLCVCWWRLGDKDRAVQYNELAGVYKPKSREVEQNRRFFEMK

SEQ ID NO: 1071 - protein, 258 aa, Unknown
  Description of Unknown: Omnitrophica WOR_2 bacterium SM23_72 sequence
MKEKFPLSVVVLTRNEEARIAECLESVSWADEIVVVDDESSDATVAIAKRYTDKIFIRKMDIEGRHRNWAYAQAKNEWVLSLDADERVTKELQEEIKRVLEDSPQEEGFTIPIRNYIGTYWVKYGGWYPAAKLRLFQKGKFHYEEVEVHPRAFMEGSCGHLKSDIVHFSYKNLEEFWNSLNVQTTREAQKWYNQGKPMRLGRFIWRTIDRFLRTYIRKKGYKDGLIGFVVAFNAGLYQFLSYLKYQELLLNAKLRQNS

SEQ ID NO: 1072 - protein, 264 aa, Unknown
  Description of Unknown: Flavobacterium glaciei sequence
MNLNLAPKISVLVITLNEEANMQALLVDLGFADEIIIVDSYSTDKTKSIAQSFSNVKFIENRFENYSSQRNFAISQAKNDWILFLDADERLTTELKEEIIETLQNNKTYSAFLFYRIFMFQNSVLHFSGLQTDKILRLFDKNFAKYSNNQLVHEKLIVNGKIGVFKNKLLHYSYSDYQSYKYKATRYGKLKAQEKFIKKHKPSFLLHIVHPSYNFLYNYFIRLGFLDGKKGIIICYLNAYSVFVRYQELKLLWGNRNLISRKNI

SEQ ID NO: 1073 - protein, 314 aa, Planctomyces sp.
MSGTKCPLSVIILTGNEERNIAECVADLDWADDVIVVDSYSTDATLEEARRARPDVRIFQNPFEDFGQQRNWALDKTGPRHGWILFLDADERCPPAFAEAIRRTVADPGEKVGFFLCYRNMFLGQWIKRSTFFPSWQLRLLKQGEVRYRKEGHGQRELTDGPLGFIQEPYDHYGFSKGVADWIARHNQYSTDEVELILRLAAEPLQLTDLLRRDPVVRRRCLKRIAARIPLRPMTRFLYSYIVRGGFLDGLAGWHYCLLRASHEIHVQAKLVECARQQESQRTAGAADRFKDAGVDRLRESQASPLGESSKSPP

SEQ ID NO: 1074 - protein, 272 aa, Unknown
  Description of Unknown: Ignavibacteria bacterium sequence
MERLSVVVITLNEEKNIERCLRSLRWADEIVVVDSFSRDRTVELARKYADSIIEHEYDGDIPQRERGFAAASGTWLMYVDADEEVSDGLKDEILGVLTSRETRDGYEIPRKVFMFGTWVKHGGWYPDYTFRLFRRDRYRALQAEVHGGFTVDGETGRLSGLLNHYTYDSIAHYLSKMNDYTSLQISGKIGGGGGRSAGARRLILSPLSHFLRKYVSKQGYRDGFRGFLLASLGAIYTLALYSKLWEYGFRDREGRGVRPPITNPEVRRLKGL

SEQ ID NO: 1075 - protein, 264 aa, Unknown
  Description of Unknown: Candidatus Wolfebacteria bacterium GW2011_GWC1_37_10 sequence
MKKSLISVIILTYNEEIHIERLLENIADWADEVFIVDSFSTDKTLEIAKKYGCKIFQHKFENQAQQFNWALDNLKIKNDWILRLDADEYLTSELKDEITEKLKNIPKNINGFYIKRRVYFMGRWIKHGAYYPIWLLRLFKKGKARSEQKTMDEHIVLLEGEAEKLKNDFIDDNKKNLEWWIAKHNNYSTRETADVLGGDYGQGKKKFYYRLPLFFRACAYFCYRYFIRLGFLDGKEGLIFHFLHAFWYRFLIDAKIYEYKNKNQ

SEQ ID NO: 1076 - protein, 264 aa, Muricauda sp.
MSTPKQKVSALIITYNEMGYIERCIDSIAFADEVIVIDSYSTDGTFEYLQNHPKVHVLQNPFENFTAQKSFALKQASNDWILFVDADEVVSNPLQKEILHTVNDPNACEAYWFYRDFMFKDQRLRFSGWQTDKNHRLFRKSKCKFTDKKIVHETLEVDGNSCILKERLTHYCYKNYEDYKGKMLKYGRLKAKEAFYRENQFNYLFMILKPAWKFFNHYILRLGFLDGKKGITICYLNALGVLERYRELKRLEKKNELAYYLVMP

SEQ ID NO: 1077 - protein, 261 aa, Prevotella sp.
MENNEHKISVVINTYNAAAMLEEVIRAAEGFDEVLVCDMESTDDTVAIAERLGARVVTFPKADHKSAEPARTFAIQSALCPWVLVVDADEIITAELRDYLYQRISQPDCPQGLYIPRKGYFMHRLFAYPDYQLRFFIREGTVWPPYVHTFPTVQGRIEYIPRRRRELALIHLADDSIRTRVYKTNEYTDNEVEKKRGKHYGAFKLVFDPLFRFVKAYFFKGQICKGVPGFINASLDAYYRFITIAKVIESKNAERDIRHRK

SEQ ID NO: 1078 - protein, 248 aa, Flectobacillus sp.
MISVTILTKNSEARLAQCLDALKGFDEVIVLDNGSTDQTLAIACQYPNVCVHEHPFLGFGKMRNLSVSFCKNDWILWVDSDEVLDPILIQNIQNLSLNPKHLYRFLRKQYYNGKYINGAGWGNDKVTRLFHKNSTQFNDKDVHEGLNTKGLQIVDIEGVIHHYSYETADQLLAKMNYYSTLFAVQNQHKKGTHPVIAYFKKTFHFWNYYLLKKGFLYGYEGYLISYCNAQGAFFKYMKLYEMNQKEKS

SEQ ID NO: 1079 - protein, 254 aa, Unknown
  Description of Unknown: Candidatus Shapirobacteria bacterium GW2011_GWE1_38_10 sequence
MNNISLLLLTKNEQDNLKGWSDWIHQLTAINEIVVVDDESTDSTVKILKSFFTKELSINIFKKKLENNFSDQRNFGLKKCQNDWILFLDADEVPTEKTINYLNHLSLKNGENYSFKRSVVYLGHTISHGQCLNDLPIKLFNKNEGKFINPVHEIWESTSTTIDTYQTILHYSIKSLTAFLQKINFYSSLRAQELFNQKHHPHLWEIIIYPKLKFLDLYFLRLGFLDGTAGIILSLSLSFNSFLVRSKLWHLSQK

SEQ ID NO: 1080 - protein, 251 aa, Unknown
  Description of Unknown: Nitrospirae bacterium sequence
MSKLSAYVLTFNEEAKIRDALDSIVWADEIVVLDSHSTDRTEQICREYTDKVYQCDFAGFGKLRNRALELVTHDWVLSIDADERATDELREEIQAELASGPRADAFFVPRKNFFLGRWIRHCGWYPDYRQPQFFNKHRLRYRDDLVHEGFDVMGRADYLRGHVLQYPFRDLGEYLRKMSRYSTLMAEQMASRGRRFHVHQLVTHPIFTFIKMYGLRQGFRDGMPGLILSLLYAYYTFVKYAKLWERGRASA

SEQ ID NO: 1081 - protein, 267 aa, Unknown
  Description of Unknown: Desulfobacterium autotrophicum HRM2 sequence
MMIDSRTDVKKKTLSVIVITKNEEDRLDQCLRSIQALADEIIIYDSGSQDSTLEIAAQYTDKIFETDWPGYGPQKQRALSSAKGDWVLSIDADEVVSDELAREIVGVLNQDPEEAAFRIPWAVINFGKRLDYGNSARSVKRLFRRKGASFTEAIVHEAVVLPPGSRVGKLKGRLIHYSIRDFEHYLMKNRTYSWLGAQKRFTAGKKGGGLPGAVFRAFWVFFRCYVIRRGFLDGQVGFLVAAMYSQGAFNKYAGLWTLQRMERINSK

SEQ ID NO: 1082 - protein, 304 aa, Unknown
  Description of Unknown: Candidatus Roizmanbacteria bacterium CG07_land_8_20_14_0_80_34 _15 sequence
MKLSLCIAVYNEEKNLHYPLDSAYDFVDEVVIVDGGSTDKTIQIAKSYGKKVRIINSDNPVMFHKNKQKAIEAAKGEWILQLDADEELTQELKQEIKDIIRYNQMESDKISQKETDSIRLNPISSNSIVAYNIPRKNWFLTGFLMKGGQYPDYTIRLYKNGIAKFPCKDVHENVEIINNLKSKIKNSESKEEKKINSQFLILNSKCNIGFLRNPILHYADPDFSRYLMRWDRYTTAEVERMPKDLKLSWFNYIIWKPKITFLMMYFRHKGFIDGFPGFVFALFSSIRFWVIYIKWYQRVHKVES

SEQ ID NO: 1083 - protein, 250 aa, Unknown
  Description of Unknown: candidate division Zixibacteria bacterium SM23_73_2 sequence
MDKISAVVIVYNSQDCLFRCLESLTWTDEIVVVDSYSQDDTKRIASNFTDKIYDVKWEGFGKKKEFARQKASFEWILSIDCDEVIPPELKSEISKAIKKDQGCDGFYIPRRSNFLGRWMNHSGWYPDYVLRLFKKTKGRFDQALVHEKVKVSGRLDYLKNPMLHYTDPDINSYLSKLDFYTTLSAKQLFQEKRKVVFWDLVFHPLGVFFKRFFLKKGFLDGTHGFLLAVLSSFQVFIKYTKLWDLQRIKG

SEQ ID NO: 1084 - protein, 257 aa, Selenomonas artemidis
MHDRSGKEDFVKIAVIILTHNEEAHIGACIRSAAFADEILVIDDESEDLTREIAAEAGARVISHLLAGDFAAQRNFALTQTTADWVLYLDADERVSPAAGETMRRIAEENPKAAYEIKRVNIAFGQKMRYGGHRPDLCLRFFPRDAVRWEGLVHERACTELPVRRLTGELYHYTYTSWDRYFQKFNQYTTLMAQRQHAAGKTCSFAKVLLDPPFAFFRFYILQGGILEGRLGFVLGAFHAFYTMAKYVKLYYMQAKD

SEQ ID NO: 1085 - protein, 293 aa, Unknown
  Description of Unknown: Microgenomates group bacterium GW2011_GWC1_33_28 sequence
MDTLKLSVVLATRNEEENITRCINSVKDIASEIIVFDEYSTDKTRELAEKSGAKVFLEPHHDIFHITKQKALEKAKGEWILQLDADEIVTPELAKEIGKVISSDGGPQGLLGGDSNKQKLFLRHQQLIEERDGKIGKDGGEIVGYFIPRRNMFLGKPLIHAGVYPDGVIRLVKNRFARFPQKSVHEQIELDGKVGWLNGDLLHYDSPTLKRYLSRLNRYTDLHAEELRVKKIPKNVLSFLKFTILLPTYYFLLLYIRHLGFLDGVNGFLWSFFSALHFPIAYFKFMTDNKNYD

SEQ ID NO: 1086 - protein, 247 aa, Unknown
  Description of Unknown: Candidatus Microgenomates bacterium sequence
MKLSVVILAKNEAEVIAKAIQSAKLLVPHEIIVIDDASYDGTVSIAKKNGAKVISHQKKDFSEARNFANFKALGDWILYLDADERISEELALEIKDIAAKSSEHGVYSIPRVNFYLGKKWPKVEQHVRLFKKSSLKGWQGNVHETAVIDGEIGFLKGNMLHYTHRNISEMVDNTNVWSELEAKLRFDAHHPPVVWWRFFRVMLTTFWDYYVAQGGWRVGSVGLIESLYQTFSIFITYAKLWEMQKKI

SEQ ID NO: 1087 - protein, 641 aa, Sporomusa acidovorans
MAKISACVITKNEAKNIQRCLQSVKNIVNEIIVVDTGSDDATVSIAERFGAKIFHYQWDNDFAAARNYALTQAKGAWIIFLDADEYITAETIKNVRPVIDKIHSNRKVDAIRCQMNNLEGIDGLLRSSNPSIRIFRNSPVIRYKGRVHEAIYKCGKPVNLINVTNQLIVIYHTGYTNKTIIEKIRRNTVILEAEVKSGVVRDLTYCYLSDGCWRNGQYEKSIEYAKKAIKQLARLSSELDYKPYVFLISSMTHLKTYSEEEVIANCNEAIERFPHHPEIWLFQGLYYRSIGRCEQALTSLLKAIETNACYSDFNRNNDFHALSPDAYLNVAQIYEMKNQSAQAFDCYTKVLQREKYNQNAFNGLVSIIRKQDPAEVIYFLNTLYNIAAEGDIRFLVTNLSHLKVKKVLDYYQQILLDKFGDNKLNGLVLLMNCKFENVFPVLADSFRKHGNYDMELLAVVSLLIGRRPDSMDLLGPQMKTSFRKIITAYFQIDSDIQLTDDDFPLFCDLVREMIYLASQQQMETLLQLGKNFFSDDAYTQISTILMQQRFFDYAVDMILNYINRASLEAKQLSLLYCDAGYCCYKLKDFAGASKYFSQALEFGYNRHYIFDFLEWSYQQCPDEAIKEKLMALKELYSNRNG

SEQ ID NO: 1088 - protein, 265 aa, Prevotella multisaccharivorax
MDQKISVVINTYNAELHLREVLESVKGFDEVVVCDMESTDHTLDIAKEYGCKVIKIARGDFKIVEPARNIAIQSATYPWVLVVDADEIVTPELRDYLYARIKEPDCPQGLYIPRQNRFMNMPMKGRVGDRQLRFFIREGTAWPPYVHATPHVKGKTARIPHLRNVMLRHLNESSLHTVIEKDNRYSDDEVNKRIDKHYGVFTLFYRPAFHFFKNYIIDGGYKNGVNGIIHATLKAFYQFILVAKVIEKREAGLSPSHADAAAPRP

SEQ ID NO: 1089 - protein, 264 aa, Arenibacter hampyeongensis
MLDQREKISALIITYNEMGYIEKCIDSIEFVDEIIVVDSYSTDGTYQYLNNHPKVNVIQHEFDNYTAQKSYALKQATHDWVLFLDADEVVTEELRKEIICKAKKESEHCAYWFYRKFMFQNRPLRFSGWQTDKNYRLFRKSKAQFAKEKIVHETLVVNGTSGILQQKLVHFCYKNYEDYKYKMLKYGRLKAKEAHKKEKKFNYLLLVLKPFWKFFNHYIIRLGILDGKKGITICYLNALGDFERYKELQRLGKKEKMAYFLVKS

SEQ ID NO: 1090 - protein, 264 aa, Unknown
  Description of Unknown: Candidatus Omnitrophica bacterium sequence
MEGDRFPLSVVVIARDEERDLEECLKSARWANEIIVVVDERSKDRTEEIARALADKVFIRKMKNEGEHRNWAYAQARNEWVLSLDADERITEELREEICQRLKKGEKRFSGFAIPRKNFLGDYWIKFGGEYPAGQLKLFKKDLCRLEEVEVHPRIFLQGEWTCLSSPLLHYSSRDISDFIHKFNSQTTLEAEKWWRTNREVCLFHILRRAIDRFFRKYVYKKGYKDGFIGFFLALFAGLYQIVSFAKYIEKKGRLERDEKRSAG

SEQ ID NO: 1091 - protein, 252 aa, Unknown
  Description of Unknown: Flavobacteriales bacterium sequence
MQIQLSVVIITFNEEKNIARCLDSVLPIADDIVVVDSFSTDTTKQICIQKRARFVEHKFEGHIEQKNWAITQAKYQYVLSLDADEALTKELQEVIIEIKNNYQSDAYSFNRLTNYCGQWIKHCGWYPDEKLRLWDSTKGKWGGENPHDKVIMNKGIRVEHINLDILHYSFYTEEQHLKQIEYFTDISSKAAFNKGKKSSSLKIFYKPIFKFFRDYVLKAGFLDGYYGYIVCRNSGYAAGLKYKKIAQLQKEI

SEQ ID NO: 1092 - protein, 261 aa, Prevotella melaninogenica
MEKKEISVVINTYNAEKFLQRVLDSVKDFDEVVICDMESTDHTVEIAQRAGCKVVTFPKGNHTCVEPARNFAIQSAKSPWVLVVDADELVTPELRSYLYQHIDKPNCAKGLYIPRQNRFMNTPKKGFSKDYQLRFFICEGTVWPPYIHSIPQVQGSVEHINNHLYNVQLIHLAENYLADMLEKCNRYTTNEVLKKQGKNYGVGALLFRPFWRFFKSYFMNGEIRNGVTGFIDSVMTGFYQFMIVAKVIEARIKKQSEDEQK

SEQ ID NO: 1093 - protein, 256 aa, Unknown
  Description of Unknown: Chryseobacterium daecheongense sequence
MPQLTEKVSGLIITYNEEKNIREVLECFDFCDEIIIVDSFSTDKTLEIVRTFPKVKVVQHTFEDFTSQRNLALDYATNDWVLFLDGDERITPQLKKEIIEELNKPDKKDAYYFYRKFFFAGKPIHFSGTQTDKNFRLFRKSKARYIEERKVHETLEVNGSIGELKNKLLHYSVTDYESYKKKMIHYGKLKGLELASKGKKYSASTQYFKTAYKFFKAYIMRLGILDGKEGFQLSYLQSLSAFETYESLKNEQKEFE

SEQ ID NO: 1094 - protein, 432 aa, Bacillus thuringiensis
MDIIYDSSTFDLINHKDLCLDLNQLAYLKRMTKYITNISNDIYKNIVTKSLDLKIEDVLDALEALEKIQPITISAIIICKNEEKYIKKCMESIQSCQFDEIIVVDTGSTDNTIDILQSLQEQIPQLKIYHTEWKNDFSKVRNYGLDLAKSEWVFFIDADEYYLNQEEHSIKEIISFFSIYYNDDLCMCPNIINSNNHELYNNPRIFKRAAGYQYYGNVHETLRKNKNSYDFVPNIGLNIKFGHDGYRNDIFITKDKESRNVDLLMKCIEMEPNNPLWKCYLVRDGMRKLSTNYIIQLCEETINLCEARESYFFTYCYYWAHTLLIDLYISMKEIEKTDPLIKNLRKNNAGLDETDIYYREQLIYMIKIEKDLEIKLNEVKKYRENHSKTNGSALNTQGYHLDDLIMRLNYFNHNMDEYHQYKNYLYQLNYLV

SEQ ID NO: 1095 - protein, 266 aa, Unknown
  Description of Unknown: Acidobacteria bacterium sequence
MRTSMPSISAIIITYNEQSDLPEALESLRGVADEIVVVDSGSTDRTGEIAQEFGARVVSRPFSNFGDQKNFAAGQATHDWVLSLDADERLSGELREAIAAWKQNEPDCAAYQINRKPNYLGGWIRHSGWYPEYCVRLYRSDSARFVGALHENVQVNGRVGRLRGDFLHYTVRSLREHYAKMEAFTTRAAEDLYARRRRHWRGGMWLAAPWTLVQRFFFQLGFLDGYRGVLIAWTSARYVWLKYRKLGVLVGGGKLEARPWPQARDV

SEQ ID NO: 1096 - protein, 534 aa, Unknown
  Description of Unknown: Aneurinibacillus sequence
MGTKKAKVSLCMIVKDEEQHLPACLESVQSLVDEIIIVDTGSTDRTVAIAKKYGAKVFHKPWEDDFSKARNVSLKKATGDWILQLDADERLEQEDRRKFQALIQSGTAEGYLFQILNHNFEFTGDVCVFPSVRLWRNRPEYRFVGALHEQITLSIIKRSTTDSLLMTPIRIHHYGYSAAVMQKKRKVERNIKIAEAEVKKHPGHPFHYYNLGTEYLNVKRYLEASQQFQLARKHLQDFQEIWVASLFKNYTSALLAMRNFPEAIHLLDEGIQLFPDFTDLIYLKAVCLFELGEYSQAIEMFHQCLAMGSSPIHKYPSNKALSNEKAHYALALSYRKLNQVDKAVHHFQQAYVCNRKWTEPLYQLFPLLCKKSSVEKATAKLHELVQPAQTVDYMLMAQLLITWYQFTAAKHYLLEAERIEPANQQIFYLAGICALREGNYAQGIYWLERLNKTFPNYGVSRLFLYYCYAASGQQEAALHLMSSIGNNESLLRALAKVYLEEAALLLQEGLFYHPDSSIINKEQIHQILEVMSLA

SEQ ID NO: 1097 - protein, 253 aa, Mangrovimonas sp.
MLKLSGVIITYNEERNIERCLQSLVGIVDEIVVVDSFSTDNTKAICEKYKVTFIEQQFLGYIEQKNFALQQASHDYIVSLDGDEALSETLRDTILKLKDNWQWDGYYCNRFNNFCGQWIKHSDWYPNRKLRVFDRRKASWKGINPHDNVVLHDPKAKTGQLKGDLLHWTYQTYSEFNQKTEYFSSIAAKAYFDLGKKASLWKIVFNPTWAFFKSYVLRLGFLDGLNGLVICIQTANITFLKYTKLRELYKNQD

SEQ ID NO: 1098 - protein, 271 aa, Unknown
  Description of Unknown: Candidatus Gottesmanbacteria bacterium GW2011_GWC2_39_8 sequence
MKISAVVLTKNEEKNIEKCLAGLSWCDEIVVVDDYSEDETLNIIKNLKIKMENDNLKLKIFQRNLGNNFAGQRNFGLSKASGDWVLFVDADERVTKELVQEIQSFNPSTSLRVKDSKLQRLKGFYIKRKDFMWGREMKFGETGDIKLLRLARKNSGKWEREVHEVWNINGVTNTLNAPLLHFPHPDVAQFVEDVNNYSDLNVSALQKTGKKTGFLIIFLWPLCKFSYNFVIKKGFLDGTRGFIAAVMMSFHSFLSRSKLYFRQYGKNNQEN

SEQ ID NO: 1099 - protein, 282 aa, Bergeriella denitrificans
MRIVAGYRVKYSKSCFQTAYAAHSNPKVVIMSTLSVLILARNEERNISDCIGSVAFADEIIVIDDFSTDRTRQLAEEAGARVIQRSMSGDWGGQQTFAVEQARCEWILFLDADERISPELAEEIKTTLKYGQPAAYWIQRHNRFHHNRATHGTLRPDFVCRLMPAAGVTVEGYVHPAILHPYQDKKLRHPMYHYTYDNWDQYFGKFNHYTKLSAEKYRKAGKSVSFTKDILLRPIWAFIKVYIFDKGFLDGKIGWIFAVNHYFYTMTKYVRLYYLYKSDGKL

SEQ ID NO: 1100 - protein, 265 aa, Unknown
  Description of Unknown: Candidatus Roizmanbacteria bacterium CG_4_10_14_0_8_um_filter_ 33_9 sequence
MNKISVIILTKNEEKNIERALKSVQFCDEIIVVNDESTDGTINKILDFKFKTLNKSKIILLKKELKENFAEQRNWAMTKAKNEWILFLDADEEISLQLKNEIVEMVTTNSKKAYSLRRRDYFWGNELKYGEIKEANKKGIIRLIKKGIGKWVGTVHEEFIPNTIGMVGRVKGYINHYPHQTISEFISDINIYSTIRAKELYKNKVHSNIIQILFYPFGKFIYTYFFKLGFLDGAAGFAYAFIMSFHSFLVRTKLFQIQNTNENRL

SEQ ID NO: 1101 - protein, 272 aa, Melittangium boletus
MNGPENSGILLSAAVMTKNSLRTLKDCLDSLDFCDEIVVVDDHSTDGTWEYLQSRGGKVRAFQRKLDTFASHRRAMCSRARGQWVLIVDADENALPGLGEEIRELLSQNPRHDAYHVPQKNTLPDHWPRPVHFWTSQKRLLRLGKVRWADSEWIHVPAIHEGKAGRLKHGLRHRSYDSVSHLLRKQISYAQSGARHFHSLGRRASLMKACTHSTGAFIKFYLLKGLFRFGMGGLTVATALSFHAFAKYAFLWELGSGVAESERELVPGDTRA

SEQ ID NO: 1102 - protein, 245 aa, Olleya aquimaris
MKTLTVIIPTYNEENYLENALRSVRFADQIIVVDSMSTDKTVEIAERYNCKVLSRKFDNFSNQKNHALQYATGEWILFIDADERVPNALKQEIIAAMNSNKHAGYKLNFPHFYMNRFLYNHSDNVTRLVKRDNCKFEGLVHEKLIVEGTIGQLKNPVLHFTYKGLLHYISKKDSYAWFQAEQLLKKGKKATYFHLAFKPFYRFFSSYILRRGFMDGIPGLAVASINAYGVFSRYVKLMLLQRGIR

SEQ ID NO: 1103 - protein, 269 aa, Unknown
  Description of Unknown: Betaproteobacteria bacterium SG8_41 sequence
MSLSVTIITKNEEAAIRRCLQSVAWADEIVVVDSGSTDRTLEVCHEHGAKVQQTSDWPGFGPQKNRALALAGGDWVLSLDSDEWVTPELRAEIERAMAAPGGVAAFRMPRRSSFCGRFMRHSGWWPDYVVRLFRRGSARFSDDLVHERVIVNGTIEKLRAPILHEAVRDLHGMVAKTNNYSTASAVMRHGRGQRGSLTAAILHGLWAFLRTYFFRLGFLDGREGFMLAVINAENSYYRYAKLMMLAKRETGNREQEMGNASPPPSQPSP

SEQ ID NO: 1104 - protein, 250 aa, Thermincola potens
MAEQKISVVIITKNEEKHIEECLESVQWADEIIVVDSFSTDATVEICRKYTDKVFQREWTGFADQKNYGIELSGCPWVLSIDADERITPALKEEITKAMQNDRFAGYYIPRKNYLNSRWMRYAAQYPDYQLRLFRNTARFDGREVHERVTVNGPVGYLKEPMVHCTYQNLDQFVEKINKYTCLEAVERLKKNRDIPIYLFLYLPLRKFFSLYIYRKGYKDGVLGLIISGLAAFYVFLELAKAWEKKNLTN

SEQ ID NO: 1105 - protein, 261 aa, Unknown
  Description of Unknown: Candidatus Gottesmanbacteria bacterium GW2011_GWA2_43_14 sequence
MTNDISAVILAKNSETKIRKCLESLDWCSELVIIDDFSSDKTLEVIDRFKDKNKIRIKIHQHQLKGDFSAQRNFGLSKAEFSRILFVDSDEVVSQELAEEIKNLLKSDDDRIKGYFIRRLDIFLGKKLNYGETGNISFLRLGKKEFGQWEGKVHEVWRIKGQTGNLRNPLLHHPHDTLGSFIGKLNKYTTIVAQSWKEQGKEVGFLEILFYPPGKFFNNYILKAGFLDGAPGLIMAVMMSLHSFLARGKLYLSNLKNVQNF

SEQ ID NO: 1106 - protein, 258 aa, Unknown
  Description of Unknown: Gammaproteobacteria bacterium sequence
MAKISACIISFNEEKKIEECLKSLQPVVDEIIIIDSLSTDDTLKIAEKYTDKIFQQKFLGHIEQKNLALKKASNDWILSLDCDERLSEELQQSILEIKDKLEHADAYRMPRKTFYIYRWLNHCWYPDIKTRLFNRNTSHWGGTNPHDHIVTEGKNIVRLKGDIFHLSFDSISDHLKTIDSFTEIGADELVRKNRTVTIFSPLTHASWTFFKLYIIKRGFLDGFAGLIVSVLSYMHVFIKYSKAHIKYKQLKHEQARNK

SEQ ID NO: 1107 - protein, 261 aa, Unknown
  Description of Unknown: Flavobacterium sp. JRR 20_7 sequence
MTLFKKQALTALVITYNEEHNIKAVLDHLAFADEIIVVDSFSSDATFEIASSFKNVKVAQRIFDDFASQRNYALSLATNSWILFIDADERLTADLKKEINTIINEQNSASAYFMYRTFMFQNKKLRFSGWQTDKIIRLFKKEEAYYNYEKIVHEKLIVNGSIGKLKNKLIHYSYSGYVDYKQKMILYGQLKAQEELAKKTKPQFFHFYIRPVYQFLNQYIIRLGILDGKKGLIICYLNALSVSVRFQELKKLRSKTTISKT

SEQ ID NO: 1108 - protein, 285 aa, Bacillus psychrosaccharolyticus
MLLSLCVITKNEEKNIKKCLESVNGILFEKIVVDTGSTDRTVELAKNSGAKVYDFKWIDDFSAARNYAISKAKGDWILFLDADEYIEPEQSLVLKNLVSIADNEKTECIISKLINYTPHPDRKIIQSVTNTIRVFKNLKNIRYVGAIHEVIQSNQNRPLYSLDASESLTVYHTGYSREEIERKDKSKRNLSLLFKELERRPNNSTTYVYIAESLMLNQKFEEAVPYLIQAKEFINNKNKTLLYKIYSNLLSCMCRPTYDLETLKKDTMTQLCLIEIVQISTTIWG

SEQ ID NO: 1109 - protein, 256 aa, Unknown
  Description of Unknown: Pectobacterium zantedeschiae sequence
MRKRLSIGIITKNESELIEECLQSVNWADEIIVVDSGSTDNTVEIAHRYGAKVYQHDDWQGYGKQRQRAQSYASGDYIFFIDADERVTPELRQSIEDVLSKSNLDDKIVYSCARKNLFLGRFMKHSGWYPDKVLRLYANHRYQYNDNSVHESLDYGDAPVQYLSGDLKHLTCRDFSVFQQKQLRYASAWAKERYIKGKSCSYISIFIHTIFSFLKTWLFRAGFLDGKQGLLLAFVNAQYTFNKYTELWSLNNNENH

SEQ ID NO: 1110 - protein, 267 aa, Unknown
  Description of Unknown: Candidatus Daviesbacteria bacterium GW2011_GWA1_41_61 sequence
MISVIILTRNEEDRIKACLESVKWADEIIVADNDSTDKTLEVVKKYTDKVFVYKGQDFAQLRNMAMGKVSGDWVFYVDADERVLKPLREEVEEITQKGDKSAYAVSRRNIIFGQEVNYGPYKDDWMVRLFKRDKFKAWVGKVHEYGTFEGNLGYTKNSLLHLTHRNIDHFILKSLEWSKIDAKLRLETQHPKMTKWRFLRIFLTELYHQGIKRRGFLSGTVGIIDSILQVFFFYMTYVRLWEMQQTKPLEEEYKEIDQKLMGNDFQY

SEQ ID NO: 1111 - protein, 265 aa, Enterobacter kobei
MFNLSVCLLTCNSARLLREVLPPVLAVADEIVVVDSGSSDATLDICHEYELVVHHHPYAMHGAQMNYAISLATNDWVLCLDSDEVLDAETIDFILRLKAGETPAPDQAWRLSRYWYVLGEEVRTLYPVSSPDFPVRLFNRQHAHFNDRPVDDKVEGFSTSVKIPGRVRHDTFYSLHEVFNKLNSYTSRLVKYQKVKPSIARGIISAIGAFFKWYLFSGAWRNGKVGVVTGLYATLYSFLKYFKAWYIHQDEKAALPKTQKDRRLI

SEQ ID NO: 1112 - protein, 253 aa, Unknown
  Description of Unknown: Chryseobacterium sp. NBC 122 sequence
MLKERISGLIITFNEEKNIQEILDCFTFCDEIIVVDSFSTDKTVEIASRNPKVKIIQNPFEDFTKQRNLALESAKNDWVIFLDGDERITPQLRAEIFKELNKSDKKDAYYFYRQFFFAGKPLHYSGTQTDKNFRLFRKSKCRYTAGKKVHETLEVNGSIGELRNKLLHYSVADYESYQEKMIHYGELKGKELFAKGKKFSSLIMYIKMAAKFIKTYFLRLGFLDGKEGYQLSVLQTLSVYKTYESLKNSEKND

SEQ ID NO: 1113 - protein, 256 aa, Waddlia chondrophila
MISVTILTKNSQKHLKEILDSLHSFDEVVVCDTGSTDCTLEIARAYSNVSLYEKPFAGFGPTHNFASERAKNDWILSIDSDEVPSPELIKEIMEESLDPRCVYSIPRHNFFNGKWIRWCGWHPESVVRLYHRGSTCFSDEQVHEAVIAQGLRVKSFKGALKHYSYDSIDQFLEKMQLYSELFAKQNVGKKRSGLGKAIAHGFYGFFKSFFLKRGFMGGFEGAVISFYNGHTAYYKYLKLREYNRKFFDGQRKTPDF

SEQ ID NO: 1114 - protein, 269 aa, Methylibium sp.
MLPRSSRRTTLSVMMIVRDEADRIEACLQSVAGWASEIVVLDSGSTDGTTDIVRRYTDKLWVTDWPGYGPQRNRALDHCSGEWVLSIDADEVVTPELRDEIDRVLDEPGRDFTVLKMPWKTYFFGRPLKHGRYTSPQAKLFLREGVRYRDHQVHESLLMPRRKDRVLKAPLEHYSWRSYQHVQEKHLKYGCLLAGQKFAKGQRGNLAYAALRFGTDFLQQYLLRGGFLDGSRGFLMAVILGQYAFHKYAALWALEADAATPPSRPPPAP

SEQ ID NO: 1115 - protein, 271 aa, Unknown
  Description of Unknown: Candidatus Accumulibacter sp. SK-12 sequence
MTDPTRLSVIVTTYNNGRTLRACLESVKWANEIVVLDSLSTDDTLAIARNYNTRIHQHRFMGYGPQKQMAVELASNDWVLLLDADEVLSPALQDELRQLLQEAPAADGYEIARQEQLFWRMSHPATRMNHFLRLFDRRQGGVDDMPVHAAPKVRGRIERLKSLLYHFGETDLHAKVEKINAYSTGLVEDKLKRRRWGLPLIMIFYPPWFFLRSYFFKRNFVNGWAGFINSVVAAFYVFLKYAKLYEHHQFARHGTDLFPEGAPPVPAARRD

SEQ ID NO: 1116 - protein, 257 aa, Cupriavidus pauculus
MKISVVLITKNEAHNIRDCLESVSWCDRAIIVDSGSTDGTLEIARAMGAEVHETATWPGFGPQKNLALSKVQSEWVLSIDADERVTPALRDEILAAIDSGRADAYDMPRLSRFCGRFMRHSGWYPDRLTRVFRAGRARFTDDIVHENVVTDGPIGHLQTPLLHYTYDDFSQVLRKIDQYSTLGARQAFQRGKRATVFSAWTHGSWAFLRTWLLRRGFLDGPQGLAVALMNGQASYYKYIKLWLLHQQAKNHPPASAD

SEQ ID NO: 1117 - protein, 263 aa, Unknown
  Description of Unknown: Flavobacterium sp. Kopri-42 sequence
MINNHNTKISILIITLNEENQMKSLLADFDFADEIIVVDSFSTDKTESICKSFDKVTFVQNTFENYSSQRNFAISQAKNDWILFLDADERLTPALKNEIISTVNTNQTYSAFLFYRTFMFKDKVLHFSGNQNDKIFRLFNKNHAAYTKERLVHEKLKVNGKIGLLKNKLIHYSYSNFQAYKSKTIRYGKFKAQEKFLKRQKPSIILHFFHPAYNFLFNYIVRLGFLDGKKGLIICYLNANSVYTRYRELEQLWNTEESLSPKQ

SEQ ID NO: 1118 - protein, 234 aa, Campylobacter lari
MNKLSIVILTYNSQKYIYEVLKSIEFADEVLIVDSGSTDETLSIANNFKNTRIIQQEWLGFGKQKQFGVEQAKNDWIFVLDSDEVFTKNLKEEVVKIMKEPHFKAYKVARLNFFFGKAVKRLGLYPDYNIRFFDKNFARFDDKVVHEGIICHEKIGTLKNHFIHYAYENIEQFIEKQNKYSSLNSNKNNFFKAIVNPYWTFFKMYFIKKGFLEGKQGFVIAKLYAQYTFWKYIK

SEQ ID NO: 1119 - protein, 260 aa, Unknown
  Description of Unknown: Candidatus Regiella insecticola LSR1 sequence
MSTKKSLSVIILTKNEAPLLADCLLSVAWADEIIIVDSGSEDETLSIAQRYGAKIYTHTDWQGFGKQRNIAQQYAKGEYLLMVDADERISPLLKNSIEAVLMAPDDNAVYSCSRRNLFLGRFMRHSGWYPDRVVRLYPPQYQYKEDYVHESLMCGSAKIIPLKGDLLHLTCRDFSDFQQKQLNYAKIWAIQRHQQGKSCHYLAIFAHTLWAFCKTGLLRAGFLDGKQGLLLACVNAQYTFTKYTALWSLNQIDRFRNRNQ

SEQ ID NO: 1120 - protein, 253 aa, Unknown
  Description of Unknown: Chryseobacterium piperi sequence
MPELTEKVSGLIITYNEEKNIREVLECFDFCDEIVIIDSFSTDKTLEIAKTFPNVKIIQNKFEDFTKQRNLALDNARNDWALFLDGDERITPQLRSEIVEELNKTDKKDAYYFYRKFFFADKPINYSGTQTDKNFRLFRKSKARYIAEKKVHETLKVEGRIGEMKNKLLHFSVSDYESYKKKMIHYGVLKGQELALKGKKFSKLTQYSKTAFKFFKAYIMRLGVLDGKEGYQLSYLQALSVFETYESLKKEQN

SEQ ID NO: 1121 - protein, 252 aa, Unknown
  Description of Unknown: Chryseobacterium piscicola sequence
MKLSVAIITFNEDRIIEKTLSSIYHIADEIVIVDSFSTDKTVEICKNFSKVKLIQHTFEGFGKQKNFAIDQCSGEWILFLDADEIPDEIAKSSIVKIISQEKLNLSVFNIAFNNIFLGKSLKYGGWGNIKRERLFRKDAGRYSEDIVHEYFLTTEKIGLLEGNINHYTYKDIHHHIEKSNKYTTMMAEKMYNRGKKYSVLKIIFSPIYQFIKSYFIRLGFLDGLVGYYAAKTAGFYTFLKYQKLYELHNVKK

SEQ ID NO: 1122 - protein, 255 aa, Unknown
  Description of Unknown: Candidatus Woesebacteria bacterium GW2011_GWA1_37_8 sequence
MNKKTISAVIIAKNEEKNIDDCLKSVTWCDEIVVVDTDSTDKTVKIAEKFTNTIYKTKGGNYSDWRNLGLEKAKTDWIIYIDCDERCSDKLKNEILEVINSETKYSLFVIPRQNIILGRLMKHGGWWPDYVKRLYKKNHLKKWTGDLHEEPIYLGKLGYLENPLIHLKHNNLTDMLEKTNTWSAVEAQLMFKANHPKMNTVRFITAMSRELWKRLFVEKGYLDGQEGIIYSIYQMYSKSISYAKLWEMQENKLKI

SEQ ID NO: 1123 - protein, 253 aa, Maribacter ulvicola
MNKATPKISALLITFNEEDNINEVLANLSFADEIIVVDSYSTDNTLKLIRENKNVKLICRKFVNYTDQKKYALEQANYDWILFLDADERITPSLKDEILKVITEPDAASAYFFQRTFMFKTKKIYFSGWQSDKNYRLFRKSKVHFDQDRIVHETLVVDGASATMKHKLLHFSYKNYEDYKGKMLKYGRMKAKEEAKKGKKARWYHFIFRPLYKFINHYIIRLGILDGKKGLIICYLNALGVYARYKELKQLQS

SEQ ID NO: 1124 - protein, 258 aa, Unknown
  Description of Unknown: Marinilabiliales bacterium sequence
MVNISVVIIAFNEERDISRCLKSVVDIADEIVVVDSFSTDKTVEIAKSFGSKVITHEFNSYIDQKNYALKQAEYNIVLSLDADEELSKKLKNSILEVKKQGFDYDGYSMNRLTRIGDKWINHSGWYPDTKLRLFDKTKGKWAGLNPHDEFVYYDKSNIYKLNGDLLHHSFYSFEELKKQSDKFAKLGAKAYYKKGKKAPFLKIIFNPALRFIRDYFFNKGFLHGINGIRVSYNNSHSTYLKYKYLHAFYTEKQDEKEN

SEQ ID NO: 1125 - protein, 298 aa, Unknown
  Description of Unknown: Microgenomates group bacterium GW2011_GWA2_39_19 sequence
MNAMLYRLSHEPLYLYFTSLGVVESRYNGSLFLLIMITAIVLAKNEEKNIERCLKSLKWCDETIVIDDFSSDRTLEIAKKFNATIYQRILENDFSSQRNFGLSRAKGDWVLFVDADEVVESSLKDEISSKILASPFEGFCIKRKDFMWGKELKFGETASLKFVRLARRDAGKWIGIVHEEWKIRGKVGEFDGFIEHYPHQILGEFIKEIDYYSTWHAKSKFDKGERSSLVKILVMPKAKFFQNWIIRGGFRDGTEGFLVSILMSFHSFLAWSKLWLLERKVSRGLRQVPLTHDTCSAF

SEQ ID NO: 1126 - protein, 268 aa, Unknown
  Description of Unknown: Kiritimatiellales bacterium sequence
MKITAYIIAYNEEEKIADCIGSVLWADEVIVADSFSEDRTAEIAESLGAKVVQIEFNGFGALRNEAIKHCSHEWIYSLDSDERCTPEVRDEILELIQDAPLDIYRQPRRNYFMGRWIRFSGWYPNYRQPQLFRNGKMTYDLKPVHEGFVSHSDKPIGALKCAIWQFPFKDLDEVLHKANRYSRLGVAKLEERGKKGSLGKAFAHGFWAFFKHYFLKLGFLDGGAGFVIAAAYFDQSFYRYAKLTEVQSHGWPPPEAKPVLRKDAGADV

SEQ ID NO: 1127 - protein, 254 aa, Unknown
  Description of Unknown: Alphaproteobacteria bacterium sequence
MKKISAVIVAHNEEKKIKDCIQSLDFVDEIVVVLDKCSDNTKQIVQQFNVVICEGSWNIEGMRRNCGLNLAQGQWILEIDADERVSKELKEEILEVIKTANPCGFEVGIANFVGERWIKYGWLRTMGVLKRHSLSYRGLKKYHEDKEIHPTFSFDGKVYDLQNYIIHLVDDNIADLWLRFNRYTNWRANDMFLKKQKLPNFLKLVISAEIRFYKSYFFKKGYKEGVLGVLIALLCALYPIVSYLKLKEKINENS

SEQ ID NO: 1128 - protein, 252 aa, Pseudogulbenkiania ferrooxidans
MSSALSVVLITKNAAQQIAACLESCRFADEIVVVDSGSSDDTIAIAKSYNAKVIHQDWLGFGPQKQFAVQQARHDWVLCLDADEWLSARLSSEIKDLPDNPQAAAYRFPRSNKFMGRFLRHGEGYPDLSLRLFDRRRARWSDHAVHEYVIADGPVENLKGDLMHESGEDIALYLTKQNRYTDLQAQALFERGKRVGWPKLVFSPLLRFFKFYLLRQGFRDGVPGLVHISIGCFNSYIKYAKLIELHRLENTQ

SEQ ID NO: 1129 - protein, 249 aa, Unknown
  Description of Unknown: Flavobacterium sp. A5.7 sequence
MSTKNKKLSVIILTYNEESHISDAIKSVAFADEIIVLDSHSTDATAEIVIDLGAELLFRKFDNYSNQRNHAIESAKGEWILFLDADERVTPELRDEILESIHSNKSDAYRIWFPHFFMDRFLFHYTDKVTRLMKNENLRFENEVHEKLVVKSKPPVLKNYMIHYTYKGLFNFIYKKDKYAWFQAKMSHQKGKKATLFLLFFKPFYRFFHTYFVKRVYLDGVPGLAAASIDAYGVFSRYAKMVLLEKDLE

SEQ ID NO: 1130 - protein, 287 aa, Unknown
  Description of Unknown: Deltaproteobacteria bacterium sequence
MPLRPSPMYGGGDGRGGLRGGTGDAMMEGNKVSVYIITYNNERTIERCLKSVTWADEIVVVDSYSTDRTLEICRRYTDKIYQRRWTNYREQYQFAADKTTNRWIMFVDADEEVSPELAREIREEIAKNDGRWAGYIAHRRTYYLGRWIKHGGWYPDYEIRLYDRSRGKWEGGLHAKVKVDGEVKVLKNFYFHYTYKDISDQLRTIDRYSEVAASDMWKEGKRFSLFDLLLRPPFRFFRDFILKRGFLDGFPGLIIAVLTMFYVFIKYAKLWEIEKGLKEGDGLPPRV

SEQ ID NO: 1131 - protein, 263 aa, Unknown
  Description of Unknown: Flavobacterium sp. A45 sequence
MTNSNAKKLSVLIITLNEEEHLKGLLSDLNFADEIVIVDSFSTDGTEIIAKTFPKVKFIQNKFENFSAQRNFAISQAKNDWILFLDADEILTPELKQEIIETLQNNQTYSAFFFERIFMFENTVLKYSGNQTDKIFRLFNKKSAKYDEKRLVHEKLIVNGEIGFLKNKLIHHSYSSYDDYREKIIFYGKFKAQEKFIKKVKPTFFHRFFHPSYNFLYNYFIRLGILDGKKGIIICYLNAYSIVVRYKELKKLWKQNQLPISKT

SEQ ID NO: 1132 - protein, 251 aa, Unknown
  Description of Unknown: Chryseobacterium gleum sequence
MNLSVAIITYNEERIIEKNLQAIDALADEIVVVDSFSTDKTREICEKYSKVKFIQKKFEGFGQQKNFAIDNCSGSWILFLDADEIPDEDAMKSIKKVLHSHHPFFNVFEIHFNNILLNKVIRYGGWGNVWRERFFRKGHGKYSDDLVHETFITKDKKGKLDGNINHYTYKSINHHVEKINNYTQLMAEKKVLSKKKVSLFKIIVSPFYEFVKIYFLRLGFLDGIAGFYISITGAFYTFLKYIKMNEILKAK

SEQ ID NO: 1133 - protein, 253 aa, Unknown
  Description of Unknown: Desulfurobacterium thermolithotrophum sequence
MSLSVGILTFNSERYLKEVLESVKSIADEIVILDSGSKDRTIEIAKSFGAKVFFRKFDNFVSQKNYLLSLCKKEWVLFIDDDEVVGNELKAEIERVKKEGSFDGYYVNVLTNYLGRWIKYAWYPDWHLRLAKREKCKWIGDLVHESLKVDGKLGYLKGNLLHYSYPSISHHLKKIDLYTSLYAEGVYRRGKKFSYMKLFLSPLGAFLRRYIFKKGFLDGFEGFVLSVMSSYYTFLKYLKLWEKEKNEKTFHSR

SEQ ID NO: 1134 - protein, 260 aa, Rheinheimera aquimaris
MRSRKISCFVICCNEEDRIEACLQSLTGWVDQLIVVDSGSKDNTVAIAERYADKVYQTDWPGFGPQRNRALAWCEHDWVLSIDADEILTPELKLEIDRVLSEPELDANFIKMPWHTYFFGKLLKRGRYSTPQGKLFLKTGASFKDRQVHETLLLPYEKVRVLKSAIIHHSWRSYQHCQEKHIKYACLGAEDKFARGKKAGLAYAILRFFIDFLQQYVLRLGFLDGWRGLLMAIVLGQYAFHKYAALATMVADAKANKVSG

SEQ ID NO: 1135 - protein, 247 aa, Myroides sp.
MMKLSVIIPTYNEEKYIADAIKSVSFADEVIIIDSYSNDATVEIAKELNCTVLQNKFKNFSTQKNFAIPHAKGEWILFLDADERVTKSLQTEILDAIATPGEFTAFKLRFPHFFINEFLFHKADKVTRLVLNKEVHFTGEVHEKLHTTAGKTGILKHHVLHLTYKGIFHYMAKKELYSWFQAAELFKKNKKVTYYHLAFKPFYRFFHIYFIKRGYLDKTAGLAGAALDAYGVFARYLKLMLLQKGLK

SEQ ID NO: 1136 - protein, 257 aa, Unknown
  Description of Unknown: Bacteroidetes bacterium sequence
MSHPLSVIVTTYNEADHIGRCLASVQGLSDDVLVVDSFSTDATVAIAHTHGARVEQRPYQGPAEQKNWAIPQARHEWVLLLDADEVVTPDLRDELTQLLANDVPPAAAAYWIGRNNYFLGQRIRFSGWQGDRVVRFFHRDRARYADVQVHEEIITDGLPTGSLRGRLEHYTFRNLDHYLDKTRRYARWSAQDHAARTPRVGYYHLWAKPTFRFFKHFVIQQGFRDGKVGFIVSAIMAWGVFLRYAYLAGQQRQRPAG

SEQ ID NO: 1137 - protein, 295 aa, Aerococcus urinae
MATLPDRHSFPRRSSRPLVAASMIVRNEERHLPDCLSSIAGLVDEIVIVDTGSTDSTIDIARSFGAKVLESPWQGDFAAPRNLSLDNCSSEWILYIDADERLRGIDRAGLEAALSEPGRVCLRPWLRPRIGYTPYREYRLFRNDPRIRFRSKIHESIVPGIEAVAASDGLRVGAIEAVLEHVGYEGDQTAKHRRNLPLLREQVMHSPDRIFLWWHLGHVLEGLGQIEEAEEAWAHGVELARRDVDGTTDALAYLSLIGSRVDRGEDVSALLADAKRRFPTNHYLRFLEARHHMNG

SEQ ID NO: 1138 - protein, 616 aa, Bacillus firmus
MPPFISLCMIVKDEEKVLDRCLTSVMGIIDEIVIVDTGSTDNTKNIAIKHTDFVYDFEWTNNFSEARNYAASKATGEWILVLDADEFVDPENLKQSISEIKQHDNQYGIYAVNIINFAGEKGESIAQHKHGRIYRNDGNIEFYRSVHEQLRAKHGSVNFAVSSLVIYHSGYLSNIVREKEKITRNSTLIQNELGNSTSVAFDYFNLGNEFKREGKMEEALDSFIKAYKEKNSNQLSWVSFCLCNIVECLISLKRYDNALEVIKDAEVVYSNSADFTFFKGEIYLLQHRYKEAKRIYSSLIRNSKKYYDIIKSPDFLEYYPYRRLGYIFELEGNLKESVKSYANAINIKSDCLESTFRLVKLLAKHHNDKEIFEFLSRSILHGKMSDRYFIQLIKLFLNQSLFKLCQMIGAKYLADDELIINLLQFKGQIISGEYRKEMFETIDTTFILSGLNLGLLDLNDLFIFFNDLGTAPSTIKNSVKVILNTNSVYEMLINGLIYNQSLKTEEIDTSIYLSLLEKCLIFNKVQLLENLIVHQETWNLHLDAKIASIFYRNGYEDLSINFYQKAQEEDLTEEDFNLIIKYLIKNDNELEAKRIAKIAFNIFDKDPQFERYLKQI

SEQ ID NO: 1139 - protein, 270 aa, Unknown
  Description of Unknown: uncultured bacterium sequence
MGISVVIHTYNADKYLEECLQSVSSVEEIIICDMHSTDRTIEIAQKYGCKIIYHENLGFADPARNFALSHATQDWVLVVDADEIITKELLDYLREVTQKPDCPDCYQIPRKNYVFGKFMRSLYPNCILRFFRRGNVSFSKHVHCTPDEIKGKEIKIDPKREELAMIHYNYDTVASFMSRTNTYTSLEIEKMVKRGFKFSLKFLIFRPLGEFIKRYFLKSGYKDGLHGFIVAYLLAMYETIAIIKLWEYEKNQKLVKKENPVPEKIEETVF

SEQ ID NO: 1140 - protein, 262 aa, Idiomarina planktonica
MQNEIPKISCFVITLNEGRYLDEVLESVRGVDEIVVVDSGSTDDTLEIAKRHGARIIHNDWPGYSKQKAFALEQCTHNWVINLDGDEVLPPGGFEMIQQRIAQGDINGIWVAHDDIFMGHSLRAARHHKYRRVYRKDKAHMNTAVLVHEHIEVEPPLAELPIRFKHYGYDSAHGYMDKLNTYSLLKAKQREEQGRGCSLPRLLLIYPLMFLKFYLGRQMIWSGWRGFIKANIDAFHFFLTEAKLYEREYRRKRGDDISRSEG

SEQ ID NO: 1141 - protein, 276 aa, Unknown
  Description of Unknown: Flavobacterium sp. 245 sequence
MSKIPISVIVSVKNEALNLPSCLDKLKRFDQIIVVDSGSTDDTIIIATALGAEVLQFQWNGKFPKKRNWALQNADIRHEWILFLDADEFVTDEFVSEIAIKTQDPSYNGFTIHFQNYFMGRKLKYGYGFKKSALFRKSKGAYEKIEEDLWSHLDMEVHEHPIIEGKIGIIKAKVAHKDFKNLEHYIAKHNAYSTWEAQRYLQLKETKNVLLSINQKIKYGLLNTGLLPVVYFLGAYVLKLGFLDGKEGFYLARFKSHYFFQIQTKVDSIRNNIELK

SEQ ID NO: 1142 - protein, 246 aa, Marinomonas piezotolerans
MIENVSAVLITKDVEHCIEKALDSLSDFQEVIVYDNGSTDRTLDIINSYSNVRCIQGEFLGFGPTKRKAVSYASNDWVLSLDADEAVSPELIGNLSAFIDTDPNVVGIIWRHNYFLGKRVRYSGWGNDWLVRLFNRQRHNFNEAMVHENVELSSASVRQRIDGVIVHDAVVDVGQMLEKVARYSSIRASTQRKRYSISMIVFKSIFAFFRTYVLRLGLLDGKAGLVISVSNANGVFWKNIKRYFRA

SEQ ID NO: 1143 - protein, 245 aa, Unknown
  Description of Unknown: Flavobacterium sinopsychrotolerans sequence
MRMLSVIIPTYNEIDYIEDAIKSVAFADEIIVIDSYSSDGTKEKSLSLGCTVLERKFDNFSNQKNHAISYAKGDWILFLDGDERVSQKLKLEILSVIKNGKHSGYKISFPHFYMNRFLYHKVDRVIRLVKNKNIKFTGDVHEKLVVEGSIGTLKNFMIHYTYKGLSNLLQKKDSYAWFQAKTSYERGKKATYFHLIFKPFYRFFSSYILKRGFMDGVPGLALASINAYGVFSRYVKIILIQKGLK

SEQ ID NO: 1144 - protein, 249 aa, Methylomonas sp.
MLSVIVITKNEAQHIGRCLASVAWADEIIVLDSGSSDETVAICRQFTNKVFITDWPGFGPQKQRALDKARGDWVLSIDADEEIGPALKAEILQAMQQNEVQGFEIPRLSSYCGKPIKHGGWWPDYVLRLFRRDVGRFSSEVVHERIEVKGAILRLNNPLWHEAFVDPAEVLHKINAYSSLGAEKMFKSGKRASLGKAIGKGLWTFIRTYFVQAAILDGAEGLMLAISNAEGSYYKYLKLRELCSKSASK

SEQ ID NO: 1145 - protein, 312 aa, Oscillatoria sp.
MTSKQSKIPVSVLIPAKNEEANLPACLASVARADEVFLVDSQSGDRSCEIAESYGANVVQFYFNGRWPKKKNWSLSNLPFRNEWVLIVDCDERIPPELWDEIAGAIENPNCNGYYLNRRVFFLGTWIRHGGKYPDWNLRLFKHEKGRYENLSTEEVPNTGDNEVHEHVILQGQVGYLKNDMIHEDFRDVYHWLERHNRYSNWEARVYYNLIAGTGDAGTIGANLFGDAVQRKRFLKKLWVRLPFKPTLRFILFYVIQLGFLDGRAGYIYGRLLSQYEYQIGVKLYELSKFGGQLNVSAAPGQKPQAVPVKES

SEQ ID NO: 1146 - protein, 281 aa, Unknown
  Description of Unknown: Candidatus Rokubacteria bacterium sequence
MAPAGAREPGWPARVPRRRGGLRRGPGGALSVRPRISVVVVTLNEEERLRGCLESAAWADEVIVVDAESADKTVQVAREFTDRVFVQPWPGFAAQKNFGLEQATGEWVLSLDADEEVSPELRDEIRAALATATPCAGYRIPRRNIMWGRFMRHGGLYPDWQLRLFRRGRGRFVERAVHESVEVTGEVERLGAPLVHRSYRDISDFLTRADRYSTLAAEDWVRSGRRPRTRDLILRPAGRFLSMYVVHGGFRDGWRGFLLAVLYAYYVFIRSAKVWERTRLE

SEQ ID NO: 1147 - protein, 276 aa, Tamlana sedimentorum
MILDLTIAIPVKNEEKNLLGCINAIGKDFAKQVVIIDSGSTDNTISIAESQGVDVVNFNWDGKFPKKRNWFLRNYNLTTKWVLFLDADEYLTDAFKTEIQQKINTDKIGFWLNYTIYFMGKKLKGGYPLNKLALFQVGAGEYERINEDKWSNLDMEIHEHPILNGEIGYIKSKIDHRDFRGVSHYMNKHNEYASWEAYRYIKTINDEEAKAKWTWKQKIKYKLMRSSLIGPIYFIGSFVFYGGWKDGATGFAFAILKMSYFTQIYCKIKELSNNEK

SEQ ID NO: 1148 - protein, 240 aa, Unknown
  Description of Unknown: Bacteroidetes bacterium sequence
MTSSSKISAVIATYNEEEHIRECVESLLPVVEEIIVVDSFSTDKTQEICLELGVKFLQRPWEGFSSTKNWANQQASYPFILSIDADEVISKELGTSLIKAKQELLDEHKVYKFNRLNNYCGMWMRYGGWYPDTKVRLFSNANAIWEGDVHERLIFDYPISEQLLEGDLLHYSIKDKADHIARVKKYCKLEKAFSNQFWALLSAINTFIRIYILKKSFLAGRLGYQLAFISALAKFWRGKT

SEQ ID NO: 1149 - protein, 316 aa, Pleurocapsa sp.
MSAKPEKVPVSVLIPAKDEEQNLPACLESVARADEIILVDSQSSDRTCEIAESYGAKVVQFYFNGRWPKKKNWSLDTLPFRNDWVLIVDCDERITPELWDEIAQAIKDPTYAGYYLNRRVFFLGKWIRYGGKYPDWNLRLFKHKLGRYENLKTEDIPNTGDNEVHEHVILEGKAGYLKYDMLHIDFRDIYHWLERHNRYSNWEARVYYNILTDSDESGTIGANLFGDAVQRKRFLKKIWVRLPFKPLLRFILFYVIRLGFLDGKAGYIYARLLSQYEYQIGVKLYELQQFGGRLNIPTPAQDSLSQTSPEPAELAN

SEQ ID NO: 1150 - protein, 259 aa, Aquimarina muelleri
MEKNTLHREKVTAIVPCFNEEHNIKEVLESVSFADEIMVVDSFSTDRTVDYAKEYTDFIIQRKFDYPSTQKNWAIPQATHRWILLVDADERVTPELKNEVLEILKNPGKDDFVAYWIKRMNHFMGERIHYSGWRNDKVIRLFHRDKCKYDNRHVHEEIVTEGKVGMLKNKFYHNTYTTFDAYINKLNRYATWQAKDYHKKTKYLTPYHFIIKPLWSFFKHYIIQSGFRDGVPGLVIGYVQGYAVFMRYVKLWLFRRDRK

SEQ ID NO: 1151 - protein, 299 aa, Nesterenkonia sp.
MGRQSDSVRCRSFRRSVFVKRISKISAIVLTKNEEAGLGNTLENLKDFEDVIVVDSLSEDRTLEIAVNHGARVVHFEWNSEYPKKKQWSLENANPLNEWILLLDADEFPTASLINELVDLQYSIESSSHGAFDINLLYRFAGRYLRHGHVVTKRSLLHIDRASFPVINDLDAPGIREVEGHYQPETAFKIGKLRNRLIHDDRDPVSSWFARHNRYSDWEAHLRLNQRLRKEIASKRTFKGRMFDMLPLKPILFFGYAFILRGGFLDGRAGMDYALALSAYYWQIGVKYRELVGLAESEI

SEQ ID NO: 1152 - protein, 268 aa, Selenomonas sp.
MRRHNIGEGRRVRLAVIILTHNEEHHIEACIQSASFADEILVIDDMSTDRTAELAQSLGARVVTHPLAGDFAGQRNFALTQTDADWVLYVDADERVNEGTEAELRRIMAADVRAVYEIKRINVVFGQRMCCGGHRPDYPRRFFPRDAVHWTGLVHERTESELPVRRMGGSLLHHTYESWEQYFQKFNQYTTLMAERQHREGRHASFLKILLDPPFAFFRYYILQCGFLDGRIGFILAMFHGFYTMAKYVKLHDLTMNGDRNVYEDRHI

SEQ ID NO: 1153 - protein, 259 aa, Lewinella nigricans
MQALSVIITTYNESTNIREAMASVQWADEIIVVDSYSTDGTPDVAEKLGAKVYERSYSGPADQKNWAIPKARNEWVLLLDADERLTDKLTEEIKSLLSGPEIDQDCYWIPRQNYFLGKRVRYSGWQGDTVIRLIRRDACRYDEKQVHEEIETKGLRVGKLKHKLLHYTFKDSGQYLDKIRRYGEWSALDHFEKTPRVTYYHLFIKPLYRFFKHFVIQRGFLDGRVGFIVSTIMAWGVFLRYLRIIELRKRDQPEDDVMG

SEQ ID NO: 1154 - protein, 272 aa, Parabacteroides goldsteinii
MKKIPVTVIVPVKNEEKNLSKCLSLLDDFSEVIVVDSHSTDHTPDIVKGFGFKCIDFSWNGQYPKKRNWVLENIPLENEWVLFLDADEYITDLFKEDLIKSIDTSNFNGLWVYYVNYFMGKQLRYGVKMRKLALFKKDKGKYEWIEEKSWSHLDMEIHEHPIVEGNIGAIKSPIIHMDYNGLEYYISKHNAYSTWEAKRYLNLTGLKKEFTWRQRIKYSLLDTWFYWIIYFLYSYFFCLGFLDGKTGLLFNLFKMQYFFQVKCKILELRGKY

SEQ ID NO: 1155 - protein, 257 aa, Unknown
  Description of Unknown: Latescibacteria bacterium DG_63 sequence
MRAKVTAIIPTFNEEANIRECLESVSWADEVVVVDSFSTDSTVEICREHGVTVVQHEYLNSASQKNWILPRVSNTWVLIVDADERVTEPLRKEILSILGSEPECDGYWIRRRNRFFGKEIRFCGWQRDKVLRLFDRDKGRYEEKHVHAEVSIDGRTGVLSGHLLHDSYRSFSSYLTKLDTYTDWGAQDDAQGGGRFVTARLLLRPPARFVRMYVLQLGFLDGLEGFILCVLAATSVFIKYAKLWRMLHLSAGQKQGS

SEQ ID NO: 1156 - protein, 257 aa, Parabacteroides sp.
MKISVVINTYNAEKYLERVLKAVKGFDEILICDMYSTDNTIPIAQKYNCKIIYHENIGYVEPARNYAIQSAKYPWVLIIDADEIVPPALKDYLYKRIQEENCLSGIRIPMKNYFMGRFMHCVYPSYLLRFVKKENTYWPSSIHSQPQIKGKIEVIPSNRKDLAFIHLANDSVSTNIRKTNQYTDNELDKRKNNKYPFWSLIGETTFRFFKLYILKGGFRDGKAGLTYCGLNAFYKFATIAKIWESRISENEIDPELK

SEQ ID NO: 1157 - protein, 249 aa, Unknown
  Description of Unknown: Microgenomates group bacterium GW2011_GWC1_38_12 sequence
MKISAIVLTKNEEDNIEKCLKRLTFCDEIIVIDDNSTDDTAVLAKNIGAKVYSRSLNGDFASQRNFGLEKAKSEWVLFIDADEIVTPSLREEIKQMWNEQIYKYSGFYIKRQDFFLGKTLKYGEAGNIKLLRFARKGKARWKRKVHEYWDIDGKTKTLENPLVHNSHPNLKQLINSLDSWSNLHALENKSEGKSSNLLKIITFPSAHFVKNYFFKKGFLDGVHGFTFAIFISFHSFLSWSKLWLNQKKD

SEQ ID NO: 1158 - protein, 492 aa, Selenomonas sp.
MKISACVIAKNEAENLPRWLASARVFADEMIVVDTGSTDATAEIARAGGAEVYRFAWTNDFAAAKNFALDRASGDWVVFTDADEYFSEESAPRVRALIEEHDAAEGLDGFIVHLVNIDMETGALLGTTAKVQRIFRRAPWLRFVGSIHEHVENLSGDPAREMMFAQDLTLYHTGYSPQVMRKKSERDLRMLLERRAAGQCDKMDAYHLMDCYYTLEDYEKAAAYAREAMALREQPVGGEERPHTVLLQSLILMGAGDTEIDAAYEAAARRFPQTADFPLIYGTYAWDRDYIAAARRAYAEGVRLHEEYYREGAYSGVLAPLAYERLGTAAELCGEQEAAAAFYIRSLRAKKRHLPALKGLLRLFSETGAAAADVIAALRGLYDEEADAGFLAEALTDTPFPYAALYYEKRSAAKFTPRRRLLLTGEVCAAAASLIEETERAAALAAAYLEAFSPEEQARIALLLPRSCREISAAPEDLRMRRRIGRLAKENT

SEQ ID NO: 1159 - protein, 314 aa, Gloeothece verrucosa
MSIELNKIPVSVIIPAKNEELNLPACLESVARADEIFVVDSQSSDHSGEITRHYGANLVQFYFNGGWPKKKNWSLENLPLRNEWILIVDCDERIPSELWDEIAIAIQNPEYNGYYLNRKVFFLGKWIRYGGKYPDWNLRLFKHKLGRYENLKTEDIPNTGDNEVHEHVILQGKVGYLKNDMLHIDFRDIYHWLERHNRYSNWEARVYYNLLSGQGNEGTIGSNLFGDAVQRKRFLKKIWVRLPFKPLLRFILFYIIRLGFLDGKAGYIYARLLSQYEYQIGVKLYELRNFGGALNIANLSQSAPVQAKSEVLTR

SEQ ID NO: 1160 - protein, 258 aa, Unknown
  Description of Unknown: Chryseobacterium gleum ATCC 35910 sequence
MYFSIKQSVVMNISGLIITYNEEKNIQAVLESFDFCDEIIVVDSFSTDKTVEIAKKFPHVKVIQNKFEDFTKQRNLALDAATNDWVLFLDGDERITPALKQEIIDELKKTGQKDAYYFYRKFFFAQKPIHFSGTQSDKNFRLFRKSKARYMAGKKVHETLEVKGTIGVLKNKLLHYSVSDYESYKEKMIHYGVLKGKELAAKGKKYNVLVQYLKTAFKFFKAYIMRLGILDGKEGYQLSYLQSLSVYETYESLKKEQN

SEQ ID NO: 1161 - protein, 245 aa, Ulvibacter sp.
MATLSVIIPSFNEAAFIEDAIRSVAFADEIILIDSYSTDETVAIATPLVTKVVQREFDNFSNQKNYALEHATCDWVLFLDADERVTHSLEAEIKATIAAPKHGGYKINFPHFYMNRFLYHHSDDVLRLVKRENAHFSGLVHEKLHCEGSVGKLTHKMLHYTYKGLNNYIAKKESYAWFQAEQLQNKNKQVTWFHLFFKPMYRFFSSFILKGGFRDGVPGMTVAAVNAYGVFSRYVKLMLLNKGMR

SEQ ID NO: 1162 - protein, 321 aa, Limnothrix sp.
MTIHPQQITSNTVPVSVLIPAKNEEANLPACLESVARADEIFVVDSQSDDRSVEICESYGATIVQFQFNGRWPKKKNWSLENLPFRNEWVLIVDCDERITPELWDEIAEAIARPGFAGYYLNRRVFFLGKWIRYGGKYPDWNLRLFKHQSGRYENLGTEEIRNTGDNEVHEHVLINPSHGQVGYLKEDMLHIDFRDIYQWLARHNRYSNWEAQVYLNLLEGRGKDGTLKGNLFGNAVERKRALKRLWVRLPMKPFIRFVLFYIIRLGFLDGYPGYVYGRLLSQYEFQIGVKLYELRKSGGQLNQQQKPKSSPRSASSSIHS

SEQ ID NO: 1163 - protein, 271 aa, Nitrospira japonica
MAGYSVYVIAYNDEPNMRACLESVAWADELIVVDSHSTDRTAAIAREFTDKVYQVEFNGFGRLRNQAVAHCSHEWVFSLDSDERMTPELREEIQRLLDQRPEADAYFVPRKNYFLGRWIEHCGWYPDYRQPQLFRKNRFRYREELVHESFECDGPVAHLTQPALQYPFRDLDHYIQKQNRYSTLMAERMVEQGRRFSILQLFTHPFGAFAKMYVQRRGFLDGMPGLILSGLYAYYTVMKYAKFWELTDGPTSTRSSAPRAASSGNRPGDAA

SEQ ID NO: 1164 - protein, 313 aa, Calothrix sp.
MSNKLPVSVLIPARNEEANLPACLASLQRADEIFVVDSQSSDRSVEISEKYGAKVVQFYFNGRWPKKKNWSLENLPFRNEWVLIVDCDERITPELWDEIAAAIQNPEYNGYYLNRRVFFLGKWIRHGGKYPDWNLRLFKHKLGRYENLNTEDIRNTGDNEVHEHVVIEGKIGYLQNDMLHEDFRDLYHWLERHNRYSNWEARVYYNILTGKDDNGTIGASLFGDAVQRKRFLKKIWVRLPFKPFLRFVLFYIIQGGFLDGKAGYTYGRLLSQYEYQIGVKLYELRNCNGQLNTAKSNPSPTDTLLPEAGQSAI

SEQ ID NO: 1165 - protein, 255 aa, Unknown
  Description of Unknown: Candidatus Shapirobacteria bacterium CG_4_10_14_0_2_um_filter_ 40_12 sequence
MSNISLLLLTKNESENLKRWKKWLPKLKRVDELVVVDDNSTDDTKKIVNNFQSEKLKINLFNRGLEGDFSTQRNFAISKAKNEWVLFIDADEEPSDKLIRFLNTEELNPKICFAFKRHLIYIDQVVAHGQAQKDYPIRLFTKNSGEFVNPIHEVWKTDSCVVRINKPLYHYSAPNLKTFINKLNTYSTLRAKELFEKHIPVNLFQIIFYPLAKFIQTYIWHLGFLDAIPGIIICTSLSFYSFLVRSKLWRLYHAS

SEQ ID NO: 1166 - protein, 250 aa, Marinomonas mediterranea
MSTVGALLIVKNEEEKLAECLDSLSTWVDQIVVVDSGSTDSTCEIAKKYTKHVYSHCEWPGFGKQRQVAQSYLTTDWVFAIDADEVVTDELKQSILKETKSTERALFSVNRLSSAFGKQIRYSGWSPDWIVRLYPREMAGYNDALVHEKVIASKDIPKRKLSGYLLHDTYESLHHYSVKTTSYLKAWSDDREGRPSSLSKALLHAFACFIKMYIIKRGFLDGTHGFVLAWLAAHSTFYKYIDLWLRGRKK

SEQ ID NO: 1167 - protein, 260 aa, Enterovibrio norvegicus
MSQAQQRASISAIIITKNEEQILPECLASLDWVDEIIVVDSGSTDNTVNIAQTAGAKVHINAEWPGFGKQKQLAQRYATKDWILAIDADEVITEPLKQSILNVLAKPSEKTLFILRRTTWVFGRFLKHSGWYDKIIRVYPREYTGYNDALVHEKIIEPQGCKKQTLDGDMLHYSYRDLHQYLVKSAFYAKSWADGRQARGKKSSIGQGITHAIGCFLKMYLLKRGFLDGKQGFLIAVLSAHSTFVKYADLWIRDNDSRAN

SEQ ID NO: 1168 - protein, 260 aa, Unknown
  Description of Unknown: Thiotrichales bacterium 12- 47-6 sequence
MSHKITAFVLTYNGEKYIEDCLKSLMWADEVMIVDSGSKDRTVEIAQALGVRVETNSWAGYGNQLNYALSVASHDWVFFTDQDEVVLPELAQNIRRELNGEMNYLAYKTGGQNSLFGHWLQWGGTIEANVRFVNRHYVTYCPVQHTYICEKLPKKTIKGVVRHDMAPTMIEWWDRSFKLATIEAEVDYAKGARFSAWKAGMFWWRFVRRYVFKLGFLDGWAGLYMALQRSMYILAYQACLLELDRSIRQPKEDPNTSKFR

SEQ ID NO: 1169 - protein, 253 aa, Tamlana sedimentorum
MLKLSGVIITYNEEDKIETCLQSLVGIVDEIVVVDSLSTDHTKAICQKYNVTFIEQAFLGYVEQKNFALSKATYNHVVCLDADEYLSETLKQSILNLKSNWVYDGYIAKRLNYFCGQWIKHTTWYPDKKLRVFDKTKAKWGGLNPHDSVKFFNKDSKAALLKGDILHHTYQSYSEFNQRVEKFSSISAESNFKLGKKAPVYKIILNPTWAFIQSYIVKLGFLDGLNGFIISVQTANIRFLKYIKLRELIKKNS

SEQ ID NO: 1170 - protein, 238 aa, Marinirhabdus gelatinilytica
MPTLNEEAYVEAALRSVRFANEIIVVDSFSTDDTPAIAKKYATTFLQRKFDNFSNQKNYALERAKTDWVLFLDADERITYPLQQEILAAMESGTHGGYKLNFPHFYMNRFLYHHSNDVLRLVKRKGASYQGLVHEKLTCDGTVGQLKNPVLHFTYKGLEHFLNKKESYAWFQAEQLQKKGKRTTWGHLFFKPTWRFFSSYIFKGGFRDGIPGLTIAANNAYGVFQRYVKLLLLNKGMR

SEQ ID NO: 1171 - protein, 253 aa, Unknown
  Description of Unknown: Chryseobacterium sp. Leaf180 sequence
MKLSVAIITFNEERIIGKTLSAIHSLADEIVIVDSNSTDRTEEICRSFSKVKFISQKFPGFGQQKNSALNHCQGEWILFLDSDEIPDETAKNDIQKIIYSEKPYFNVYDIEFKNIFLGQALKYGGWGNVKRERFFKNGFGKYSEDIVHEAFITDSPVGKLAGFINHYTYKDIFHHIEKSNKYTSMMAEKMYQKGKKSGALQVVFKPFYQFLKSYFAMRGFLDGFAGFYMAITSSFYTFLKYQKLHEIYLSKRK

SEQ ID NO: 1172 - protein, 251 aa, Unknown
  Description of Unknown: Nitrospirae bacterium sequence
MSKLSAYVLTYNEEAKVREALESVSWADEIVVLDSHSTDRTESICREYTDKVYQCDFEGFGKLRNHALGLLTHDWVLSIDADERATDELRKEIQAVLSQGPDADAFFVPRKNLFMGRWIRHCGWYPDYRQPQLFNRHRFRYREDLVHEGFELDGRVGYLRGHVLQYPFLNLEQYLQKMRRYSTLMAEQMALRERRFHVHQLVTHPLFSFFKMYGLRQGFRDGMPGLILSLLYAYYTFVKYAKLWERTKAGG

SEQ ID NO: 1173 - protein, 246 aa, Myroides indicus
MKLSVIIPTYNEEAYIADAIHSVSFADEIIIIDSYSTDQTVEIAEKMNCKILFNKFENYSKQKNLAIPHAQGEWILFLDADERISIALRNEIISAIESPGKNRAYKLQFPHFFINRFLYRKADKVTRLVYNKDIIFTGDVHEKLNIPEGNTKILNQPVLHYTYKGIYHYLSKKESYSWFQAGEMLKRNKKTNYFHLVFKPFYRFFHIYFIKRGFLDGIPGLAGATFDAYGVFARYAKLILLQKNLK

SEQ ID NO: 1174 - protein, 261 aa, Unknown
  Description of Unknown: Candidatus Roizmanbacteria bacterium GW2011_GWA2_35_8 sequence
MKDDISAIMITKNAESTIENSLKSVSGWVREIIVVDSYSTDKTLEIAKFYNTKIFVHNYEGEGKQRNFALSKARSNWILVLDADESVTLKLKNEVLKTTKSTKLSGFNVPIQSHYKKRKLNYGGENYRKMILFKRHKGKSTLDEIHAVCQIHDKKVGVLKNPLNHFSYNSYWQVLKKFTSYSFRAAKVKAKKNESPSLKKVFIYPIHMFYARFIKDEGYKDGLFRIPLDLAFAYMEFLTYFILLCRPLFDLRGRKRAVTKG

SEQ ID NO: 1175 - protein, 318 aa, Limnoraphis robusta
MTSTASKIPVSVLIPAKNEEENLPACLASVARADEIFVVDSQSEDRTVEISESHGAKVIQFYFNGNWPKKKNWSLENLPFRHEWVLIVDCDERIPSELWDEIAMVIQNPEYCGYYLNRRVFFLGAWIRHGGKYPDWNLRLFKYKQGRYENLKTEGVRNTGDNEVHEHVVMSGSQKVGYLKNDMLHEDFRDMFHWIARHNRYSNWEARVYYNILTGQDESDTIGANLFGDAVQRKRFLKKVWVRLPFKPFLRFVLFYILRLGFLDGRAGYIYGRLLSQYEYQIGVKLYELRTFGGHLNVSKPSAEQSNSVPSVPQAVQK

SEQ ID NO: 1176 - protein, 492 aa, Selenomonas sp.
MKISACVITKNEAENLPRWLRSMRVFADEMIVVDTGSTDATVEIARMGGAQVFRFDWINDFAAAKNFALDQATGDWVVFTDADEYFTEESGPRVRPLIEEYDKKEKMDGFIVHLVNIDMDTGALMGTSAEVQRIFRRAPHIRFVGSIHEHVENLSGDVGREMAMAPGLTLYHTGYSPRIIKQKSKRDLELLLARRARGAHKELDEYHLMDCYYTLEDYPQAAHYARLALDSEHRPVGSEDRPHAILLQSLILMKAADAEITAVYDAAREVLPEKADFPLIYGTYAWDQAYFTTACAAYVEGIRLHEDFYREGDFSGVLAPTAYVRLGEAAALCGHMEEALLLHERAVRMNPHCAPLLGTFIRLLDRTGADDATVIEVLNGIYDKNVDAQLLAAVLGGTSFRLAALYYDHRANVHFSERRRFLLAGDVGSAAAMLVEDMERTAAVAAACGAGFSPQQQGALALLLPDSCRENSAAPEAARMLRRIGRLARGMK

SEQ ID NO: 1177 - protein, 257 aa, Halothermothrix orenii
MAENSIGALVLTYNEEDNIKDCLESIKWVDEIVVVDSYSDDDTIDICKEYTDKVYARKFDNFSSQRNFGLGKLKTDWVLVVDADERVTPELKEEIYGALQSGPFLAYQVPRKNYFLGRWIKYCGWYPDYTLRLFKVSEGDYKFSGKVHEDVRVNGKVGILKNPLVHLTYRDLSSYIKKMDLYSTLWAEEKFKKGKEVGLLYILLRPPVEFIKKYFLKRGFLSGSEGFILSIVSSYYVFLKYAKLWEQNKSLSGAEDH

SEQ ID NO: 1178 - protein, 304 aa, Selenomonas ruminantium
MVRISACYIVKNEEQNLSKSLASVADAVDEIIVVDTGSTDRTMEIAKSYGARIFEQNWQENFAFHRNYALEQAAGEWIIFLDADEYFVNAEGLDAYLNRADAFPTCEGMLLPLININPDTGTEQAEIIDRALSLRVWRNKKNFRFMGCVHEMLYVFEEENTIRPLKTITAHDKFTLHHTGYRRNIMQEKHKRYLAMLHQEIEKHGEQPLSARYLADCYFGLEDYEQAAYYASRAIHREQELGITTVAGFYKLYRYWLESGRKLNYSKDEMTKIAQKALIETSKEAASQKMQEFIACLLNEGVLD

SEQ ID NO: 1179 - protein, 254 aa, Flagellimonas pacifica
MQKLTGLLITYNEEDNIKRCLDSLAFADEIIVVDSFSTDATTEIIKEYYPQVKLFQRPFKNFTDQKSYALAQSSNDWVFFIDADEEITPSLQEELKNVLASKEIKTNGFWIYRQFFFMEEKLRFSGWQTDKNLRFFRKSKSKFTAWRIVHETVEVDGHVGRLEKKLNHFAYDDYKDYKNRMIKYGRMRAQQEWPKEKKSYPFGQILRPIWKFFNHYILRFGILDGKKGIVICYLNALGVHARYRELNRLHKKQY

SEQ ID NO: 1180 - protein, 248 aa, Unknown
  Description of Unknown: Elusimicrobia bacterium HGW- Elusimicrobia-2 sequence
MKVSVIVIALNEEARIVDCLESIRWADEIIVVDTGSSDGTVDICRKYTDKVSQSEWLGFGPLKNFAVSKTSNEWVLNIDADERVSDELRAEILALSSNPAIAAYNIPFHNFFMNRRLRFGGLGGEKHIRLFNKNTAGFGAEAVHESVAVRGKTGNLKGHIAHRSYRDLSAYFQKFNLYTSMIAREKFQKGKKFPVSAFFRIPYEFGVRYFFKLGFLDGVAGFIYASISAFYAGVKYFKLYELTAGLKE

SEQ ID NO: 1181 - protein, 252 aa, Winogradskyella arenosi
MLKLSGVIITFNEEKNIEKCLSSLSKVVDEIVVVDSFSTDNTKTICQKFNVHFIEQEFLGYIEQKNFALAQAKYDHIVALDGDEALSEPLQKSILALKSNWVYEGYYANRLNKLGEQWIKHTTWYPDKKLRIFDRRKAKWTGTNPHDRIRLLDGTMKTGFLKGDILHTNYQTYSEHNQQIEKFTTIAAEAYFKKGKKASLFKIIINPTWAFFQSYIIKLGFLDGFNGFYISVQTANIRFLKYAKLRELQKKA

SEQ ID NO: 1182 - protein, 265 aa, Klebsiella huaxiensis
MLKLSVCLLTCNSSRLLREVLPPLLKVADEFIVIDSGSTDATLQICQQFGLTVHHHPYTAHGAQMNYATSLASHDWVLCMDSDEILDDDVVAAILALKAGDEPAPDCAWRLPRYWFVLGEEVRTIYPVSSPDFPVRLFNRTVARFNDRPVDDQVVGYKHSSKLPGFVRHDTFFSLHEVFNKLNSYTTRLVKYQKVRPSIGRGVISAIGAFFKWYLFSGAWRKGKVGIVTGLYATFYSFLKYFKAWYAHQDKQEPVAEKRPDSRQI

SEQ ID NO: 1183 - protein, 255 aa, Actinobacillus seminis
MPTLSVAMIVKNEEHELAQCLDSVKDWVDEIIILDSGSTDNTPKIAQQYGAKFYRHTDWQGFGRQRQITQQYVTCDYVLWLDADEHVSDKLRQSIQKAVSADLDNTAYQICRLSTAFGKQIRHSGWYPDYVLRLYKTQAAQYGDELVHEKVHLPPNTTVKKLDGDLYHYTYKTVHHYLSKVAHYSKAWAEQKAAKGKKTGITQCVTHSLGCFVRMYILRAGFLDGKQGFILAVLSAFSVFAKYANLWILNLKNRG

SEQ ID NO: 1184 - protein, 264 aa, Unknown
  Description of Unknown: candidate division KSB1 bacterium sequence
MPEARPLLSVIIITQNEAHLLRDCLASAAFADEIVIVDAESSDDTVKVCQEFSASSPALSVKIFVRPWPGFAAQKQFALAQATGEWVLSLDTDERVTPELAQEIQTLIKNTPPQAGYYAPRVSTFLGKFIRHSGWYPGYQLRLFRRDKTTIINSHVHEGFVVDGALSHLKHDLLHFTHRTLEESLARMNRYSSLEALDRSGKRVYWWDFFVRPFAAFWNKFIAHQGWRDGMHGLILALVTAMVKLALYMKLWEAQQSRRAENQV

SEQ ID NO: 1185 - protein, 513 aa, Sanguibacter gelidistatuariae
MSVLSAPKISAVLIVKDEEAVLDECLAALHWADEIVVYDTGSSDATREIAAKYTDVVVEGYWDDDFGAARNRALDHATHVWVLNVDADEVFVGPPEAIRSALRSGVTSRSILVESVDENAGASGTVSIIRLFRKDLYCFAGRLHEQAVQRPGATAPLSPRPLHHVKLLHSGYEAARIIERGKGERNLDLARRDLAESISRGDSDAAIALRKANVARSMSFGGSFDDALSFAEAAFAEGALADRDLATLAKAMCATAMLLDDNEKVERWWQRWHDSGENPVWALAWIAPWLARRGMVDELLSVLDRIPTTVVDPSGERFLKVDLAPLHVWALLMSGKHKRAVGVAIDAARKGRPSLVPGALTELFDHAGLHVSALLTEIDDSLWMTLVMQCVQDGSRSSRRFLEAMNAARPGDAAVLLAGSALAPRLSLEEAASWAIELRQQGFAEECPLVAIAGNEALDPRQRAIAGAMAVDIYGDDRALPGLGDALARVAPDDEAELIAQLDIVAPGLVSAA

SEQ ID NO: 1186 - protein, 249 aa, Unknown
  Description of Unknown: Flavobacterium johnsoniae sequence
MKISGLVITYNEEKNIGKCIDALFRICDEVIVIDSLSVDNTVKIAEEKGAKVIPQVFLGDGPQRIHGLQYCKNDWILNLDADEILAEDAEKFILSGKYENQDFDVYTFRLYNYLGGKKIDFAGWYPDKTARFFNKSTASPSKDRVHQKVCGSSKSHLKVHINHYAWENFDQFLNKKNLYTTWHAQQLYDQGKRVNAFKPVLNGTVSFIRCYFFKKGFLNGLDGITFSMIQAFFSYMKYAKLLKLQKSNK

SEQ ID NO: 1187 - protein, 397 aa, Bacillus methanolicus
MNFRRLSLCMIVKDEEDCINRCLSSVKSVVDEMIIVDTGSSDRTVEICESFGAKVFNFPWNESFSDARNYGLERATGDWILWLDADEEVDASDVYRLRDILYSDDDLLNVHLINYYGDRPDPNKTFDIAHTRLFQNHKGFKFKNKIHETLNVNEVFAASDKSPEIKTVPIKIYHYGYLDPVNETKKKFERNLSMLEKELEQKDYSPWIEYHIASEYYRAKQYTKAFDYVNRAIMGFLKQLKTPPSLLYRLKYSILISSGSIDGAWPGIDRAVSLYPDYVDLHFYKGIILYAKDSFKEALEVFEHCLELGEENLQHLTLKGVGSFQALYYKGCCNEKLGQIEEAAKAYAQAASLSQTFVSPVDALRKLTAEHPDIFGDLPEDCDNEALITRVLSKEIV

SEQ ID NO: 1188 - protein, 318 aa, Vibrio scophthalmi
MKYSVIVPIYNTFDYAQRIVEWFVQEVSSRSEQDVELILVDDGSKQGPNYSIDHQSIRLIRKENGGVSSARNVGIENARGEFILFLDSDDKYQPGLFRYLEKVLLERTNLDTILFSFEKVSDDKSEQAQNRAQHVTGQQALSQYLTKEIRLHICGLMVSRRLLSEHSLRFDESLHFSEDLLFIIDYLSFAHDCYISDEILYFHVMRSGSAINSPLTQKDTTHIDAFAQISTQAKKSAREQDVNFFISTCYINLIKFLIKNKTQDKDVLEKIISNQQFLFGELDAKLSRYSVIVMVLRLLFKLDGLTQHRVLRRLSYTG

SEQ ID NO: 1189 - protein, 367 aa, Bacillus subtilis
MKRPKLSVCMIVKNEERHIARCLESVQHIADEIIVVDTGSNDRTEDICSSFHAQIYHHKWEQDFSQARNASLQHAKGEWILVLDADEELDPDTGSLLPSLLTDSLPSLGCVNVVNYTGKQWDENEALEQRQIRLLRNQRNITFTGRVCERPEGQEASATFSLPCIIHHYGYLEQEAQQKHKRNMSLLNAALLTSSADPSLIFQKAAEYDRGNEHDKALRLAIDCINEHKRKKQIPPPAYYYLKYKLLIDAERYEEAEQDINEALAHYPDYCTLHYYKGIIKYQLKKAREAITAFEACQQTNSENHLYLQVKGAADFRSSCWLGVCHAELHQPMTAVLYAQKALKANPKCSRAQRLFSELTKDQAAHA

SEQ ID NO: 1190 - protein, 249 aa, Unknown
  Description of Unknown: Flavobacterium sp. Fl sequence
MEISGLVITYNEEKNIGKCIDALFRICDEVIVIDSLSADNTVKIAEEKGAKVISQMFLGDGPQRIHGLQYCKNDWILNLDADEILAQDAENFIMSRKYENQDFDVFTFRLYNYLGGKKIDFAGWYPDKTARFFNKKTASPSKDRVHQKVSGNNKAHLKVHINHYAWESFDQFINKKNLYSTWHAQQLYEQGKRVNSFKPILNGTVAFVRCYFFKKGFVNGLDGLTFSMIQAFFSYMKYAKLLKLQRKNK

SEQ ID NO: 1191 - protein, 538 aa, Bacillus sp.
MKRRLSFCMICKNEEKHLPRCLQSVASIADELIVVDTGSTDKTIAIAEQFGALVLHHQWNHDFAEARNIGLCAATGDYVLFLDADEELHPDDQLTLRNVVDTTNDEAIFLKIHNYVGKIETEQNRDISPVLRLFKRHPHIQFEGRVHEQIGFSISRTYENPSYAFTDIRILHYGYLDEVVQEKEKSKRNMTLLKKAVEEDDSNPFHYYNLAGEYIRIHKYEPALHLLRKAKQLCQIETMAFGHLVIKKEVFCLVMLGNVTEAIETCRAEICKFPDYIDLYFLWGKCAILLGHITEAKEVFTKGYVITSVPSYYSIDAANQTAHIPFHLAVLEEHDGNVYKAKQWYEILLLHHPTYPHAFFRYIRLCKTYQLDNWQPFLRNLQIWKENEQTKTFLHMLMLGGHFQFVQSIVKEHQLKEAIPQLFEICINEGSPKEQLFKRRNLSQHFQHFLYTGNFPDQATLSKEDYETLPLLFLLSSADEQAKLLKLWRYNMLLYKDNEHAPQFALHLVQRANYLLKGATDPAICSISYHLPLLIYNE

SEQ ID NO: 1192 - protein, 786 aa, Sorangium cellulosum
MTPVYSVIVVTWNNLQYTARCVDALLRTLPSDAEVIFVDNGSEDGTPAYLTDVARRLGDAAKTVFLDENLGLAGGANRGLEVATGEYLVLLDNDVVVTPRWLEGLRECMEEAPRAVPGARRVGLVGPVTNSARGPQKVQNPPPFQPEALNELAAEHREAFRRRWAPSFALSTFCLMMRREVYAEIGGLDERFFPVGHEGADLALRAQERGFECMIASDVYVHHEGSATLSKAFPGAQGGLGGAELFFEKWRARRAGKTRLVAAYRVRDAEATLRESLDATARFADAIVVLDDGSTDGTGAIARSHPAVARYERTELPPGVDDRRDRDRALQLAAELSPDWILAVDADEVFEMDRARAERLMQLADPHIKALGFHWYTFWEPTRTYFRADGALGAMSGYRMYRNEPGLRVARGEGGLPGGGIPEMPDGCGRFTDVRVRRLGYDTEASRQARLALHARPDRYAPPRAGAPPELADLASNTVTLRRYAPASGVSLCIIARNEAERLERFLAFLEPFVDEICIVDNGSDDATVEIARRFTDRVRVHRTDRLDLAEVRNVGLGMATRPWILSLDPDEELAHWDLPRVVRLMDDLDVHAYSFEIANHQKDGPPVMTIAVRLFRNDARIRYGRAVHETVQPSLDRHPELVVRAAGVEIQHYGFLKDDGVMEEKLSRYLEANQRMREEDPADPMPWYNEGLHLLNDGRDDEAIAFLERAMVLGQHFLSPRSSLAQIYQHRALALWQSMVAELPPGHPVRPTAEESAAALGRITPARMLVGQARRRRLQGPSHGE

SEQ ID NO: 1193 - protein, 546 aa, Unknown
  Description of Unknown: Microgenomates group bacterium GW2011_GWC2_46_7 sequence
MTSTINHQPSTISVIIPTVNAHEELDLAIASIKKNSDLDIEFCIIIDPDMNTGKVNEDILKVCKKHAVKAWVNKDNLGPYGNWNRGAEVATTDYLVFATDDQYFAPHWDSNLLKYWQPKRLVSGRLIEPGIIPVYKTNIQRDFGVLPSEFKEKEFIAWCASRRATGYTQDGFFIPMLQNRADYDALGHYPTAGKFGTSTAVSNDYLYVQAALKKGYQFGTAEDSYSYHFQASSWKKKTLKPSIAAVVLTKNEETDLRKCLKSLNWASKIIVLDSGSTDKTLSLAKQAGAQIFSRPFDNFSAQRNFALTKVGAFNWVLMIDADESCEPTLAKELQFFAKDIYLDGVRVPRKNYIFGRWIKHCDWYPDHRLVFFRPKMVTYTVGVHERVSFIKGNGTVATATHHLIHHNYDTIHEFVVKNLVDYPREYAKVLDADKVNFTALDLLSKPLSEFMRRFFLTEGYKDGLSGLVLSALMGVQTLVAYAYLWEIQGKRQDLTTQETQAIFTKLKGKGSELTFWLTTLAVESATGATKIFHRARRKLLKLTQGI

SEQ ID NO: 1194 - protein, 251 aa, Unknown
  Description of Unknown: Flavobacterium tistrianum sequence
MEISGLVIAYNEEKNIGKCIDALFRICDEVIVIDSLSADNTVKIAEEKGAKVISQPFLGDGPQRIHGLQYCKNDWILNMDADEILAKDAEDFILSGKYKNQSFDVFTFRLYNYLGEKKINFAGWYPDKTARFFNKTTASPSKDRVHQKVSGNNKAHLKVHIHHYAWDSFEQFINKKNLYSTWHAQQLYDQGKRINGFKPVLNGTVSFVRCYFFKKGFLNGLDGFTFSMMQASFSYMKYAKLIKLQKAKKDN

SEQ ID NO: 1195 - protein, 337 aa, Oceanobacillus chungangensis
MIVKNEEESIDRCLNSVIDVVDEIIIVDTGSTDKTIELCKNYNANIYPYTWDNHFGNARNYGLSQATGDWILWLDADEELDSSKKFNLKEFITEKKDIFFLLPVLNYYGDNLPVNTNHFFSYYQPRLFQNNKGIQFVNRIHETPQYPDEISIDEYKKIPLPIHHYGYMKDVVTEKNKLQRNIELLYMEYKKEEHSPWIEYHLANEFYSKKNYTVAYEFVKQSILQFLLQGLKPPALLYRLKYAMLMETNDFEGAWPNIEKALLLYPDYVDLHFYKGIILYEQKNYPEALEAFEKCLELGDDHPQYLVLKGVGSFQATHYIELCRARIDETNHNSPKQ

SEQ ID NO: 1196 - protein, 481 aa, Paenibacillus sp.
MTSEINHIITLIQSNKPREAEAELFQAIRYKPLEAQLWVLLGETLLLQQQAGAAKRVFDRAWLLDPQAKWVNHIYKAMQKIPQSASRPDIEDLLYVPKVTVTAAILSHNEAANIAKCIVALQGAVDEILLVDSSTDDTRKIAMQYPKVKVVPIVWEDNFGAARNIGLQHVTTDWVIWIDADEVLIPEDVGAIREVASVYDHSNITPALHVWHLNRINGTVQHDFSQVRMFPAQRGLRYYGRIHEQIATDKGVYQLDTYRRAVKIRLDHNGYDPAVIQSKGKLERNLRLLKLMIEEEPENPGHWLFYGRESLGIGLEEQAVTSLLEAEHLGLQTPLFGRMPEIYRLLIQIMMQRKNYAEAEAYCHKALAHSPDFPDVHYLLAQVRMRQADELLRLAETSIKQSLSSLPNYRGSVSADYHIGEWKAATSLGELAMRSGKLARAKQIFSRLKDKPGATEILSAKLNAIETERQRLNQVDQQHQK

SEQ ID NO: 1197 - protein, 292 aa, Unknown
  Description of Unknown: Candidatus Rokubacteria bacterium sequence
MIPVTVMVTTRNEEANIDKCLRSVHGLVDQILVIDSESEDQTVPIARRYADDVANLAYVHGAIIPWIFQWGLDNLPIRNEWVLILEADQVVPPDLGQELVRLFGRGRIEEDGFFIRRKQIFRGRWIRFGGYGSKYLLKLFRRSRGRLDEREQDTRVYVRGRVGKLRHSLVEENLKESEILFYLAKHLRYADAFAREEFERRKGGMAWLVRPSLFGTPDQRTLWMKAAYYHLPLYLRAALYFGYRYFFRLGILDGKEGAIFHFLQAFWFRLVVDVRLEELMKGQTRRADDPTT

SEQ ID NO: 1198 - protein, 261 aa, Cylindrospermum stagnale
MISIQEKITPLILTYNEAPNIDRTLQTLQWAKTIVVIDSFSTDETLEIIYAYPQVQVFQKRFDSFATQCNYGLEKITSEWVLSLDADYVVTDELINEIKALSATPGIESYSIRFKYCIFGKPLRGTLLPPRKVLYKREKAIYKPDGHAHRVCVQGESRMLSAYIHHDDRKPLSRWLWAQDRYMVIEAKKILETPVSELSLSDRIRKQKILAPLIILVYCLIIKGGIFDGWQGWYYAFQRVLAEILLAIRIFEYQKLPSSDA

SEQ ID NO: 1199 - protein, 314 aa, Sphingobium sp.
MTDAAPFFSVVIPLYNRADIVGDTIRSVQTQDWQDFEIVVIDDGSRDNPAPVIDAIGDPRVRYIRQDNAGGGAARNHGIEEARGRYIAFLDSDDLFLPGKLSIMAKALADDDGRTVLYSRMKVDRGVDRYWIRPDRGIRDGEDVGEYLFCANQFMQTSTMVVPAGLARKVLFDPALKKGQDLDFCVRLQGAGARFRMIEQPLTVWLDATEAGRTSYVRGYETSLDWLDRCGHMLTDRARRGYRATVLAYHMAPIRPVMALRDLIVGLFAGGVPPRVVARQVLRSYLPKPLYRSLVNGFVLRFGKGEAAHGGARS

SEQ ID NO: 1200 - protein, 267 aa, Campylobacter avium
MKNNKLPLSACILVKNAQKHIKECLENLQDFDEIILLDNESSDDTLKIAKEFNESYKNLKIYQSEFIGFGALKNLALSYATNEWIFSIDSDEVLEKECLDFLKDFFKSPPSKDIILALPRKNLYKNEWIKASGWYPDYVIRVFNKNYTKFNENIVHESVIVPKDAKIKRLDFGIRHYACSSIEDIVKKMNLYTSHSAKEKFKKGKKASISGAIFRFFFTFFKDYFFRKGIFYGYKGLVISLMNAQGAFLRYIKLYELNKDEKASHTS

SEQ ID NO: 1201 - protein, 250 aa, Unknown
  Description of Unknown: Sphingobacterium haloxyli sequence
MGVSGLVITFNEEKHIEKCIKGLQKVCDEVIIIDSHSQDKTVEIATSLGATVISQSFLGDGPQRTFGLQFCKNEWILNVDTDEFLDHDCYPFFEKKEYLQLPYDAYSFKRRNFLKNKEINFADWYPDYACRFFNRNTASPSSHLVHQRIIATNLKKSDMHLLHYAWDSFHQLIAKKNQYTDWQVEEFIKKGKKVNALSPVLHGVTAFFKAYFLKKGIFHGIDGVTFSLIQSFFSYMKYAKMLEVQRQRNK

SEQ ID NO: 1202 - protein, 632 aa, Alicyclobacillus herbarius
MKLSLCAILKDEAAVVRTMIESAVDIVDEMILVDTGSSDGTVEIIEEYISKYPDVIRLYHFQWVNDFSAARNYSLDQATGDWVLVLDADEFLDPSRKHSLREIIETTDAEGVSLVQKSYMGSIRSPNNMICVDTVRLFRNRHRYTRTIHEQIIPSIISSGGRIERLDIPIHHIGYTDEYRNMKGKSQRNKMLLEAEAQTLTYRDESERWYNQHQRLVEYVVAGEWERAKELGRTLVEDIKGCCGLRRKEWPPYGPRIYRLLSVALIELGERSYAERMLKEGISVFSDSANIWLLYGELCLDDERYTLAMEAMDRCRSIKNRQTDYQAEGIEGANTFIPARHLGRLWLRLGDEVTAREWFMTAFQEGVSAPGIIPWLVMLTPSQEFRELLSSTIPSADRYKEFIEFVAACGYEDTEKCIDDAEKRWGTRLDSSRARFAHEVRSGLAPSTRNPLWLGLYAYEQGDKSAAHEYWGQAGAMGQYLMRISMGKDQAITWNIAPVIQDLLAANAINFLRHHVHKATDLRVAFPIITHTTLHTGLLSNEFLNREPAFHEEADWKARMAMSQGDAHRAKEWLDKALIPSEEVRSVIGYLLECDLHPEGTENILRQARKVYPGSKLLSQIWLSRLKATPVV

SEQ ID NO: 1203 - protein, 253 aa, Unknown
  Description of Unknown: Flavobacterium aquaticum sequence
MAISGLVITYNEEKNIGKCIDALFEVCDEVIIVDSLSADNTVKIAEEKGAKVISQKFLGDGPQRTHGLPFCKNDWILNLDADEFLDKDAKEFILKEKYLEGNYDAFSFRVKNFLADELIDFSGWYPDHKVRFFNKKTAKPSEAKVHQKIETTNEKKVAVHILHYGWESFEQIIAKKNQYSTWHAQQLFDQGKRVGAMKPVINGLTAFIRCYFFKKGIFNGIDGITIALIQGFFSHMKYAKLLKLQRQEKLLKR

SEQ ID NO: 1204 - protein, 1918 aa, Unknown
  Description of Unknown: Syntrophaceae bacterium PtaU1.Bin231 sequence
MRRVYQSYADGPSHMALPADGEAIKKSGLRRDYFLNELLEFTAPVGRLLDVGCGWGAFLDNARDRGFEVQGIEVTRKCVAFANERLGIPVTDEPFEDVAFESGSLSVVTMLHVLEHLPEPSRAIENAYRSLKPGGIFCGIVPNIESLCSRELGETWYWLDPQYHYVHYSPSTLKMHLESAGFTVERLYTATGDYGRENVLQVIQRKQDVAAGRLEALIEQIERDGLGEEIRFFARKPTHAHRPAESPGNHKDSDRGEAATAPLPKGCASIIIPVYNQVEFTSRCLEALYANTPLDRVHEVIVVDNASSDGTAEFLEKARKRYPKLKVLTNPENLLFARACNQGADVAGGDVLVFLNNDTEPLPGWLDRALERLDQDDSIGAVGIKLLFPDGTVQHCGIQFFRNAHPSYTVWPLHRHLHAAADDPRVNIPGDVDAVTGACLFIRNRLFRRIGGFEERYGMYFEDTDLCFKVRRAGNRVFYEPASVVIHHEGKSSPGRDVVHSLKEASARRFFKIWREDLIRFELDTLVEKEEGRYAYMPENFWPEEVNPQAVVRMHALLANFPPCYVHFGGAGDALLLLSTFYDKDPGQTVVSVSNSTAMMRSFFDAFPKLKKVIFIPFPKNYTWHFIARQFFKSSDICQGMGATPTTTADYREWNADLDIFTTYGIRRRPEWAVRFDKCRIEPIQLVIQPRGSLKGMVGSKRNVIPPKDWPRLLSYLAKKGIRPVVIGTPDEAEEYPCLDKALDRRSYSFTEQLRLIAGSDFFVGADSWGKTFAALAGIPTFVFHAVRGDDLKGWKDDSDHVFLDPWEEITVVKDLGDFRRAFDAVRHAGDASGDGLKIRWEGSQFVHHSLALVNRELCLRLIAGGCELSVIPYERDQFSPKEEPRFKPIAERVRGPLSGPVDVHVRHRWPPDFNPPPEGHWVMIQPWEFGSLPREWVRPMSEHVDEIWVPSRYVRDCFIRSGVPAERVTVVPNGVNTDLFKPGNAPYRLSTKKGFKFLFVGGTIQRKGIDILLDAYSRSFSSADDVCLVIKDMGGQSFYKGQTAKEWIRRFQGDPDHPEIEYIERTLSDREIAGLYTACDCLVHPYRGEGFGLPIAEAMASGLPVIVTGHGAALDFCDETTAYLIPAKEVRLREKRVGEFETVDFPWLAEPDRDSLVGLMRHAASHPEEAASKGRLAAEFIRSRFTWDRAAEAVKKRVRELRGKPILRLEQGSESLHRLKPPCGTPETRRCEATAHHESSTVDTGVSISPYRAKAHELYQRGNLRAAAEAYLDAIKATPWDRECYLSMAEMLIGTKHYKEARDLLGEEMIGPPDARTLSLLGGTQEGLGNDDEAERLAAQALERTPGFAPALNLQGVIAFKRGDRADAERLFSEAAIADPSWGEPLTNLGVLLWAAGEKEKSLDLLEKGFALSPCAPDLAERYHAAAVAMGLHNRAERAFRDARSRHPQNRTIAFLLIDLLISQGKDEEAMARIEAAMAAFEVDDGFIDAALAVRGKIGPMAIERGNGRPTLSLCMIVRDERANLVRCLSSVKAAVDEMIVVDTGSTDRTRDLAAVFGARVFDFAWTDDFSSARNFSLSKAKGDWILVLDADESLSPRDHGALRSLIRKSPKRIGGYDLATRNYVMEANTAGWTANDGTYPGEEAGTGWYANRKVRLFRNDPRIRFSGAVHELVEASIAAAGMEIAACDVPVHHTGKLDRARVTEKGERYFELGKKKIEETGGTPRAVLELAVQAGELGRWDDAVDLWRRFLGVSPGREVGRAYVNLINACLNADRFYEALAEARKAAALGNGTKELLLNCAAAEFFAGNLRKAVRSTERLLQKNPDYPPALGLSAMVLALTGQEERGLKALRRLSQKGFEARSQLLPAIEKLRTAGRGEQANRLLEFVDRHVPGAADGRGSAPDRLTHRVGAGLPG

SEQ ID NO: 1205 - protein, 251 aa, Unknown
  Description of Unknown: Chryseobacterium lathyri sequence
MKLSVCYIVLNGERVIEKSISSVYEIADEIIVVDSFSTDKTEEICMGFPKVKFIRKKFHGFGCQKNYTLSEASGEWILFLDSDEVPDKMAVDAIKEILTSSNPSYNVYEIHFNNILLKKTIQYGGWGNVWRERFFRKGHGKYSDDLVHECFITQDKKGRLPGNIDHYTYKSIAHHIEKINNYTQLMAEKKVLNGKSVSLFKIIFSPFYDFMKTYFFKLGFLDGVAGFYISITGAFYTFLKYIKINEIHKFK

SEQ ID NO: 1206 - protein, 259 aa, Nitrospina gracilis
MGSHQKQKMLSVILITKNEAVRIRQCLESVKWADEIVVLDSGSTDGTPDICREYTSEVHDVDWPGFGLQKNRALDMATGDWVLSVDADEVVTDALRDEIERTLRKPKYNGYRIPRSSHYVGRCIRHSGWTPDYVVRLMKKGSGAFTNSLVHEKLEIAGKVGRLKNPLIHYSFDTFEDVLDKMNRYSTYNAQMLYEQDRSSSLLEAVARGMWAFFRTYFLKRGFLDGRQGFQLAVSNAEGTYYKYVKLMELHRKKKSEKP

SEQ ID NO: 1207 - protein, 268 aa, Lelliottia amnigena
MLKLTVCLLTCNSARLLREVMPPLLTVADEFIVVDSGSTDSTLAICREYGLSVHHHPYAMHGAQMNYAIDLATHDWVLCMDSDEILDAETVDFILALKAGEAPAANSAWRIARYWYVLGEEVRTIYPISSPDYPVRLFNRTRARFNYRPVDDKVEGNVQTTKMPGRVRHDTFYTLHEVFNKLNSYTSRLVKYQKVRPSIGRGVISATGAFFKWYLFSGAWRQGKVGVVTGLYAVSYSFLKYFKAWYLDQDKEQEESTAEKPVDSHLIE

SEQ ID NO: 1208 - protein, 252 aa, Unknown
  Description of Unknown: Chitinophagaceae bacterium sequence
MELLSVVIITYNEELNIAKCLQSVQGLADEIVILDSFSSDSTVEIARQFGAKVYQQKFAGYVQQKNSALALATHNRVLSLDADEELSSGLFASIAAEKKNFQMKAYKMNRRAFYCGRFILHGSWYPEPKVRLFDRRAVTWGGLDPHDRVVLPAGIPIGHLKGDILHYICDSVEEHRLRSVNFSNIAARSLFDAGKKTNWFKILASPAWFFLVDYIFKAGFLDGWRGWKIASIQTRYHFEKYRKLRKLWKIAK

SEQ ID NO: 1209 - protein, 259 aa, Unknown
  Description of Unknown: Candidatus Pacebacteria bacterium CG10_big_fil_rev_8_21_14_0_10 _36_11 sequence
MKKISVVLATYNEEKNLNMCLDSVVDLADEIIVVDGSSTDRTREIAQEYKAKVIKTTNKPNFHINKQMAMDKATGEIILQLDADEVVDHDLKKFIRSLAKFSDLTKLSEVAWWVPRKNLFLGRWLTKGGQYPDPVIRLYLANKARLPQKDVHEQMQVDGEVGWAKGHLLHYSNPSFTDYMRKFNTYTSFKAQQWADEGKRAQWWGIGYYMIWLPLLTFLKLYLRHRGYVDGYPGFVFALMSGLHFSIAYLKLWELQQKL

SEQ ID NO: 1210 - protein, 393 aa, Devosia insulae
MCRRRLDGESSPGCERHEFVSQPPRGGPTISACLIVKNEQPFLDGCLNSLRGLVDEIVVVDTGSTDASIDIARAHTARVLGYVWHDDFAAARNFGLDAASSEWILYIDADERLIKTTRDDLRAGLGAPDVYAARLLFRVTSNSTLYREFRLFRNDTRLRFKGAMHETIVPDLSLLQRDAGARVIDTTAKVVHLGYDGDMTTKYRRNLPLLRASVEREPDRSYYWHDLANTLAGLGELDEAIAISGQGLARPEPADRPGRIMRSMLIHTHARLRMQRGEDMRELIAVGLAFHPENWSLLFLRARASVNAGAFDAAIDDLLPLLAQDADTVVDDILAYDRRIFGAHAHDLMGVALLRMGDRPRAAEAFGRAARAAPDVLEYRVKAAALGGAAASA

SEQ ID NO: 1211 - protein, 254 aa, Niastella koreensis
MTPLSVVIITYNEEKNIGRCLESVREVADEIIVVDSLSTDNTKAICASYNVKFIEQRFLGYIEQKNFALDSATHEYALSLDADECLTDELKKSILAEKQKGLTFDCYRMNRLSSFCGQWIKHGNWYPDRKVRLISRKKGKWGGVNPHDKIEMNEGATLKQLKGDMLHYTYDSIDQIMEQTNKFTTIQSKAMYESGKRANLIKIVINPFIAFVSGYIFKAGFLDGYNGFIIARYASHATLAKYAKLLHLQRKNKA

SEQ ID NO: 1212 - protein, 257 aa, Unknown
  Description of Unknown: Candidatus Pacebacteria bacterium CG_4_9_14_3_um_filter_40 _12 sequence
MLSVVLAIYNEEQNLARCLDSVKLIADEIVVVDGSSTDNSVEIAKKYTKKIIETTNKSNFHINKQMAMDAATGDIVLQLDADEVVDDDLANYIKQLKNDIKEGTTPTDSAWWIPRKNLFLGSYLTKGGQYPDSVIRLYLKGKARLPQKDVHEQMEVEGSIGTANGHLIHYSNPTFADYLRKFNTYTSFTAEKLHKKHTTISFTTSLDYLVKKPLVTFFSIYARHRGYVDGIPGFMFALMSSLHFPIAYIKLWELSEK

SEQ ID NO: 1213 - protein, 260 aa, Unknown
  Description of Unknown: Chryseobacterium sp. YR477 sequence
MALSLAIITYNEEENIVRLLDSISDIADEIIIVDSFSTDKTKEICTQKYPQVKFFEKKFNGYGEQKNHALHLCSHEWVLFLDADEVPDQNMKRSIQNIVSSESTEFNVYKAKFNNHLGIHLIRYGGWGNVCRERLFRKKYARYSDDKVHEFLITDQKIGLMEGKLDHYTYKSIHHHVSKINRYSDMMAEKMFEKGKKINRFKIIVSPIFEFIKVFIFKAGFLDGFPGFYVAKTMSYYTFLKYIKLREKIRRLEIEQNTVK

SEQ ID NO: 1214 - protein, 251 aa, Unknown
  Description of Unknown: Chryseobacterium indologenes sequence
MKLSVCYIIFNGERIIEKSIRSVYEIADEIIVVDSFSTDKTEEICTGFPKVKFIKKKFEGFGDQKNYTLAQASGEWILFLDSDEVPDEVAVQAIKDILNSSTPAYNVYTVHFNNILLKKTIRYGGWGTVWRERFFRKGHGKYSEDLVHESFITQDKIGKLPGNIDHYTYKSIAHHIEKINNYTQLMAEKKVANGKKVSLFKIIFSPFFDFMKTYIFKLGFMDGIAGFYISITGAFYTFLKYIKINEILRNK

SEQ ID NO: 1215 - protein, 250 aa, Unknown
  Description of Unknown: Flavobacterium gilvum sequence
MKISGLVITYNEEKHIGKCIDALYKVCDEVIIIDSLSADNTVQIAESKGAKVISQAFLGDGPQRIFGLDYCKNDWILNLDADEILATDAEEFILSGKYEKDDYDVYAFRLYNYMDDKLINFSGWYPDRTSRFFNKKTASPSKDMVHQKVSGLKKIESNVHIHHYAWKDLNQFIAKKNLYSTWAAQQLYDDGIRVSGYKPMLNGSVAFIRCYFFKKGFLNGLDGLTISMVQAFFSYLKYAKLIKLQIKNKK

SEQ ID NO: 1216 - protein, 315 aa, Unknown
  Description of Unknown: Candidatus Parcubacteria bacterium sequence
MSNKNNLSVVISAYNEQKHIKDCLESVRDLADEIIFIDNTSEDDTLKIAKKYTDKVFTHPNNPMLNINKNYGFTKASCDWILNLDADERVTSELANEIREVIGCKSQVTSHKPIQGYWIPRKNMIFGKWIQNDMWWPDYQLRLFKKGKGSFPEQHVHEYLTVQGETEKLRESILHINYSSIDQFINKIGLYTDNETEQVLSSGRKIIWLDAIRFPAKDFIKTFFAQKGYRDGLHGLVLSILQAFYAEIVFVKIWEKQGFTEENNKTFLKEVYKEFIKIALEIRYWFLSILIEQASNPFKKIFYRLQRKNITRKLK

SEQ ID NO: 1217 - protein, 367 aa, Bacillus subtilis
MKRPKLSVCMIVKNEERHIARCLESVQRIADEIIVVDTGSNDRTEDICKSFHAQVYHHKWEQDFSKARNASLQHAKGEWILILDADEELDSDTGSLLPSLLTDSLPSLGCVKVVNYTGKQWNENEAFEQRQIRLIRNQQNIRFTGSIGERPEGREASSPFSLPCIIHHYGYLEQEAQQKHQRNMNLLDTELLTSCADPSLIYQKAAEYDRGNEHDKAFRLAMDCINKCKRKQQIPPPAFYYLKYKLLIDAERYEEAERDINEALGHYPDYCTLHYYKGIIMYQSKKVREAITAFEACLQIDSENLQYVQVKGAADFRSSCWLGVCHAELHQHMTAVLYLQKALKVNPKCARAQRLLTELTKDQAAHA

SEQ ID NO: 1218 - protein, 386 aa, Bacillus acidicola
MIVKNEEEFIDKCLTSVKDLVDEIIIVDTGSTDRTIEICQSHGAVIEKFKWNGSFADARNFGINKATGEWILWLDADEELDSLDKDKLHKGNHFADYDVLTIHLVNYHGKEAIKDQTTDIAHTRLFRRNTGIKFINKIHECLEINGINQERIGHVDIKVHHYGYLDPVVDKKGKFERNIKMLKEQLKAKENVYWAQYYIAMEHYRKGQFKEAFKRVNASIKAFLLEGLLPPSMVYKLKYSILISMGSFEGAWPGIEKAIILYPDYVDLYFFKGLILYSLKKYNEALKTFETCIEMGEDNIHHLILRGVGTFQAWHYKGLCEENLGKEVEAVISYLHSIAISPEYLHAFESMAKISKKVDINLEEIVNKNFQGEDKQSLKMMISQLE

SEQ ID NO: 1219 - protein, 307 aa, Phormidesmis priestleyi
MFSIFILTHNEELDIAACIESAALSDDVIVVDSFSSDRTPEIARDMAERYPQVRFIQHAFVSHGQQRTWMLRNIPTRHHWSYILEADERMTPALFAECEVAAQSGEHVGYYAAERVMFMDKWIKHSTQYPRYQLRLLDKAHVWFDDYGHTEREVVNGTHGFLQETYPHYTCGKGFSRWIEKHNRYSTDEAKETVKQLTDGKVSWRALLMGKTEVERRRALKDLSLRIPGRPIVRFLYMYFILGGILDGRAGFTWCVLQAFYEYLILLKVWEIRHYPEATATSLTLPGQTKEPEQTKDESNTSISNAV

SEQ ID NO: 1220 - protein, 604 aa, Clostridium sp.
MKISACMIVKNEEKNIEKCINSYKEIVDEIIVVDTGSEDNTVEIAKDLGASVYFFKWINDFAAAKNYALDKAKGDWIIFLDADEYFGQDSAKKVRGILKSLRGTKYSAVGCKLININKVNNKTIDSFMQVRIFRNDKNIRYKSSIHESLSKKNDKVHIMSFYDEIEVYHTGYSTDINKGKAKRNLEILLEDIKSNGENKEYYRYLCDCYFALEDYENALKYGELHLNSNVKVIGYESRIHKVILDCMWNLGRPRKEIEQRIKSTIDIFSDHPNFYCSYGFFLLDEKRYEEALNNLLAALSYNNSYNGIEVNLILGLIPYIHYRIGFIYEVKNSYEKAVEHYYLSLSKDRFNKDAFQAIFKIIRNEKLEDTVAFLNSIYDINNENDVQFIVDELIKLKPRGILAYYANIWYKNFGHEDSALTFTLLAEGKFETAYKIFSEGYGEESNEILAIVSGILSGDSAIMKELLNTNKPSFKRIISEYEGKSNILLEEDLDNYIALFRELCLFDRSDVIKRFLDLRSSFKSNVSIEIAKVLMSNENYKDALKFYNESVQEVEDKNILMYIGYCNYKRGEHNIAYINIKKAIQNGYSGNDAHEFLRWIGEKM

SEQ ID NO: 1221 - protein, 251 aa, Solitalea canadensis
MHHKLSAVIITYNEERNIERCIKALVDWVDEIIIVDSQSTDNTENICKRYPVKFYSTQWLGYGPTKNYGSTLATNEYILSLDADEEISELLRNNIIEARKNGLDAVYRFNRLTNFCGKWIKHGDWYPDTKDRIYPRNIEWNTAAAHEELLIPADIKRIHLKGNLLHYSYYSKEDLVRKYKKYAELLAEDRKDKSKVFLFLKTVFSPLVYFIKNYFLKAGFLDGKAGFIVYSQGAYYTFLKYKLALKKSSVN

SEQ ID NO: 1222 - protein, 403 aa, Helicobacter sp.
MKISVTIIAKNAQKHLSECLQSLSEFDEIILLDNESSDETREIAKSYPNVRIFSTEFIGFGAMKNLAISYAKNEWIFSIDSDEIAEPDLLEEIKNLKFKQNEIYAISRKNLYKNEWIKACGWYPDYVNRIFNKNFTKFNDNEVHESVTIPKNAKILRLDSHIKHYAYGSISQLSHKMEFYSTLWARNNAHKSATPLKAIVRSMWSFVRNYLFKKGFLYGYKGFIISFFNASGVLVKYMKLYELKTRENSVSLIITTYNQKESLRAVLDSTLRLNKMPSEILIADDGSKADTRELVESYKAKFHIPLIHIWHEDRGFRLSHIRNLAIDSANGEYIIIIDGDMILEPNFVSDHLEKAKKGVFLQGSRVILDEKVSKEILALTSQNGGNGLRENGGNNADNGGGSK

SEQ ID NO: 1223 - protein, 702 aa, Clostridium botulinum
MKLSIAMIVKNEERNLERTLIPLKKLQGYIDTEIVIVDTGSTDNTVEIAKRYTNKVYFHDWNNNFAAMRNISVNYCTGDWILILDADEVLYDIDELVSLLNSNSLNDFNAVFLKKIEFYKSVEYSVFNGYIALLLRLFKKDTISYEGTIHEQPKFNYPVMESSVRFIHYGYDNNDYEVMEYKFKRNLNLLLGELKGNPDSVYINFQIAVSYTMHNQLKEALEYIEIAYEKGKKDINKYLYVIDKYCFILYNMGNYKALIDKAIEGIKYCNDFLDFYFYLGEAYFNLKQYHSAIEIYSKYLKIHEKFNDTLVMPNNTLAVMTRRYKENIIYNLALSYHKNKCFKESLDTIKKIEDSNLIREKIVFLMKIIVEGKLYNEINIVEKYIDKYNYENLLLFVYREISIENLKELNNIKLHENLYEIFSLVKYFKENNNIDEKIAEDIRKIIDKAQTPYSIYVYYILKYDIYEIRNLVNFGKGKIENILINLCITYFDFNGVILQGLKKIRPNNISNILIRTVIEKSLIVASNLPTNERRNIFLNYIADKYFVILKLYNENSMERYCWILPSEERFIIKIKEGVSYKYKDPLKYIQYMKDIINEERIYIDYVKILIEEDCDFVLNNELKTLIPELISSIQLLINNEKYQEAYNTIEEGLSLVKFDFELMLLKYNLLLKFNYEDEALKCLRDIILYGDREKVNKLIKNI

SEQ ID NO: 1224 - protein, 333 aa, Ornithinibacillus contaminans
MADATISLCMVVKNEESSIERCLKSVRDLVDEIIIVDTGSSDNTLSICKQYTNHIHLVDWENDFAKARNYSLQFATGDWIVWLDADEEFDRTTFEDLKSVLQHKKETFLYVPVRNYIGDTISEHDVYTIFQARIFQNNKGITFQNKIHEQIHIPVEDFQYAILPSLIKHYGYLNAEIETKNKHERNLDILKLELESEGHSPWIDYHVASEYYNAKDYEKAFHFVNYAILKFVEEGVLPPAIVYRLKYSIIVESENYQGAWPSINKAIELYPDYVDLYYLKATVLFHLGKYQEAVEVLDHCLLLGEENHNYLILKGTGSFRAVDLKEKCLQKLQ

SEQ ID NO: 1225 - protein, 630 aa, Unknown
  Description of Unknown: Paenibacillus sequence
MSKTISLCMIVKNEEKYLSRCLESVCNKVDQIIIIDTGSTDNTMEIAKKYTNEIYHFTWVNDFAAARNESIKYATSDYILILDADEYLDPTADLQREISSAFDYYFIRIINEMSYGRTLKHTAIRLFANHKKLVYHNRLHEHLNVMDDNNDYKGTSGELIVYHTGYINEVIQDKDKKQRNLPLMLDEVKENPTGYNLFNMGKTYMWLEEHEKAIPYFQKAYSLSKNLIIIPEIIVSLCSCLKELHRYEEGLQILKDAIPLYPQETDMRFVQGCLYMESGYTKDAIMAFEKCLELGDQGITVTEGNGSYIARFKMAEIYEGEFQLTKSYDQIIQAFQTKKSFAPALIKYFELVSKANISSEEVYQNVNMVYNVSSITELQLLLDSLYNVRHPLLNKFLKTYKGVNVQSFVLATAAEYDKDYEQAKELWLKVSLNESYRSDVILLAFILRDIELYNLVVPLFNLSNKEAKTLKGIILNEPVNKIVLNSAIEEIILSIITKLIVLQEFDLFEQLTKVLLSSNNTAIKCRLCEILISYGFMEVAIDMLAQCFKEEPNNISVLRLLGDCCLRVGYLEDAQLFYSELLNLNSDYSTYERCYDLYEKCQDVQGMKVIKGEIKKYFPLAEWIRGFNVL

SEQ ID NO: 1226 - protein, 584 aa, Paenibacillus sp.
MSKSDKSKPLISLCMIVKDEERDLPRCLQSVQGIADQIIVVDTGSTDATIAIARKYGAQVVRSEWTGDFAAARNKGLARAKGEWVLFLDADEELDEATGKQLRLLARESEITAYFLNIWNYMSDGRSEGATINPVLRMFRNDARYRFEGRIHEQIAGPITQHTPLARFHLSDVIIHHYGYKREAVAAKNKLQRNRTLLEQAIKEDPDNRFNWYNLGVEYFRGGEVEEAVGAFRRARDGIEYASVSYAHLLVKHEVHGLQALRRWQEALAMLEESLVWYPDYPDLWHAKGVSLAVLGKSRRAAEAFAAAIQIGRAPAIYHTEDGMGSYQSAYWLGSMHEAELDYETAAHWYAEAVRYRGSLLLPLQRLCHMMRIASRPEQLAAFARDRFIVDSPQAAVKLAGVMLNNGCYRALQLWLDQRLAVATDEERAALKPWKALAEVCVRMEEGLGPEGTAAPTVLELAAAELMAAASWLDEAGGDRPYPSDGAVRWLPLLLRSSEAMRENSSTQAEGAIAKVRSVIGQHLDAKPPAAFDDSGSEKAIRASVQALCGLADYHLSRLQRMDASSLKQAAESIRLLLPAGSDD

SEQ ID NO: 1227 - protein, 341 aa, Anaerocolumna aminovalerica
MITISACLIVKNEEKILARCLDSIKDIVDEIVIVDTGSTDKTKDIARNYTDKIYDFQWIDDFAAARNFSFSKASKDYIYVADADEVIDQENRIKFLQLKEAMLPEIEIVQMKYANQLQFNTTYNFDVEYRPKLYKRVRSFCWIDPIHESIDLEPVIFDSDIEILHLPMSNHAPRDFEIFQKIINRGEKLSKKLINMYARELFIAGTKEDFLKAESFFEMLLEDDSYSFSYEERKAIQCVLVRCSSLKNDLPKLLKYSLNNVAGDKPSSEICYELGEYFFGLSDYKEAIIWFYNAAYETECELNIHYGGDYPLKKLSACYENLGNIEQADAYNELAKQWKAE

SEQ ID NO: 1228 - protein, 626 aa, Paenibacillus polymyxa
MTKSISLCMIVKNEEQVLSRCLESVKDVVNEIIIVDTGSTDTTLDIARNYTDKIYSFEWVNDFSAARNESIKYANSDYILVLDADEQLEAGADFQKDLEKNRDYYLLRIRNEISWDRNFTFAAIRLFKNHISLKYENRLHEHLNIINGTANYTMGESNQLIHHVGYTDDKMLEKDKHKRNLPLMELEVAENPTAYNLYNMGKTYFAIQEYGKAVEYFRKAYPLSKDRIFLPELLTKLAYALAEMKRLEDALSVLTDGVMMFPKETEMIYILGMIYQKAGYYHDAEACFRKCIELGDQGSLITEGSGGYMAHMRLSELYEETGRLEDSYKEVVCVLKLKKNFAPALQQILKLALKLNMCSEEIQAGIQQNYTIGSVEDLQQLLDIMYGARNPILAYYLTTYKITVQSNVLATSKIYDKKYKEARLLWNEIVDKENENGQDLLLLSFILRDDSNLADIQRLLNLSNREKVTLEKIITGTIGKCSLSSRLEEMLLEVCRHMIILQEFEHFQLLIEKIMIIKEETRLKICKLLSDYGFDELSIDMLISMFKNQPNNAVLVQLLGDLCYRNEYFEDAQLFYTKLLRLDSQYSSYERGYQLYERIGDYKNASIMKREIGRIFPLANWARENC

SEQ ID NO: 1229 - protein, 342 aa, Clostridium sp.
MITISLCMIVKNEERVLKRCLDSVRDLVDEIIIVDTGSTDATKRIAAGYTDKIYDLTWNDDFSAARNFAFSKATKEYIYSADADEVLSEENRRRFRLLKETLLPEIEIVQMKYGNQLQNGTVYNFDEEYRPKLFRRLRSFVWEEPIHETVRLEPVVYDSDIVITHMPEQNHAGRDLANFRKQIAQARRLSRRLYGMYARELFLAGEARDFLEAEDYFRAEVSSPDRSADEITEGCCVVARAARLRGAAVTFFKYTSKVIAGDGCSEICCELGYFYEETGDFEEAAVWYYNAAYETQPVLALRTSGAEPLAGLIRCYEQLGLPAQARSYAEELKHRQNEKTDN

SEQ ID NO: 1230 - protein, 362 aa, Lachnoclostridium sp.
MSTISLCMIVRNEEQVLRCCLDSICSLVDEILIADTGSTDLTKEIAKDYTEKIWDFPWIDDFSAARNFIISKARSEYFMWLDADDCLPAEQASSFSRLKEELSPQTDMVLLPYHTGFDPLGRPAFSCARERLIRNRKGYCFCGRVHEAIPLSGNVIFRDIPVEHRKKGASDPERNLKIYQNMISGGEPFEARDLYYYGRELLDHGDYEKSRNIFRSFLERKDGWAENKMDAVRQLACCSRALGQEQDILSILLTGLSYGVPSGELCCDLGRCFMEQNQYAIAAYWFRQALLSEKSAASGAFIQEECYGFYPAISLCVCYDRLGDLENAWKYNELAGTFQPESPYYLHNKIYLETSRISVQIS

SEQ ID NO: 1231 - protein, 383 aa, Roseburia inulinivorans
MPEIIVVDTGSTDNTKAIASQYTDRVYDFPWINDFAAAKNFAISKATNSYVMVLDSDEFIESLDIQKLQEELQKHPYQVGRIFRRNVFERNGIQQENTEWINRIFSKELFHYEGCIHEQVTAINGEAYKTYQTPVVILHTGYDLPEGERKQKAERNIILLRQELQRLLIAFLQKADLSDNANKTFVPVESEYDENQCVNKILSIIEAGDDLSDTLQHEEQLPYILYQLGKGYYMAGNYAEACVYFSCALSFDLNPKLEYVIDMVETYGYALINNGQASDTLFFESIQNEFGNTADFQFLMGLIYMNNARFGEAVAAFLKATKYKESRNVGANSYMAFYNIGVIYECLGMTDKAKQYYEMCGEYGPAEERLKGFCCSDEGSSVV

SEQ ID NO: 1232 - protein, 645 aa, Anoxybacillus sp.
MCTMRPLLSLCMIVKNEEKVLQRCLDSVYGIVDEIIIVDTGSTDSTKKIALNYVEKIYEFEWTNSFADARNYAQKQANGEWILVLDADEYVDRENLKQVVEELKNARETVDGYDVTIYNFMGSYGERVLQHRSTRIYRNRSHIFYYRSIHEQLKKNGSEALTTESLPFIVYHSGYMTQTVKAKNKNERNTELIEKELQSSNSKGFDYFNLANEYLSKAEVEKALQYYLEAYRLKPDFRFSWVSICVVQIILCLKYLERFADALHVISDAENIYSETPDFKYLRGEIYYLQRRHDDALTVLTELVNNKHKYSKSIKSIEYLEYDPHVLLGHIHKHKQNFQEAVHHYTSALSVNNKSYEALFHLLSLLAKFHSEHEIIHFLEKRSWFTNERDILLLLRVVFTIRMTGTAEYYVSMLEEGTTKKGFEIKLKILKEEYKAAIAELLNSSLSSLKVYIQNGSLDLYDVLVASMSIGKLDIIRLLINIVGEEKEKEFLRFILKETDDIPEQNFYLNMIERTIQLQKYDLFEELIKLRDQFDNRINLSLGHLLHRYEFIEVALGFYQSIEDFNDLDADAFVNIIEGLAMREQFAEAIQYGLLGMNLGHHDFRLYKYVLELMKLNEMNEERRRILESAKQIYPDSKWLMEQGN

SEQ ID NO: 1233 - protein, 323 aa, Butyrivibrio sp.
MEDIMPESSDSVSVSVCMIVKNEEAVLRRCLESLQGTYDQLVIADTGSTDDTINIARSFTDEVYAIPWEDDFGKARNISFSYAKCDYIMYVDADDILPSEEKEKFLQLKKDLSQMPVDERPKTIIMAYDAPEGGGLSYRHRMVARHDGPYWGGAIHERAFVLEPEMTTEIKFLHRKLVKPPKDRNCNIIRKIPRDELKEDFWLCIQCYLDMTLAEHHEEAKEYYLMAKAAKEHNASYCVWIARILIINEYFENALLWLEMALESEDNTPDQKLWIYQQLVKAYIGLGRIQEAIDYNDKVLEINPANLAARTNRLILEKKLKEE

SEQ ID NO: 1234 - protein, 358 aa, Clostridium carboxidivorans
METGKKNILSLCMIVKNEEKSLKNCLSKVVSFVDEIIIVDTGSTDNTKKIASEFTDNIYDFQWCNDFSKARNYSISKASGEWILILDADEVVTDFFRYSIDEFINNTLNENKVGRIKRINIMEDSFESKKYTEWVNRLFNKNNFYYEGIIHEQIISKDGQNYETEQLDITADHIGYTKEVLNRTNKIKRNIDMLKSAVSLNPEDPYLYYQLGKSYYMLKDYKTADLYFEKALTFELNYYLEYVSDLVETYGYSLINSRRYSDALIIENASEIYTNNPDFQFVMGLVYMNNAMFEKAVQSFLKCTKFPCGKVEGVTSFSAYYNIGVIYDVLGVKDKALQYYRMCGKYEPALKRIKAQLN

SEQ ID NO: 1235 - protein, 629 aa, Paenibacillus polymyxa
MYKTIALCMIVKNEEQYLRRCLDSVKDKVDQIIIVDTGSTDATVDIAKEYTDEVYNFKWVNDFSAARNEAIKYATSDYILIMDADEYLDEGSDLKADVSSECDYYFLKVHNLLSQGQKIENTSIRLFANFRGLYYRNRLHEHLNNLDEDKKAFTSGFGKSYLYHTGYTDEMMQDRDKQKRNLPLMLQEVKENPNAYNLFNMGRTYKWVGEHEKAVHYFKMAYPLSTNLIIVSDLITNLSQCLISLKREFDALQILNDATVLYPNETDLRHTQALVFLEVHYYKDAIAALKTCLQLGDQGITITEGNGTYMAYYRLAELYEKNYGFSKSYDYIVEAIKLKKHFIPSVAKYFQIVTLANIPLEDVYQNFNQIYRISDVSELKTLLEVLYSLRHPLLNRYLNDYQINSEANVSTVATQYDKQYDKAKLMWLGMENINAENGEDILLLALILKDSELFELSRSYLNLSVKEAKVLRSIIMNHEIDTPKFTTYLENKLENLVDRLLVLQEYESFQCILEYIWLGSLELKCNTLEKMMKYGFNEVAIDLLVKLFEVHPTDAKIIRLLGDACLNSGYLEDAQILYTKLLDLSPEYSSYERSYRLYEQLEDKEMMKSIVESIKSKFPLCLWVHEIAN

SEQ ID NO: 1236 - protein, 355 aa, Brevibacillus sp.
MISISLCMIVKNEEEVLARCLDTIKDIVDEINIVDTGSTDKTVEIAKQYTDRVFFFPWTGDFAAARNKSFEFATKEYILYLDADDVILEADRVKLQNLKETLDPSVDSVSMYYDAGTDEFGNVTLRYRRNRLVKRSRNYKWKGEAHVYLEVYGNIINSDISITHKKIRHSVGRNLNIYQQKLERGDVFGPRDYFYYGNELRENGHYEKAIESYQKNISMQEGWVDDKIHACLFMGDCYRFLGDSANELSAVLKSFEFGKPRVEALCRIGYHFHRKRDWKTAAYWYEIATQYPEDPEQWSFSYPAYRTWYPHLQLCVCYYNLNDFEKAYYHNEEARKYRPEDERILHNKRLLEPKI

SEQ ID NO: 1237 - protein, 727 aa, Paenibacillus jilunlii
MKKPTLGVHLIIRNEAALLPQCLDSLAGAADEIVVVDTGSTDNSAAIATSYGAKVYHMNWNYDFSAARNTGLSHAETDWILVLDADEILKTPVGTITEMLRNTDAMAFTVNIENWLGSLPEDRLTHNVIRLFRNGAGYSFQGIIHEGLDASIIGKHGASVIRSSGIEIIHLGYLPGLMAKKDKISRNEHLLRRALAKDPGNDFYSYNLAVTCCQNGQLEEAEALLIRTINRAPLQASYRPSMIRDLAKIQLSLNHIKAVNALLARELPRYSDYPDLHFIQGQSWESQGLTERAFQSYQRAAAGSEEPAAPVEASSTGVTLEAGAAVNAGATLTAGAALSGKYVSEKGMNSFRPLARMGAISLQLGHFEEAARWFHRALQHHVLYAPALQGIASAFQRLDVPDQDIATLLTQLAGTGQAAGRSAVIHALDAVCAYEAIAGLPQIDFPLEKETLPARASAWIITGRLQEAGAALREALSLLRDTTAMEGDMENLHRLWMIAAICRWQDNRPQPEPLEFADAPEPLRSALLLVDEQLTQHNTAPVLPGDAGNLSRVIAELIRLAVKLRCGGLAGRLAGLFPEHRTDWAEALYESGQLEEAGELLITLAGDQQARGKVPFYLAEMLFDKGHYGEAADWFQHMLAGTPGHEPSRIGLSLSYLHLARQELEEAADSFPEIYAHGPLQEDMKATEQAIAVLNRTAWHTQWNSHRYFRKEPHHEAANPDFPLHDC

SEQ ID NO: 1238 - protein, 629 aa, Paenibacillus sp.
MRPTISLCMIVKNEERYLRKCLSSVKGFVDEIIIVDTGSSDGTLGIVNEFDARVSAFEWIHDFSAARNFAIQQASCDYILQLDADEYLEDGATLQEDIVSNKDYYSVTIKNHKSDGGSFAHQAVRLFKNRIGLLYIGKLHEHLNILDPSLTLSTGDASSLINHLGYLDDTVQEKNKVERNYEIMLKELENNPSPYSLYNMGKVCMSQRKYEEALNYFKKSYELADNMSYVYYLFCYILTCLRLLHRYEEGISLAKVLIDRQPLYLDFHYELARLYEEYGCLQDAEIVFKHCLSDQPWSEKKVANEGANGYLSFYRLACIYEKQGRSGEAFESIFEAIQNNPVYQPAIKLYLRLVLKANINNEEVIAHLEKIYNGKDAEVIKMLLVAIYEARHPIMANYFSQREGQPLDKEINAVVQQYDHKYEQARDLWLEISNIKPDNIVDVITLSIILKDTDLINKCRDVANASHREWKLIKSIIKREPFNSDLGQSWIEPHLVNIAEQLIVLGEFEAFEYLSTCIMKASLAIQIELAILLTDYGFKDTAVDFLLEHYHTNPNHPDILQSLSAILLSAGNYEEAVSLSQQLIKYKNDFKSYQQLYLCYFHLGDDGSAQKVAQDMKKKFPFSSWVNSL

SEQ ID NO: 1239 - protein, 351 aa, Unknown
  Description of Unknown: Eubacterium sp. CAG:248 sequence
MISVSMCIIVKNEQSILKRCLDSYAGIYDELIIVDTGSTDNTKEIAAQYTDKVYDFAWCDDFAAARNFAFSKASCDYILSVDADEELDFHNNTALRSLKEAILPEIDIVQMYYVNESDFNSVYNVHKELRPKLFRRIRTFNWISPIHETIRVNPVIYDSDIEIMHKPTSDHSKRDFSIYFKALDKGIVLEDYVVTMLCKELFISGEASDFIAFKNAFENVFPYENRSENTLEDINCILARIYNITGEQDKFFKIALKSVADNPSSEMCYTLGLYYFAHKDYNEAAIWLYNAAFETKSILDISSSGKKPLYLLSECYKLLSEQCEDDYEKIQYVEMSNDYKSQADSWCMPEL

SEQ ID NO: 1240 - protein, 2077 aa, Unknown
  Description of Unknown: Syntrophaceae bacterium PtaB.Bin038 sequence
MTNGTNLPLISVIIPTFNRSAYLHQSLRSLVKQSIPQKNYEVIVIDDGSSDQTRNVCNQMRRLLPLRYFYQRNSGIAAAKNLGIFTSRAPILFFFDDDDVADKNLLREHLRSHNEHPDEKIAVLGYTAWSPKLKITPVMHYVTNVGHLLFSYSHLVDGQILDFTYFWGGRSSCKRSLLVRHGIHNQAFRLTQDIELGYRLSKVGLKVVFNQRAVSFMIRPVSYDDFCKRCEGKGRFAALFDQLHPDPVIHKYCKTRKAEEKWAFAEKNLARKVERVRELENTLRAVHDHGAGNGQLDELHKLYRWTFEAFRLKGIVQERQSRQSAACLPSPQTLCAGDRDYLDTKWGDEAFTLPKVRTSILVCDPLLPMFDRASGSLRLFHILKALVQLGYHVTFISRDSDHAERYVPILRDLGIETYAGDPSAKEHAGALIIAPFVDLEGILRERPYRAAILSFWHLAEYYLPLIRRYSPDTTVIVDSVDIHFLREIREAELKGDEHLKARALENKEREITVYGNADRVWVVTPDDRKAIESLIGDVPIDVIPNIHERIGHRKTYEETADLLFVGNFNHRPNIDSVEFLCDEILPLLQTELPGVKTYIVGNNPPEAVKKRASDRIIVTGYVEHIAPYLKNARISVSPLRYGAGMKGKVGEALSWGLPVVTTSIGAEGMGLVDGHDALIADDAGEFVSKVIRLYNDAELWNRLSANGKRTVESQWSPEAIQKRLALVLRDIDRRNEKVSIVILTFNELEYTKRCVESIRRHTPEPHEIVFVDNGSTDGTVKWLRQLIRDNPGYRLIENRENLGFARGCNQGIETASGEYVLLLNNDTVVTEEWLSGMMDCLRSVPDAGIVGPMTNHISGIQKVDTADCDAPEGLEDYARDFRRRNLRRRIETRRLVGFCMLFRKSLIDEIGPLDESFGTGNFEDDDLCARAALAGYRNVIAGDVFIHHVGSRSFIGNRIDYGSAMTGNRRIYAGKWRALEQEAEEGRKIRSLVARERARERFLRGDLQAAVDLWLAVIRDMPEDHRAYHEMAGGLIRAKRYREALEVLTEAPASPAPEERLILEGQCREGLDDLDAAEEFAAKALSVRVDCSSALNLKGVIAFRRGAAEQARECFEKAVEADPSFGEPHTNLGVLAWAEGRHDEAFELLERGFILTPCDSDLAERYHAAAVAIEAQARAERAFREARSLYPASRTIAFLLIDLLLSQGRFEEAMARIEDAMDAFEADDGFIAAALAVREKIGPHGAGRRPGVSLCMIVKNEEKNVVRCLRSVKPVVDEIVVVDTGSTDRTRELCRVLGAKVHDHPWTEDFSAARNVSLEKASGDWVLVLDADEALSQRDYPTLRKAARKAPKKPRAFTMETRNYLNLTQQTGWRANVGEYPAEEAGSGWFPSEKVRLFSRDARIRFENPVHEIVEPSLRRLGVKPERLAVPVHHYGKLDAEKAREKGEAYYALGRKKLEQGNGDVESLRELAVQAMELGRVEEALDLWTRVAELRPDMARAHVNLAHIHLEHGRYPEALESARKALALDPGMKEAGLNCALGEFYAGDIAETVRILEALLERIGAYPAAAGLLAAARIVRGERDQALDCIEELRRQGFGDLTFLRECAAKLECAGRIPEAAALLSFLGPAQADDPVPGTPVPTETDRAATPCPSLSLCMIARDEEAVIGRALSSVREAVSEMIVVDTGSKDRTREIALEKGATVFDFPWCDDFAAARNFALSKATGEWILVLDADEALSPADAMRLSPIVQEAPDDIAGYLILTRNYSAEMNTEGWTRNDGRYAAEEEGPGWYPSTKVRLFRNDPRIRYAGAVHEMIEPALTRHGFRWVPCDVTVHHYGPLAGRSKGEMYYRLGHKKLAEAGDPRALYELAVQAGRLRRFDEAIDLWERYLSLGSTEDLPLAHLNLGHAFLETGRYGSAADACARALALDPGLKEASLNLAMAEFYEGRLEEAAGRLETLLARTGDYPPAAALFCAACLVTGKSEKAEARIRALSAQDINPAAFFQVYASRLRASGRTDEAETLLETARRLWEDELRTRGLENGPGDVAQVMSAVEAEIPPVQTACDRYRRGESRLL

SEQ ID NO: 1241 - protein, 644 aa, Paenibacillus sp.
MEKLVSLCMIVKNEEEVLDRCLKSMKSAVDEIIIVDTGSTDRTKEIAHKYTKHVYDFTWVNDFAAARNESIKYATSKWVLIMDADEYMQEKDAEMLRSFLSNLIPREDQFFTVSVISYLGDVKNNNFSDAPVPRLFPNHMNFEYNRPIHEQIVSKKGIPAVSIAAPVNIYHTGYLADTLNKKNKSERNLDLLINMKKNSSLTQYDYFVIGNEYTVLKDYKKANYNYKRALQGTTSKHPWYIHCLIAYIQNLLIVNHVKEAWELIETKLIEWEEFPEYHTFKGAFYIDLGFYSLAKQSFLQALNAAEKRLEVDNNFWAVFPQLGSNIPYLNLLKIYATEKNIKEQIVIMTRMLMQNTSNLPLLAQWIELLAMNESESETIRLLGKFYPDQEDKLSVTKLFSTAVAVGQPAVAHHFYKQLDTSYISSVSHLQYAILTNNKELFKEELSSSSRLTADPKRINKCLLLAALVWNDAVLLKEISNADANYDLKIFVSEYLADRHTIENTVPEQLLYDLLTDLYNLHQFEAFDRLMQDIPFNPVIVNHLANYFYNKNQVDLALQYYSVLLDQDELDAISCENLAHLHVNQDCLEDALMFFEEAIKLSPNKKHLYIQYCIHCTDTDKKNLMKKKFLDVFPQYRQLPAVQNL

SEQ ID NO: 1242 - protein, 658 aa, Paenibacillus silvae
MTLLSVCMIVKDEEKVLERCLSSIQNLADEIIIVDTGSTDETKKIASKYTNHIYDFKWCNDFSKARNQSIQPATGKWILVLDADEYISQEDHRDWRNFLIQEEPVPHLAYTLPIINFTGEKEFEDEITTSPVTRLFPNHMGITFERPIHEQLTRGSKGELFHKTLNLHIYHTGYQISHIKDKNKHERNMSIFEQMMLEQDLCSYDWYTLGNQYRYAKNELKAIECYEKAMTGAERDEAWYPHCVMGLISLYYGQDQLKRSWELTEQYLVRYNQFPEYYTVRGIHYETLGFFDEARLSYIEAINIAEKRAKTKQDIWLIDPMYSFDSPVQQLIGLYFRLNDNQNAIYWMSKQLNKNNKNPGYVAKMMEWLLQNEDEESVIRFFEKIYISPSEGDYLLLFKVSLFLGNRVLVNHYKALAPMSMELSPADQLKLSLVDRDLNGMHQLLDKFALISQDEKHVCLQVITGVLMWNDTSLLDKISKKIQNKDVWLSAKTMVDVFLQVEPGNPSIIEMDDLFAVSRQLFLLKEFEVFDQWVNKINNDDLTNKLANYFYDMNHVELAMNYYSALLSGNRLSGMSFENLGFYHANQKYTEDAVEFLNAALLDEPGKRHIYKTFISLALKQDKLRLMKNFKNQFSDFDEISFVREFLDKEIEALNYTV

SEQ ID NO: 1243 - protein, 259 aa, Unknown
  Description of Unknown: Deltaproteobacteria bacterium sequence
MEKISVYVLTYNNERTIERCLSSLQWADELVIVDSYSTDGTLEICRRYTERIYQRKWTNHQEQYQYAADLTTNRWIMFVDADEEVPPELAQEIRQELGDNNGQWDGYIVHRRTYYLGRWIKYGGWYPDYEIRLYDRTKGRWEGGLHAKVKVDGRVKTLQNCYLHYTYKDISDQIQTIDRYSQIAAEDMLREGRRFSLANMLFNPLFRFVKEYILKRGFLDGIPGLIIIVSTMFYVFIKYAKLWELQRELKDGNEVRRDL

SEQ ID NO: 1244 - protein, 609 aa, Clostridium sp.
MSTQISLCMIVKDEEKNLPKCLESVKDLVDEIIVVDTGSTDNTVEIAKSYGAKVYYFKWCDDFSAARNKSLEYAAKDWILIMDADDEFCSEDKDKFKKLVNNLDINKTYFFETLCYFGTTKGNDLTVNLNPRLFKNKYGYHYEGAIHNQLVNLKHSINGVYEDIKIHHYGYLDSDVVDKDKNKRNIRILERQIKKDPKNKFNYFNIGNEYSSIYEEEKALENYYKAYDNFDPSAGFASKLIERIIISNYNLKYFNEAVKFVDEGIKYYPEFTDLYYLKGLILEAQHKPTMAIKAFEKCIELGEAPIVLKCIYGTGTFKASHELSKIYMDLKDYDMAYKYCIDTIRFKPDYLVPLYNISHILKQEKTPVDKFKQTIEAFFPDIPNQYPVIADLFYMEGYYTTALQYIEQYGTQGLSENLRFFKVKCLIRSGKFKECIKYAESIGEDDLYYFQTMMYKVICFAAMDEYESAETIMKQFNLNKKTNYNKKIIQVYRQFLNIFEGRSASILSEDENEKDYTSSIFEICEILLVSKEFDKFEKSLELLNLISDKSVLLQLGKMYYKYGYVDMAKKEILRSIKMFDVIDSESLDILEMCIQKLSGEKSSFTVLCF

SEQ ID NO: 1245 - protein, 631 aa, Bacillus sp.
MKPFLSACLIVKNEEDMLRRCLESLQDGVDEIIIVDTGSTDNTKKIANEFTDKVYNFEWTNDFAEARNFAGSKASGEWILAVDADECVEKGNIEVAIKEMKLNGAKYNTYNVEIISFLGEDGQNTTAHKMNRIYKNNGEIRFNGAIHEQLVAVSGTQKFGLSSLTLYHYGYLAHIIEKQDKKNRNLKIIKQDLKSGKNKGFSYFNYGQELRSLKKTKEALDTFIKAYKLKESIDEGWVRTCLFFIIESLMELKRYEDALKIVEDAEIMWPSVPDFIFSKGDIYLLQNRFDDAKQVYQAILANQEAYSEVVLHFDRKSFLPQERLGQIYEIEKNDEEALKHYIKALNENASSLPIINSIVRVLSEYHTAKEVYGFLLNQNIVKTDTIRLDVIKYLLNEGNADLVVELANDLEAGNKRLINVINLKGSMIASSPNEDETLIIEKHDVLLGIQEGIFDLADLCVLYHITKDEFIAEKIKSSKFKYIFTCLFEELKRSKKMKQEEYLAILRRALCYKQVDFVENLISLKERVHKDIDAKIADLFYENGYEDIAIDFYERLDRNQITKQGYVNMIEWFISQHAFEEAHLLAIEAIDKFKKDFRFYKYAIETTQSNRGAIVTKGLCEFPDSNWLKLK

SEQ ID NO: 1246 - protein, 586 aa, Desulfosporosinus orientis
MNQRISLTMIVKNESPHLAKCLESIKNAVDEIVIVDTGSDDDTVCIAKKYTSKVYFYPWNNDFSAARNFAIEYASGDWILSIDADEEVKYQKTDCLHTLLGLENDKEAFLLPLLNPISDSGEEYNTFYVLRLFRNNGRYRYVGKIHEQVFIPNQEMIGLATEPILKHQFLPRKQRHQKRDRNLRLLKKAFQKDPKNLFLHYYLGVEWLMLGKASYALPLLQSAYCGLGDNYLLFRSPALKYLTLAYKELGQHNDALTLCIQTSLEYPNYTDIFYLGGLLFEEKKEYPIAIKWFNQAISCGPPPALFSHFTGTESFLAFYHLGFCYEKLGKSLKARQAFETALKLNPKYPFPLYSLFLNLLSEKTPPMIYKHLDDLKFLATPLLCFTTAELFFLSNQAELAFLCLDDYKDRLLNEESFLFYYSKYSIFSGRMDAGLKSIGEIGIQNPYYEKAQVLSVVAIILLGDFQKARLLGIKLWQNPSSRGDAYLLLWLIRFIQKLTPPPPVSKIREQEIYDKVLKLYTDCRHYQSPIFTPQPIVDIYRLGLEELMKSSEKGFLQLLRDYDQRLNELKNHLTARFGTGWLPHGY

SEQ ID NO: 1247 - protein, 424 aa, Unknown
  Description of Unknown: Yersinia sequence
MLNRWVDNISFILEIDKRLTNLIEPEDLSVGDVLKKISFLFEDIEQTPNPTLSAIIIVKDEERCIKRCIDSIINSVDEIIIVDTGSTDSTLDIIKGIGNHNIIIHNMIWIDDFSHARNFAKSKASKDWLMFIDADEYLEAIDDNEIKDKLCILQTMSIKDEMVVCPFISNHNGYNIKTVRRFFLNNTDINYFGLVHEEPRIYDFLPYYISIDVKFFHDGYMDEIVKSKRKTERNLYLLNRMMLLESNNLRWKFFYYRDGIDNIDLLDAEVEIKSAISLNKENDFSADNVIDDEFTFALLDILANNLFRQGKFDDANLMAEIMNDFYPENSNSYYYKCLIKIIRLREEVKKLLNDTIIYREENINPQYGMIHSEGYHIDLLISILLFENGYIKQAVKYFTFLDEIDFKSNILNEYKEKIRVIKSF

SEQ ID NO: 1248 - protein, 359 aa, Jeotgalibacillus sp.
MVSISLCMIVKNEEDVLARCLDCVKDIVDEINIVDTGSTDRTVEIAKEYTDRIFHAEWNGFAPARNESFSHATKEYIFYLDADDILTEEDQKKLKKLKETLDPAVDSVSMFYNAGTDEFGNVTLQYRRNRLVKTAKNFRWEGEVHNYLNVSGNIINSDIAITHKKTGHSVGRNLNIYKMKLERGDVFGARDHFYYGNELRENGHYEEAIESYTKNIEMTEGWVEDKIYACINRGDCYRFLGDLDNELKSLFHSFVFSKTPRAETCSRIGYNFQRKKEFQSAIYWYTLATQIVPDENRWSFSYPAYHTWYPHLQMCVCYDRIGEAEKAYFHNEEARKYRPNDKSILSNKAYFDKKLGKTE

SEQ ID NO: 1249 - protein, 260 aa, Methylobacter sp.
MLTVVILTKNEEVNLPRCLDAIPERYPVVIVDSGSTDSTLVIAEIRDCGIYTNPWPGFAEQRNFAIHQCDIATPWILFVDADEIYPEQFYNWFEGQMAGTDSIDVVMVPSILYLKEKRLNYAPGYPIYHPRLVRRETTRFVSNHTGHGEAVINTCRIRYIDIPYQHYFYHGEIMEWMHKHINKGVQELRPIPTAGAVMTTRGRLSVLLGRSWLRIIARFLYHFVFRGGFLDGAAGLEFALMFTWYEATIYLQAKAGIQAR

SEQ ID NO: 1250 - protein, 584 aa, Unknown
  Description of Unknown: Peptococcaceae bacterium BRH_c23 sequence
MNERISLTMIVRNESVYLADCLESVKSEVDEIVIVDTGSTDDTISIARRYTPNVYSFPWNNDFSAARNFAIEHASGDWILALDADEEIQFQGPKSLHALLDREKDKEAFLLPLLNPVSDSTGEYNTFYVLRLFRNNGGYQYVGMIHEQVSLPDQQKVGLAKGPILKHKSLPLKIRHQKRIRNLNLLKKASQEDPHNPFLHYYLGVEWLMLGKPAYALPFLQKAYFSLSDENLLFRAPALKYLILSFRALGRLDEALSLCLEASLDYPSFTDIFYLGGLLFEEKEEYPIALKWLDHAITCGNPPALFNHLTGSESFLAYYHLGFCYEQIGKIPEAREAYETALKLNPSYPYPLYSLFLILLREKGSSLSYQHLEDSGFLNDPLLCLTSADLFFLVENVEQAYLCLEKRKNLFLKDERFPFYYSKYCIYSGRVHEGFNRLHQMTVDHSFYKDGQKLSIVALILLGDFQSARSLAISFWKHPSTRCEAHIFLYILRFMQNNKLPTPSLKVQETDILNPTLELLADCKRYRSHESYHNPLVATYSLGLESLIKFTEKGFHQLIDDYDQRLLDLKNLLVAKFGNCGISK

SEQ ID NO: 1251 - protein, 1323 aa, Zavarzinella formosa
MRCLFGPVGNPFLKQYLGESTRRERIIPFGPDHFPIGPTDTWETIRVRLGGKEPDCVIVNLGYTSVPDCVWTLPVPVIVLAPDWHLLWHQYRHCLPFAELAITDPAGVEAFRLAGFNAEPGELSAADRPTSRDPGAERDIDVVWVGNLNPAIQRDRAWVLQQLGRMSDRCRVVVRASRDQELFRDLCRRGKIVVESGGPGERRRQAWEASSAGSLYLAVGDGRLLPSPLGDIAFTEETLEGIIWRYLRHEEERRRLVREASASLPPVTFEESLNAIIDTIIRQFPELKARAARRPAMTPLGNLRLRTAQALHQPETADPTLTRDLLIAARDRSHASFCQNALGTLRHRGGGPNPSRNHQALDDFRQAVSAGPGDLLACLNLSEALALTGNPVPAVDEARRGLALIGGASLGRPVLIGDGTRFPPAYDWFRIEWERAGWEHAGDPAGERKARTELIRWRLHSLIAEHTGDLTHAYEAVTARPDLPVTRSALGLALARSGHASEALNHLWVAAELNPFDREAAAAVHALIDSRGEGFKARQFARRRRLLAETIPQALSLEPWFADATRPEADLASVIIPCHNQLTYTRLCVESVLRSVNGPFELVLIDNGSTDGTLEYFESLAGRPEPVRVAVIRNEKNQGFPAACNQGLRRAAGEYLVLLNNDTITPAGWLEGLIRAVRSSPEIGLAGPVSNNAPDAQFVNVPYVDREGMEAFAAERRRDWNGRLLPTGRLTGFCLLIRREAFEKIGGLDERFGLGFFDDDDWGLRAIQAGYKLVVAQDAFVHHFGNRTFKALGLNIRERLRENFRIFGEKWGPEHTKGYHLPGPPAETPDRLDPLNPAGSATPEDKLAPPMRARASGRPRVSLSMIVRNEEHHLPECLASVRDLVDEIVVVDTGSTDGTREVAARFGARVYEFPWADSFAAARNESLRHCTGDWIFWTDADDRFSEENRDRLRRLFAGLPDEIAAYSIKVRSVVEEGRSVRMLDQVRIFPRHPDITWRYRIHEQILPAVSDLGGATRWTDIVVDHVGYADSSRRSGKLDRNLRLLLLEEAEQPREPFTLFNLGRTYLDLNRSAEALDIFRRSLDNASPSLSIVRKLYPLIAQAHARLGQHAEAMAACREGQYKFPDDAELLFQEASLHADVRDPAAAEACLVQLLRTRQGEYFDMVDAGVRGYKARHQLANAMFDQNRPAEAEAQWLAAVGEREDFLPAWQGLGDLFVSLSRWDDAERVRRRLVELMPDSADAEVFGARILLARDMPGAVRELLANAIAGHPGDVRLRIMLTHALIREGKDWPATEAALRDVLKIDPNNADARHNLNVLLNTM

SEQ ID NO: 1252 - protein, 1308 aa, Selenomonas massiliensis
MKLSACYIVKDEVEELRRSLASVHAAADEIVVVATAGVARVAELAAEFHAALYEYPWQDDFAAARNEALRHVTGDHVVFLDADEYFFSPTEVRTGIAAAFDGMPHADIVMISLCSFRTPGVRTDAIYERVPRIFRMPGLHYEGSIHEQLVRDDRAERILVYADERLAAGHTGYLSVRSDAKIRRNIELLERDAAVHGWTAKHAFYLADCYFGLKDYARTLALSEEALRSDRAFIGYEGKIYHQMIESMRALHTPDEKMLPLAEEALARFPQLPDFYAERGMILCGLARYEEAAESLAKGLQIYDQVGRSTRDASFFNDAVAARVAERLSRIYTHLGDMERVKFWSKREQEYMGKNADAEEKTLLISACYIVRNDARHLKSSIESLRDQVDELIVLDTGSSDESAAVAASLGAVVHHFTWRDDFAAARNEVLTYVTGDWIVFIDADEFFSAETRGNLRTVIEDAAAKDHELLLLPWHNIDEASGETLLDSYAPRIFRRCTGRHYEGRIHETLHDADGSAPAVRIVPAELLTLVHTGYSAVLTREKGERNLRLLLDELAQTRHPERCWRYLAETYDNLGDERLAEHYALLDIGRGRQSVIYASRSYRILLRIYGANPMRREERLAVAAQAARDFHELPEMHAEYAEALAALHRYEAAIAAGERAFVREEQRATDISDFTEEMGAELRRRMAVWAQIAAHERQISITAAVFVRDDARDMKTWLENTALYADERIVLDTGSTDGTRTMAEAAGAVVVDFLWQDDFAAARNAALAHVTGDWAVVLDADESFFDPSELRAYLAMLDIVRPHVDAVLLPIVHVDEDAGEKETGRAPHIRLLRMGRGLYYEGRVHEALRKNGGDLKLHHEPAALAIRHVGYSSGRMRAKHERNLMLMERHIAEHGLQPGDCRYLADTYYGLGQYAAALAYARAAMEEDVVSVGAQSHLYHLLLDAMEKEHVPLREQITAARAACQAYPQLPDFHGRLGLLCAAGESGEALPELTRALELYERPIDTNGEASAFPAWAGAVSAARARLLVEMDEAAAAEAELMRSLSLDTAREEALDVYVELHRGMEAGQLAAALNDMLGADEEALSYLVRFADSYGWLSLAEAVRAESARALGNAVSPPAIYAHVQKLAPAEAGGFFVGTLAGHVREIPEILLRLERDRHVESLHLYHRLRALLPRGIRAFWRHYDEPDAVRCPADREGYDLVREAFVHHADAEQAERFLHIAAGYGAEVLDAAAQAFEDAQRWEGALIGWTLAAALKGETADTLYGTALAALHLGGRTEAEGALARLLALDPAHRKARELMELIR

SEQ ID NO: 1253 - protein, 254 aa, Unknown
  Description of Unknown: unclassified Rhodanobacter sequence
MTAAREPLSVVVTSFNSAATLDACLRGVRWADEIVVLDSGSTDATAAIAAHYGARVHVQPFAGYSAQKQAAIDLASHRWVLLLDSDESLAETAAVPLQQALHAPTHVAYQLWRREWQFWRWQSGRARLNHYVRLFDRQHARMSGHAVHEEVCVDGSVGVLDVTIDHHGERDIAGRVAKADRYSSLQLGDLARRRVRWLRLRMVAYPTVAFLRFYLLRGHWRSGWAGFIAARIHAFYAFLKYAKLYESRRQRRDQ

SEQ ID NO: 1254 - protein, 651 aa, Geobacillus vulcani
MNEERRKNMMKPFLSLCMIVKNEEKVLQRCLDSVYGIVDEIVIVDTGSTDSTKEIALKYTDKVYHFEWTNSFAAARNFAQQHATGEWILVLDADEYVDRTNLQEMIQVLKQADNGVEAYDVNIYNFMGTYGERVLQHRHTRIYRNLPHLQYDRSIHEQLRKTNGEYVQAEQGILTVYHTGYMSYVVTEKKKHDRNAPLIEREIQAGDSVAFDYFNLGNEYLSKGEVEQALQSFIQAYQHKKDIRLSWVSYCLVQIILCLKYLQRFDDALRVIADAENLYSETADFQFLRGEIYYLQHRYDDAAQQLEYLLENKNKYPYTIKTVEYVEYDPHMLLGHIYKHKGNLQKAIYHFSCALSFNRKSYEALYHILQLLARAHSEEEIVQFIENKQLANDLFAVSLIARIASNLHLEKVMCSLAAKLGDEVIQRGFEIKVNILQKRYDEALQQILKSSVADLQTYVRSGSLDSYDLLVAAFKTNQLDVVRLLFHLVSEHREKEFLLFMMNEYEETPEPTFYLLLLERTIQLKEYELFEQLLALKGKFPENIHIQIAHLLHRYEFMELAFQLYRSVENMNKWDAESFVNVIEALAVKNEAIEAMQYGMLAISLGHHDFRLYKYVIELMTICGMDEEKKKMVQQAKQLYPDSEWLKEKER

SEQ ID NO: 1255 - protein, 635 aa, Paenibacillus sp.
MTKSNISLCMIVKNEERCLERCLESVKGVVSEIIIVDTGSTDRTVEIARKYTDKIYYFEWTNNFAEARNFGLNYATGDYILHLDADEYIGKGIEHLSEPHDKDYYYMRIRNELPFGNAEMHQFVRLFRNDPELRFVGALHEQIDLLKHKDLQWGLHDAMIYHDGYLEDIVKEKKKNDRNMKIIQVEAREHPNAFNFFNLGVQYSLEGNHEKALEVLKKAYSMGQHLSYAQRILTFIIKSLMELNRYPEALEISQDSALLYSNSADFQYRVGLIYEHLRYDKDAEQCFQRCLEIGEESSRTEFNHYEGLGSYLAHGKLTELYLRNGNIELAQKHFLLGVKEGPDLMFFTKLFTDLFPHLKGKEFVDGLMKIWPLDSAKRIEQFVIYLYSIRHQGTLDLINCYDIDIPQEVKAWLATLEGDLSKAEELWSHAQGIHEYHFRDLLLLSFLLKSPAPMKQYKHIFNVRDKEWKWWEDVVSRKKTTEISLSKDIQTHWRNLCEDIIRTNEFSALEDLINSTNNPDLRVIIAEILYRRGFAEVALEVIIEANSKEGNKKIYPVVRDILRGIGQHEDATYYAEQAYGLEQSFSNGYELLKLYVELDDRKMADAVFNILKVMKPASPSMQVMDFSEWLGQYNS

SEQ ID NO: 1256 - protein, 361 aa, Bacillus shackletonii
MITISLCMIVKNEEEVLARCLDSVKDIVDEINIVDTGSTDRTVEIAKEYTDRVFFFEWIGNFAAARNESFKYATKDYILYLDADDVILEEDQKKLMELKQSLDPSVDSVSMYYDAGTDEYGNVTLRYRRNRLVKRDKYYKWRGDCHQYLDVYGKIINSDISVTHKKIRHSVGRALNIYQSKIERGDIFTARDYFYYGNELRENGHYEKAIENYNKNIELTSGWIEDKLYACINKADCYLFLGDSENELKSLFQSFEFSKTPRPESCSRIGYNFQRKGDYRTAVFWYGLATQLPPDSDQWSFSYPAYYTWYPHLQMCVCYYYLGDFQKSYEHNEKAFQYRPNDKRILQNRELLRNKLAINNE

SEQ ID NO: 1257 - protein, 364 aa, Ruminiclostridium sufflavum
MIVKNEEAWLDNCLQSAGNIADEIIIVDTGSTDGTKEICRKYNACIYTFLWNENFSEARNFGLEKASGKWILWLDADEELEIDDTASFLNMLEKSDTDFQMISLINYFGSPPPDPNKSYLFSSYRLFRNNRGIRFTGSIHEHLDIQISSASANYEVIPNARIYHYGYMEHVVEIKEKHKRNLYLLQKEKQGSDYSPWIDYHIASEYYRVKKYIEAFNNINLSLKRFLEKKTIPPSLLYKLKYDILLALGSFEGAWPGINNAIALYPEYVDLHFYKGLILFEKQKPEEAISAFQQCVKLGDNNPRYLTMTGCGGFRAWYFIGRCSEAMGNPSEAINAYSRAISLYPDCQEASDRLFYLKSITIGQ

SEQ ID NO: 1258 - protein, 658 aa, Paenibacillus sp.
MKLLSICMIVKDEERVLERCLSSVQDLADEIIIVDTGSTDKTKEIAKKYTDKIYDFKWCNDFSKARNESLLHATGKWILVMDADEYISEEEHQDWRNFLQKEERIPHLAYTLPVINFTGEKEYDDEITTAPVTRLFPNNVGITFERPIHEQLTRGPQDELYHKAVSLHIYHTGYQVSRIIEKNKHERNMGIFDQMLADQELTSYDWYTLGNQHRYAKDELMAIECYEKALSDAHQNEAWYPHCLMGLVSLYYSQNQLKRSWELTEKYLIKYNEYPEYYTVKGIHYETMGFFQEAEQQYLRSIGIAEKRAQENREIWLIDPMYSFDSPVQQLIGLYFRLNDNQNAIYWMSKQLNKNNQNPGHLVKMMEWLTQNEGEESVIRFFEKLYTSPTDRDYLLLYKVSLVLGNKRLVSHYKKLVPTDTEQSLSDQLKLFVINGDFAAIHVLLDNTTIITGDEQLVGLQVIVGTLLSNDRSLLNKLSKKLENEKLFSVLKVVTSIIDQHEVSDDIVLDTDVIFAIARQLYLMQEFEVFDQLVNGFNNSDLINRLANYFYDVNRVELAMNYYSALLSRNELNGTSLENLGYYHANQDYRDDAFEFLNGALQDEPGKRHIYKTLISLASNQHKKKIITDFEYNFPDFNEISFVKEFFANELKMLKYTV

SEQ ID NO: 1259 - protein, 657 aa, Desulfotomaculum nigrificans
MISLCMIIKNEEHNLPRCLSSAKDCVDEIIVVDTGSDDNSVEIAKQFGAKVFFYQWDDDFAAARNFSISKATGDWVIYLDADEELEPDCASRFRALAENPEVEGYYFHINNLCDNDDALRHINVRMFRNKPQYRFDGQLHEQILNAIQDSNPGHQSPVVDSGITILHYGYLYSEFLAKNKAQRNYRINKRLVDQWPDNPFYLYTLGCSCINLGNLTEATDYFRKALKYIDFRATYAPSVFISLISCLIRTGELDEAMEQIHRCQQQFPDYADIYFVEGELAARLGLVEKARVCFEKCLSLGEQVQGKFTTKTGVGSFRPMFELAQLYQAQGDLEKAIHYQLQGIKYKDDISQYVTLARLLKTYLKDDVRLLSILRELCQQKDKVKECLTLGQILYDIGAYDLAIRLLDEAPAGPGEIAYLKAQCLLKINGYREAIETLKQIKPGSQLYQNSLPSLVLAHWLATPPLDAAGLLRSGNRQHGEAYETFLCINEHLFKRHPETKIDANSKAFKKLVDQLISLNQAELLVQILTLGGLDTPYSKVWYLTQPPMNPTKLELAAKLALLELKQGSRQPDYPYVLGWYFYDHDELASAQQMLLQAIKLNPADRYKKLLKETYRKQCLNMVKTALQHYPDNPKFSRWLIDIQKDRIQYAGLKGVH

SEQ ID NO: 1260 - protein, 343 aa, Acetitomaculum ruminis
MISISLCMIVKNEEINLKRCLDSLYGLCEEIIIVDTGSTDKTKEIAKNYTEKIYDFDWCDDFSAARNFAFSKATMDYIYSADADEVLDEINQKKFLDLKKVLLKEIDIVQMSYKISEDFNTTQNFNSELRPKLFKRLRTFTWIDEIHETVRLEPLVFNSDIEILHLPSGLHSRRDIGIFINLCKKNKRLSPRLLSMFSRELLISAGTEELFEVAPYFIEMINDTGRGEDEIMQCACILSRYFRLKNDISNFFKYALKSITANGCSEVCYELGEYFFSINDYNEAAIWFYNAVYETKAILNALTGGKAGLLGLSKCYEALNNEDLSDFYKNEADMWSPPKDDYS

SEQ ID NO: 1261 - protein, 362 aa, Unknown
  Description of Unknown: Bacillus sequence
MVSISLCMIVKNEEAVLARCLETIKDIVDEINIVDTGSTDSTVEIAKQYTDRVFFFEWIGNFAAARNESFKYATKEYILYLDADDVLLEADQRKLEELKETLDPSVDSVSMYYDAGTDEFGNVTLRYRRNRLVKRAKNFVWKGDCHQYLEVFGNIINSEISITHKKIKHSIGRNLNIYQSKIERGDEFSARDYFYYGNELRENGHYEKAIEAYNDNIALLEGWIEDKVYSCINKADCYRHLGDLENELRSLFQSFEFSKTPRAETCSRIGYNYQRKREYNAAIYWYNLATQLVPESDRWSFSYPAYYTWYPHLQMCVCYYNLGDFSNAYNHNEEAGKYRPEDLKILHNRKLLEGKLGIGQGI

SEQ ID NO: 1262 - protein, 357 aa, Lactobacillus vini
MKLNLSICLITKNEVANIERCLASIEKIAQEIVVIDTGSTDQTKQLCQQYTNKVFDYQWQDDFAAARNFAISKASHDFIWMLDSDEQVEEIDLHAVNKFIENSDGRTVGRILRKNYTSFNSAKNTQIKTERINRIFPKKYFKYFGRIHEQIVPTDSSVSSNKPIDLPVEIEHFGYQLPAVLTAKAKRDLKLLKLELNDQPNDPYILYQIGKSYNILQENPLAVSYFQKALAAADDPRKDYVYDCVETLGYALNKIHQSKSGIALLNQYPLYQKLADYWFLMGILQMNAALFQPAVSSFLQATKCQHCHTIGCNSFLANYNLGVIYEVLGNQAMARDYYQKCGDYGLAQKGLQRIRKK

SEQ ID NO: 1263 - protein, 587 aa, Desulfotomaculum sp.
MMNETITLAMIVKNEAGNLENCLISVRGQVDEIVIVDTGSTDGAMEIARKYTDKVYSFFWREDFSAARNFAVEKASGDWIFYLDADEELVPGSGDLKCLAARDLCPEAYLLPINNPIDGVTGEYNRFFVLRLFKNNGRYRFKGIIHEQVAVPENGVVEIAEGPVINHRKLPAGNRNRKRGRNLSLLIKASSADPRNRFLQYYLGVEWLMLGKPERALQFLQQAYRNLTDENLLFRGPALRYLIICLNALGRLDEAICLCLEADLKYPEYTDIYYLGGILFEEKQEYQLAIKWLSQAVKCGTPPPLYSHQNGSESFLAFYHLGYCHEMIGQTDAACGYYLQTLTANPKYIYPVYNLFLIILAKSGPLRALEYFKEKGCLNNIEIAFTAAGLFFKSGYPDLARLCLEENGTDRNKDEKFRFYLGKYSIFSGNPGQGIEFLKQISAESEFFVRSQIYQAIALLLQERYSESKSKALALWKNRLARREARILLGLTRQMQKKGILDNCPARIGEDDMLGAVREILEECGRCLPDGRVSAGFDSIGLIEELESITKNFSHKGWLTLYEYYRDKTCAWRDFVNYKFGLGGGRS

SEQ ID NO: 1264 - protein, 342 aa, Unknown
  Description of Unknown: Lachnospiraceae bacterium 10-1 sequence
MVTISLCMIVKNEEKILARCLDSICDLMDEIIIVDTGSTDKTKEIAAGYTQKIYDFTWTGSFADARNFSFSKAECEYIYTADADEVLDRENHEKFRTLKRRLLPEVEMVQMYYGNQLSYGTVYNFDRELRPKLFKRLRTFQWIEPVHETIRLLPVVYDSDIEITHLPEESHAGRDIEIFQKMIDAGQKLSLRLMNLYAREVLIAGSGQELVKAEEYFTQAAEDPQTGEEQLKEAVCVIVRAARIRGDYLKMFRYAMKDIAGNEGGVSEVCYELGEYYLDEGEYQEAAIWYYNAAYETASILNIHCSQELPRLGLCRCYEAMGFYEQAESYKKEAEELASFAG

SEQ ID NO: 1265 - protein, 357 aa, Bacillus sp.
MVTISLCMIVKDEEATLWNCLDSVKDIADEIIIVDTGSTDRSKEIASEFTDKIYDFEWVGNFEPARNFSFKHATMDYILWLDADDVLLEEDQKKFLELKKDLDPSVDSVSMIYNYGFDEYGNVTLSFRRNRLVKRSRNFQWEGDCHVYLVVSGEILDTDICVSHKRVHHSTGRNLAIYEKRLEKGDSFSPRDFYYYGNELSENGHFERAIESYTACLDMEEGWREDKIAACSRLADCYGKIGELEKQRLALYKSFQYDVPRPEVCCRLGDLLAKEKNYRAAVFWYECAIDYVQPSENWGFTYKAYSTWIPHQNLCKCNYYLQNFEKSYEHNEIARKYRPEDSGILHNKKLLEDKLKI

SEQ ID NO: 1266 - protein, 300 aa, Unknown
  Description of Unknown: Candidatus Collierbacteria bacterium CG09_land_8_20_14_0_10_ 46_12 sequence
MKPGISAIVVVHNQQDLLHNCLKSLTSWVNQIIIIDLVGLDDIKSLATSFKAKYILHKNVSIVEEIRQDSLKYAEHEYILFIDPDETIPPSLSQDLKDKLKTSQFDYFLIPRQNFVFGKWLKHSRWWPDMQTRVFRYNKVTWGTTLHAEAVATGEGYAYPSEDRFAIHHENYRNLDEYIEKNMRYAKADALERAKSGTNFTLVVATKLSISELISRFFLDAGYRDGMHGLVLAILQSFYYFMVYAYYWEAKKYKDLESESTIQSFPRVWFSHGLSEVLYWDKKHNFLANIKSKLVRRLIK

SEQ ID NO: 1267 - protein, 256 aa, Niastella vici
MNAITAVIITKNEEKNIQRCLDSLKPVAEEIIVVDSNSTDNTVALCQQAGAKVIVQNWLGYGPQKNLGNNAASHDYILSIDADEALDEQLTQALLEEKRKGLQGIYQISRFNYYYGKFIKHGADYPDKKIRLFNKINTHWDEKDVHETLVIGPNQKTTALKGHLLHYTYYRVEEHILKINYYTNLAAQDYIKRGKKASIFKIVFSPLSTFIQSYIIKRGFLDGLHGFILAIMHAYAAFARYVKLWELSVADKKPLK

SEQ ID NO: 1268 - protein, 366 aa, Bacillus pseudalcaliphilus
MVTISLCMIVKNEEAVLARGLDTVKDIVDEINIVDTGSTDRTVEIAKEYTDRVFFYEWTGNFAAARNESFKYATKDYILYLDADDVLLEEDQKKLKALKETLDHSVDSVSMFYNAGMDSYGNVTLRYRRNRLVKREKNFKWGGDVHNYLNVFGNIINSDVAVTHKKIKHAVSRNLSIYKTKIERGDTFSARDYFYYGNELRENGHPEEAIESYDNNIAMEEGWIEDKFYACINKADCYRHLGDTKKELESLFQSIMFSKTPRPETCSRIGYNFQQKKEYVHAIYWYELATKLKPDTNQWSFSYPAYSTWYPHIQLCVCYDRTKKYAKAYEHNEKARAYRPKDPSVLHNKSYLEKTYGFGSEENQED

SEQ ID NO: 1269 - protein, 341 aa, Clostridium populeti
MITISLCMIVKNEEKVLARCLDSICDLMDEIIIVDTGSTDRTKEIAACYTDKIYDFQWNNDFSAARNFSFTKASKEYIYVADADEVIDEENREKFRILKEAMVPEVEIVQMYYTNQLAFGTTYNFDEEYRPKLYKRLREFMWVEPVHEAVNLEPVIFDSEIRIQHLPLSNHSKRDFGIFKKIMQDGNGLSKKLHNMYAKELFISGEKQDFIEAADFFEASASDSLRSEEEVLEAICVLVKTGRLENDMNRLLKYALRGVATQSSSEICFEVGEYFYQKSDFAEAVLWFYNAAFETECILNIRYGKEFPFARLAECYRRLGNETEAKEYEKLLVSDKEEGII

SEQ ID NO: 1270 - protein, 816 aa, Thermanaeromonas toyohensis
MKKATISLCMIVKDEEANLPKCLESIKDWVDEIIIVDTGSQDRTREIAKEYGALVLEEPWRDDFSLARNAGLERARGEWILFLDADEEVLHENLSCLAYLAHTDMDGFFLHILNFDDQGNCIKQPSLRLFRNHPRHRFKGAIHEQIIDSILEQNPQAKFGVLDIKIKHFGYQGKMVAQKEKTKRNLAILKAEYERGPKTGFLLFNLATEYLRSGEFPQALRYFNEAERLTSPALSFAPLLGKKKIQTLMLLNQYQEALETIDRYLKLYPDYTDLVFLKATLFYSLGRFTEALELYRACLALGEAPYQYVSEKGVGTFKAEVGVREALALLERERLCHHLLPGISLCMIVRDEERNLARCLDSAAQVVDEIVVVDTGSEDRTREIAQSYGAQVYTFPWMNDFALARNFALRLARYEWILVLDADETLRTEEHKRLRQLIATAGELQGFYLKVVNYFGWGDPEDFVVDAICRLFRNKPEFNFSGTLHEEISQSIISYSGPSSLAPVEIHIDHWGYLKRAGLQKKSYRNTALLTSWLNFQPGDGYARYALGVELFQQSDFRGALEEFYKAFTALKGSGILADLYFKMAVCCLELKEFQQGLKIVRQGQEAFPDFTSLWYLEGMLEFHLGNWPGARQAWEKALQMGDPPWYRYTFPYGIGSFRTAAALAEGLEKMGWLEEAEELLEAFLKKRQGLSTLLLPFCRLLVQRYDTVSCLFRLYSLSLPSCFRESLLLAEVFYRLDRPDLGQIFLQKAKEFLEQSPLKSLFLKLAGLQLGLAGQCCIQGLKSGGFSPALKTVWDKISALLEGVAQGEMFNIGIQ

SEQ ID NO: 1271 - protein, 288 aa, Unknown
  Description of Unknown: Deltaproteobacteria bacterium SG8_13 sequence
MQERDMSERQTLSAIIITYNEEDNIRACLDSVSDTVDEIIVVDSFSTDATPEICRHHPKVVFYQHTFDDYSSQRNRAMEYASSQWILIIDADERLSGELSRSILDFLKGDPAVSGAMFPRLTPYMQRDIRHGGWYPNQRYRVWRKGAAHYEGAIHERVVLQGKGVSLKGDLLHYTVKDLSDHADNVNKFSSIAALDRYHKGKKFSLMRLLFKPAGKFIETYLIRLGLLDGLQGFIIAVVSSYYSFLREAKLFELQLPGSDKPSNLPDSYRKRGESESPAPAPPAATRS

SEQ ID NO: 1272 - protein, 340 aa, Clostridium sp.
MATVSICMIVKNEQKVLQRCLESLKGLYEELIIVDTGSTDNTKNIASAYTNKIYDFIWIDDFSAARNFAFSLCTQQYIYTVDADEVLNETNRNKFLLLKQNILPEIEIVQMYYVNVHNENSVYNFQKELRPKLFKRLREFEWIDPIHERVRLQPIVYDSDIEILHMPEGEHTNRDLTILTKLAQQGKVFSDTLFNMYARELFKAGTTQQLITNKNYFLNVFENNALGEKRQLCQIILSKIALIENDTHSFLKHCLSQKAEGITSEICCLLGEYFYNQNDIQEGLSWYQYALETLPCIDIHCCGDKALFAIAKCFELLGQQQQAQYWLQMAQNWTPPEQSD

SEQ ID NO: 1273 - protein, 653 aa, Unknown
  Description of Unknown: unclassified Paenibacillus sequence
MNMLLSLCMIVKNEQDVLERCLESVKSAVDEIIIIDTGSTDRTKAIALSYQARIYEYAWSNDFSAARNEGVKRAAGKWILVMDADEYFAAGDAEKLRQFLEMTEPSPHLIYSINVINFVGKSMEQASITSGEIPRLFPNGYGIEYYRPIHEQLRSESGELLSSLAPVSLFHTGYLEEMVNSKAKLDRNAGIFKELKEKQGFTAYDYYTLGNECAVGKDFQKAVYYYERAIKKQNKLINSSWFPHCVISLIHSYLVQNRMFDAWKLTEEKLSAWKDYPEYAFYKAAILHHLGFMEEAEMAYIQTIETAAIKSRESQVFWLESAEYATTIPMRKLSSIYEWQKKWSDSVHYLTKLLMQDLYDYSALRALLKIMTRFETVEATIQLLDKLYEPDNSKHRYILFRSALANHAEELSRHYYESIADDLALSIEDKLEYFFLVKDKKEYEKTIALIPSGFTQERLARIHALASRAWGLTLEPPLAIEDTEEQNQAAHRIEAIRSYLGGDTEAEDVTEENAGPLLDLLKDSFHLGEFSIYDQLINRYSHDFVIQHMADYMFAQEQTEIALSYYSLLLDQNALNGKNMENLAIHHLHQNLVENGLAFLEEAIRELPGQIYLYVLYLKNAVDLRKKEEYRQKLLAQFPGARKLPIFTDLLTR

SEQ ID NO: 1274 - protein, 356 aa, Unknown
  Description of Unknown: Blautia sequence
MISVSLCMIVRDEEKVLERCLSGVRDLVDEIIIVDTGSKDRTKEIAGQYTKKIYSFPWTDDFSEARNFSFSKASMEYCMWMDADDVLSEKDRGAFLKLKRELSPDTDIVMMRYDTGFDENGNAVLGYYRERLIRNLRGFLWQGAVHEVIAPEGNIVYSDVAVSHKKTGIGNPDRNLNIYKKMLAEGKCLNARELYYYARELYYHEEYKEAAETLRGFLERADAWIENKIEACRVMAECYEKTGERAVSLRTLLKSLEYDVPRAEICCDIGKYFMEEGRYEIAEFWYKTALECKMDLTRGGFVLPDCYNYIPAMQLCVCCDRLGRYAEAEAYNDRAGEYKPDSPAVLYNRNYFRGRT

SEQ ID NO: 1275 - protein, 502 aa, Paenibacillus sp.
MAEQRKRISLCMIVKNEEKHLPGCLDSVLGIADEIIVVDTGSTDETIAIAERYGAQVIRSGWEHDFAKARNKGVERASGEWILFLDADEQLDAATKPQLLEYAGHAELSALLLQIRNQVGPDHDQGSTIHPVLRMFRNDPAHRFEGRIHEQISFSILRKNPSARFHLTDVIIHHYGYRTQVVAEKNKLQRNMELLELALAEDPDNTFHRYNIGVEYLRNNRAEEALEAFRIAKRSAGFEQLSYAHLVLKYESLSLQLLGRWEEAAAPAKEGSAIFPDYTDLWHYIALCSASTGRFKNAMEAAEKALELGAAPARYHTEDGMGTFRTAYLQGRIYEALHDEQGVEQAYMKALRFKPSLLPPLFRLCKYMRTAGREGQLAAWMARRISCPDEAAMLKLAGVMVASGCPASAAAYLEWQGELYKEPGLRHSLAVQANALRDGDYSGLPFAGWLGKDEAEDTLSSAVYWRARAEQYLERVQQSKERPVERQAVQSIRMLLPGFEGW

SEQ ID NO: 1276 - protein, 566 aa, Unknown
  Description of Unknown: Lachnospiraceae bacterium XPB1003 sequence
MDLSFCIIGKNESSHLRRCLTALKKCGHEIVFVDTGSSDDTVAIAREYTDKVFFFEWINDFSAARNFAMEQASEDMVFFVDCDEYLEDDSSCIEAIALMEAYPDALGQILRRNLCDDSNGGQTIYEDLVERFFDRRLYKYTGRIHEQPVRRDGSVPSACRLPMIFSHDGYLGTPEQKKKKGLRDQELLLRDLEENRKNNIPDDPYIFYQLGQASTLMADKEKALEYYKSGVALDIDPSLTYVQMMITNYGNTLTDAQRCEEALALARYEDRIDDYADYFTMLGFAALQEKKYLTAIYYYKKALGASGHNLIFAAGALPHHNLGCIYEAFGNYKKAIEHFEAADKAGHEGSAARASALRNKQENTSDKDNGIFHNFIFICDEATDLTRLNASMDSLRAQTVGFEHVMATFVCRADSKSDPLYTQIRAWENESPDNILVLESDIVDKNTARAEILYTVLQYSSAPLITIAEPGEMIHIDHVRTVRSFSDLLISYSPAVIRCGYVKNIKELYIEPAKEKEPQAWQIPGEEFSRIITSASAGYSFSADSLSGDKTGGYVLADIGLNLIMA

SEQ ID NO: 1277 - protein, 627 aa, Unknown
  Description of Unknown: Paenibacillus sequence
MKKSSISLCMIVKNEERCLERCLNSVQNIVSEIIIVDTGSTDRTIEIAKQYTDKVYSFEWTNDFSEARNYALDQATGEYILHLDADEYLYEGVENLQCELDKAYYFLRIRNELGMGRTQTHQFVRLFRNQPSMRYEGKLHEQINLEKNAHLPSGYMNCVIYHDGYLDSIVKGKNKSKRNMEIIKNAILTSPTSFNYYNLGLQYYHEGQYANAVNAFKKSYSIAKNQTFTSRMLILLINSLLKLEQYPQALEIASDSILLYPENPTMWYEVGSVYQQIGYVEDAMICFNKCLELGEDSGIKEYDHHDGSGSYLAHSRLSELYLLQGEYEQAQEHFFLAVKEAPDLLYLVKLFTDLYPNLSGQDLLAAMIKIWPFNDVKRIQQFLSLLYELRHPVTYELIKCYRVEIDDEIRAWIDMIDGDYDQALMKWSHISKLQPYSKRDLFLLSFITNSFDVMARFKSELGLRDKEWKWWRELIEQHQDNGLELSQESEEFWSHLCSDLIKLQKYDCLETLIGTTVNPRLRYLIAKELNKNGFAELALEVIIESENKKENINIYELVSDILMKLGQVEDAIYYAEKLYQLDKNYQTSYRLLRLLKMENKIAGAALVQELKRNSLKSPWIESIIVND

SEQ ID NO: 1278 - protein, 702 aa, Gracilibacillus massiliensis
MNSILYYNTGRSILSMHKENSYLISICMMVKNEESNLSRCLQSITPLLDRSDVELIIVDTGSIDNTIEIANKYTKKIFYRKWQDNFSEIRNYSISAANGKWVFIIDADEEFIELDKIIKLLNSNDIDNYNAIQLLTNNILYKDGSKTIITPSCRIFKNGNLSYDGAIHNQPIFNGPVYNTNIYFNHYGYINDDRELMDNKFNRTATILKREILKDPNNVYYQYQLAKSLGMHGDHIEALQQIRTAYKVMKENKQIKLYIYLTYANLALLNKCYNEAVEISEEGLQFNDQYIDLFFILSKGLYNIKMYHEAIHAYRRYLKLYEIGENLSIFDDASLEVIYFEENYKLNVIKELIMTAIEINEFKIANEYIHLVNNTKAKNKLAIELYLKSEDYTALKEYLIVHFHETEYPTEIENLVEEVLNNKDDKVIRDISAIFADEETSYGMLNNIRSMDDERVQSILIKEFFQSYDITTLGKNYYVIFEIAISVNFPILKELKKASSRYIKHLVLYSFEKSTDLSSYFYDYMYSTSNIRTSDFQTNRVYCAISNPILLHEQEKANKEENKQLKDERLFEAFNQYIASGENYINLLYQVDRLRINYSVVDDMEHQLFILLYLSAQSAKKGDVKTTISYYKKAVDVYKPFAKYLEIYLGKLYQDIAKGLIEKNMYEEAMEMYEEALIKSESDEEQDDILNKITSLEGSQQP

SEQ ID NO: 1279 - protein, 309 aa, Unknown
  Description of Unknown: Candidatus Shapirobacteria bacterium CG_4_10_14_3_um_filter _35_13 sequence
MKPLISAVINVINEANNLDKCLHSLKNFANEIIVVDMESTDESVNIAKKHGAKVFSFKPMKYVEPARNFAISKASGKWIILLDPDEFLPKSLKHELTKITLRHNVDYVKIPRKNIIFGKWFHNSRTWPDYLIRFFKKGSVTWNKEIHSQPETKGNGITLLDSEKLAIRHNHYSSVSQFVIRSLRYSSIQAEELDKAGTKLKMSDFILKPVQEFNSRFFFAQGYKDGIHGLVFSLLQTFSIFLIYTKLWEKQGAIEKIVSRDSFVSASQEAIYEYSYWFTKYFKEEYTHNIFKIGILKLKLLINRFTKNF

SEQ ID NO: 1280 - protein, 628 aa, Paenibacillus polymyxa
MKTISLCMIVKNEELHLDKCLKSVVNKVDQIIIIDTGSTDQTIDIARRYTDELYHFEWINDFSAARNEALKYAECEYILVLDADEYLDENADLQKDLVSEADYYFVKIHNFLSGDRAIDHLAIRLFSNNKGMFYRNRLHEHLNTMDEERSYVAAHAEFKILHSGYTDEMLQDREKAKRNLPLMIQEVEENPNAYNLFNMGRTYMWIGEFEKAINYLKRAYPLSKDLAITPELVTSLCRCLGEMSRYSEALEILKDAVKVFPREVDMLHMQALYFMEEGYFKDAVATMEACIELGDQGITVIEGNGSFIAHYRLAEWYETKNDMLKSYDHITKALQDKKRFAAGLNKYLQITMKANIPLEDVYKSINQLYPLKDVKDLEHILEVLYALRHPLLHRYLHEFKVKVQESVQTVALQYAKEYKNAESEWLMMETIPVQNAKDVLLLAFLRKSDELLFKANSLLNLSNKEKKIIKKIYNNYFSPNDKLTSSIEEILLDISSSLIALKEFDLFEQLLKIIWEGSMEVKYKICQKLASHGFDEIAIDLLIKLFEKYPREIKVIRLLGDICLSKGYLQDAELFYAKLLELYSKYSSYERCFDLYERLEDNQSSARICESIKDKFPLCIWASKLSLS

SEQ ID NO: 1281 - protein, 357 aa, Unknown
  Description of Unknown: unclassified Clostridiales (miscellaneous) sequence
MITISLCMIVKNEEDVIARCLDSVKDIADEIIIVDTGSKDNTKEIIKKYTDNVFDFEWIDDFSAARNYSFSKATKDFILWLDADDVILEEDRKKFKQLKRDLDPNVDVVMMKYNVGFDEDGNVTLSYFRERLLKRINNYQWMEPVHEYLELRGNIINSDICITHKKERPAIQGRNLAIYKKAIMEGRTLTPRGLYYYARELFYNEKYDDAIEYFNKFLDTRRGWVEDNIAACYTLSICYENINDKRNMLKILLKSFEYDIPRAETCCRLGDYHFSNEDYRKAIFWYKLALELEEPINSWGFIQHDYWGYIPCMKLCLCYNILGNIEEAIKYNDKAGEYKPNDSSVAHNKIYFKSISK

SEQ ID NO: 1282 - protein, 327 aa, Trichomonas vaginalis
MEKQLAELSVYILIIFLILGFIMAILMRFGDDTTLFDLTQLPKNNPKKLNYYVQPAKNPNENVPFKTIFDKPQVYVSFIVPAYNEEKRLPKMLEETIEYLEQRRYKDNNFTWEIVVVNDGSKDRTAHVVLEYAERYSNIFLLNQPHNMGKGAAIQAGCLHARGQLVLMVDADGATKISDFGLLENEIKKLMKNNKEAIVVGSRTLNEDKSKVHRTFIRKILGLGMHILIVISGVHGIKDTQCGFKLFTRDACKMLFMNQHVQRWCFDPELLVIARRRKMKVSEISVEWNEIEGSKMKISGMIKMAIDLLRIAVFYRLNIWTIRDRKF

SEQ ID NO: 1283 - protein, 359 aa, Baia soyae
MIVKNEEKNLENCLSSVKDVVDEIVIVDTGSTDRTKEIAKRWTNRIYDFEWIDDFSAARNVSFQYATKDYIFWLDADDVMEQKEIEKFKFLKKSLSEEEIDVVYMKYFLPSNKIESHTTRIRMIKRGLSAKWGGIVHEDITVNGEHRYTLSDVVITHTKDLNNTDDRRPSRRNLEIYELNIARGHKLSVADMFNYARECSIHKDYPNAIKYFELIRDHPEVSLQNNMFIYHKLATCYVLNGQPEKELELTLQSLSLDMPYPAFSCRMGEHFIKTGQIEVAIFWYKTAYMQPLSDSYSFSVADATYHTWLPHQQLAICYEALGEMDQADFHNRQAEYYKNRLVNQTKKVNTSLNTMDSRS

SEQ ID NO: 1284 - protein, 319 aa, Unknown
  Description of Unknown: unclassified Clostridium sequence
MTTFSLCMIVKNEENVLARCLDSLADLMDEIIIVDTGSTDKTKEIAARYTDRIYDFTWIDDFAAARNFAASKATMEYIYTADADEFVDPENHRQIRQLKEVLLPEVEIVQMYYCNDLGDYNTTGNFERELRPKLYRRQRSFTWIDPIHETLRLDPVVFDSEIEIIHRPEESHGSRDLSALKRLHEKGIVLSSKLHHMYAMELFIAGEDADFLAAEESFLESVEQPSCSTDEILEAICVLTHIYRLKGDIHHFMTYALKGTAMGGCAELCCELGAYYEACGEDQEAAMWYYNAANETESVLNIACHTTIPQKALERLTTR

SEQ ID NO: 1285 - protein, 642 aa, Paenibacillus ginsengihumi
MTKKISFCMIVKDEEQNLHRCLGSLRPILDQDYAELIIVDTGSTDRTVEIAKEYTSHIYFHEWNGNFSSMRNISISYATGEWIFIIDADEELETPDELIALLHDPKLSNFNTVRIREKNLLSIQSKKYVYHVQERMFRNDGTFEYRGTIHNQPIYKHPVLIKDIWLMHYGYISEDKELMEKKFKRTATMLKKELEKDPDHVYYRFQLARSYMMHNESATALEEMTKAYQSMKKQPKELIVHRYYVFGEYARMLLNAKKHETVIEICKEGLSYSPNYLDLYYYMGHSYVEMEQYEEGLSALEKYVQLHEKYNAGQLELSNFTAIEMYTLDELSYNITLNQLVRLIYSKHIHFEPSKYKKWIKNISNKNLSDKLNTQLLLLEDNYVELRKLYQGIDEKEKGPFVNYLESLKKEWPIERKELFTNAFSELEDSYGLLNQIRLSENRKPLLIQFINQYNIIEYSDEVILEFVHYLLEEKCLNRLFKKLDSSTIKKIVKVLIDQEGKEPYFLQSLRNDFKYSDFHNNRIFIAIANVILLSKAEEKNWPVDLDEQMIRDLFNQYIHKGIEFIKSLYNIERIRLTYPVITNKEEKFLILLYLAECAKQAGDRLGYHRYIKEATEEYPYLSRLLREYVIDGLANLETINR

SEQ ID NO: 1286 - protein, 319 aa, Catonella morbi
MIVKNEEKVLARCLDSLKGLYEELIIVDTGSTDSTKEIAAGYTDKIYDFAWTGSFSDARNFSFSKATMEYIYSADADEILNEENRQKFLELKQCLLPEIDIVQMIYTNQLEFNTTYNYDEELRPKLYKRLRTFEWIEPLHEQVRLETVVYDSEIKITHAPENNHSKRDFSCYKKLIESGEKLSKHLFEMYVRELYIAGDESDFIEAEPYFSREIEIRESVDEVVMAALVLIRAAGYQRNTLCLLKYSSRIFALAAEPSAGVSIPSELCYELGEYYLGVNDKAEAKMWFTNALTETESLVSLDCGDKLPKERLKELEGTE

SEQ ID NO: 1287 - protein, 361 aa, Bacillus farraginis
MITISLCMIVKNEEDVLARCLDSVKDIVDEINIVDTGSTDRTVEIAKKYTDRVFFFKWTGNFADARNESFKYATKDYIFFVDADDVLLEEDQLKLIELKKSLDPSVDSVSMFYDAGTDEYGNVTLRYRRNRLIKRERNFQWQGDCHNYLEVYGNIVNSDISITHKKIHHSTGRNLNIYQAKIDKGDIFSARDYFYYGNELKENGHYERAIESYNKNLELKSGWIEDKVYACINKADCYRFLGDTDNELKSLFQSFEYSKTPRSEACSRIGYNFQRKREYIPAIFWYEIATKSKPDSNQWSFTYPAYYTWYPHLQMCVCYYNLGDFQKSYEHNEKARSFRPHDERILQNKALLEEKLRIEVN

SEQ ID NO: 1288 - protein, 580 aa, Desulfacinum infernum
MPWPCWNRLRHWMKTTKRWRRPLPMFVNGSGKRRKKMKSRARCVPEVVWVGRPLISLCMIVKNEEKNLPRCLESVQGQVDEIIVVDTGSSDRTVEVASQYGARVLTHPWNGDFSAARNVSLDHASGGWVLWLDADEELLQAPDGSTLKQMADSGTAEAYLVPVQNMRLDGSFTAHYAVRFFRKLEGIRFEGKAHESVGDWLLRQNARIERSPVAIRHWGYAVTDAELQRKLDRNLELLKAQLERDPNNSYVHYYIGMTLVGKEDFEGSFHHLQRAYELGPETPNMECLVANMLAYHQLHRCNYGEAEKWARRSLAITPQQHTAKMFLGIALYNQKRFAEALPLLQSAYQFQRLPLERRRSDISLEHSYGEKELLWAVARSAYETRSYPLAHQFLQRLARSGGSDAAALTLQGLTALALESFRSAVAHFDHAKVLGASWQQIGAPWTYGLLQLGRLDDALAVLSEAGASFFLNENAEQTFALLVERCFESSRIGPLVRALERIAQNAHVPPHVLDALAVCHIKSGNYEKAAAALDALLEKDPGNLEVRRRLAAVWVRLGRETMAARLLRSYRRDGTASAAP

SEQ ID NO: 1289 - protein, 359 aa, Paenibacillus thiaminolyticus
MIVKDEQDTLERCLSSVQDIVNEIIIVDTGSKDNTKQIARKYTQHIYDFEWIDDFAAARNFSFDQATQDYILWMDADDVLEEEDLQKFIVFKQQLDVDIDRVMMPYHLALDVDGKPTCTLRRNRLVRRDRGFRWEGAVHEALIVSGTVIQSDIAITHRKEKKPTDRNLLIFRKRKQANAEFSPRDLYYFAIELRDHGFYEEAVAAYKQFLATKQGWVEDCFHACMNLSDCYSSLGKDTESVKALLHSLSYDTPRAEMCCRLGSFFLESNHLEKAIYWYHTATRLGQPDHYLGPVAREYWTWIPHFQLSICYDKMGQWTKAQLHNEIASFHNPEHPLLLNNRKYFAQKIIETALSASPPF

SEQ ID NO: 1290 - protein, 365 aa, Bacillus clausii
MRSFSICMIVKNEADILEETLESVKGVGDEIIIVDTGSTDNTKDIAKKYTDLIFDFKWIDDFAAARNASYSYATKDYILFMDADDFLPDEERAKLLQLKKNLDMSVDAVSMFTVTGVDEFGNPIFKFRRHRLVKRSNHFKWHGSVHEYLEVGGNIFHSDIYILHRKQKKKIDKERRRRNLNIYEKKLKRGDVFSPRDLFYYANELKDHGKFQKAVEQYTKFLNSREGWVEDNIRACIYLADCHRSLGNHLEEMEALAKSIVFDIPRPEVSCRLGDMYKEKNMFDKAIIWYRLAIEIDVSDLLGFQYEQYSTWYPHLQICVCYWHIGNKELSFYHHQKAKEYRPDDKRIQYNEQFFKKIEENNAEG

SEQ ID NO: 1291 - protein, 343 aa, Anoxybacillus tepidamans
MGNPSISLCMMVKNEEDFIEQCLASVQEVVNEIIIVDTGSTDNTISICGKFQTKIYQYAWNNHFADARNFGLSKASGDWILWMDADEELEQGKSDLIRQSIQKTKSPVLLLPIINYYGDGFPVQENQTFLCYQPRLFRNRVGIQFLNRIHETLHLPDDFLSYDLSETVDVSLHHYGYIKEVTQRKNKGYRNKQLLMEEMNDPNHSPWVEYHLASEFYRENNYTLAFSYINASILKFLLHQMKPPAIAYRLKYAILMETNSIDGAWPGIEKAILLYPDYVDLHFIKGYILFQKGMYKEALAAFEKCLELGEDNINYLILRGTGSFKAIKYKELCLNKIETENTF

SEQ ID NO: 1292 - protein, 308 aa, Coraliomargarita sp.
MPITIIIPVKNEAGNLPECLSRLEDFEHVVVVDSGSTDETVAIAEKAGAEVLHFQWDGRFPKKRNWVLRNYDFKTDWVLFLDADEFVTPRFVEELRAALADGSKVGYWLNYERWFLGKQLRYGDEFQKLALFRVDAGEYERIEELNWSALDMEIHEHPVVDGEVGEIKAPIEHNEYRGLRHYIAKHNEYSSWEANRYLRLSGYEGGKVESGKFKPTSLGDAESRGRRFGGSEWEKLTERQKKKYRHLTKWWAAPVYFLRGYFWKRGFLDGAAGFHFAFLKAVYFYQIRLKIKERLGGGSGFSAIRRDK

SEQ ID NO: 1293 - protein, 390 aa, Unknown
  Description of Unknown: Lachnospiraceae bacterium sequence
MNTYNHQSEICGLSICIITRDQADKLEKCLKAIHDNLIPILPENTLEIVIVDTGSTDNSKDTSLKYTSALYDFPWINDFAAAKNAAVSHASNDLVLILDTDEYIEPFTSTTFFSEVLSHMSEAPCSVGRIERINHYTNPDGHATEYREWINRLFDRRYFHYEGRIHEQLVTVSDSDVTYSTWKTPFKILHDGYDLSPEKMKEKAERDASLLRISLAETPDDPYLWYQLGKSCFAAENYISAEEAFMKGISLSPAPNLEYVEDLLETAGYTLLKINKAPEALQLLAPYNDQEPFHSSADFQFLFATILMNCGRFEDAIDNFVFCTTLPASRTTGTNSFMAWYNAGVILEIAGLPAEAAEYYKKAGDYIPAVEGLKRLSDGNSTNGFHPVSS

SEQ ID NO: 1294 - protein, 335 aa, Unknown
  Description of Unknown: Ruminococcaceae bacterium HV4-5-B5C sequence
MVTVSVCMIVRNEEAVLVRCLDSLAGVADEIVIADTGSTDRTKKIAAAYTPKLYDFPWGGDFSAARNFAFSKASMEYIYSADADEVLDAESRQKFMELKRTLSPETEIVQMRYANQLRYNTTYNFDAELRPKLYRRLRTFRWTGPVHEAVELSPRIVDSEITVFHMPQSLHSPRDFSILEKAAAAGSMDERLARMYAKELFISGTDRDFLAAYPYFAAVLHDEARSLDEVRVAQCVAAHAARLKNDGTELFKAALKNVIAEPCAEVCCELGAWFFRKGDWEEAATWYFTASSGVESELDVRTSGSIPLLCLAQCYEKLGMVQEAQNCRAKAAHCA

SEQ ID NO: 1295 - protein, 372 aa, Paenibacillus pinihumi
MSDNIQVSLCMIVKNEEAVIGRTLKQAEKHVDEIIIVDTGSTDRTKEICLEHGARIYEFGWTNNFADARNYGLDKAQGTWIVWLDADEELEVEDAGLWRSSLEQGKPLLWAIPIINYFGSAPADPNRSYLAAQHRVFRNGAGLRFAGAIHEQLQVGHLPDDALELRQLPARIHHYGYMDAITVQKNKHQRNVSLLEREKIGEDYNPWVDYHLASEYYRVGQYEAAFENLNTSIRRFVESGKLPPSLIYKMKYDILLALGSIGTAEQGIEKAIQLYPDYTDLHYYRGLILFMKERYRDAETAFRHCLELGEQRLPYLILKGVGSFHALYLIGRCRESVGDRDGARIHYRKSLELYPEYGEALERLGGLDTDQG

SEQ ID NO: 1296 - protein, 359 aa, Unknown
  Description of Unknown: Chryseobacterium arachidiradicis sequence
MKISLCLIVKNEEEVLGRCLESARDFADEIIIVDTGSTDETKEIARQFTDKVYDFEWINDFSAARNFAFSKATMDYQMWLDADDIVPEKSVQEINNLKTALSDDIEIVTMKYVLSFDHNNNPTFHSTRERLFKRSKNYQWIDPVHECIPLIGHLQYTDIEIWHKKTRQEVVSTRNVDIYRALEKSGKAFSPRQLYYYARELKDHNDTENAIIYYEKFLATGLGWIEDVIACCHQLAIEYKKIGSEEKILPTLFKTFEYDIPRPEICCELGYYYKEKQNYNQAFKWFDLATKVVVSDNVGFVFSDYSGYIPNLEACVCLSFLGDYPKANEYNERASVSRPDCPSVNQNREYLKSMMADYF

SEQ ID NO: 1297 - protein, 236 aa, Campylobacter jejuni
MNISIVILTFNSQKYLQEVLQSVNFANEIILIDSGSTDNSLIIAKTFKNVKIFHQAWLGFGKQKQFGVNQSKNDWVFILDSDEIVTQELKEEIMQTLKQPRYHAYKVARLNFFFGKTIKTMGLYPDYNIRLFNKNYAQFDDREVHESIICQEKIGKLKHHFLHYAYENIEQFIDKQNKYSSLNPKKNNLLKALINPYWTFFKLYFIKLGFLEGKRGFIIAKLYAQYTFWKYIKSEF

SEQ ID NO: 1298 - protein, 335 aa, Clostridium sp.
MITISLCMIVKNEEKVLKRCLDSVRDLVDEMIIVDTGSTDRTKEIAASYPGAKIYDFTWVDDFAKARNFAFSKATCDYIYSADADEEINEENRKKFMRLKQVLLPEIEIVQMKYVNQLSYSTVYNYDEEYRPKLFKRVRGFIWEGAIHETVATGPIVYDSDISIQHKPESLHTGRDFAAFERLIKRGEPLSKRLKNMYAKELFIAGGKEDFRQAADYFEQIADTAEDEEELKEALAVVVAAKRQRKDTDNFFKYALKSVILGGCSEVCFEIGEYYFSKGDYEEAVLWYYNARYETEAILCLKKKEREPLEKLVECCEKLNRPEDAYTYRKELEQL

SEQ ID NO: 1299 - protein, 356 aa, Cohnella phaseoli
MVSISLCMIVKNEEAVLARCLESVCDLVDEVNIVDTGSTDQTVAIARRYTDRVFFYEWTGNFAAARSASFSYATKEYILYMDADDVILEEDRHKFKKLKEMLDPAVDSVSMFYNAGEDSFGNVTLRYRRNRLIKRSRDFQWKGDCHNYLEVTGLIVNSDIAITHRKIKHSVSRNLNIYKMKLERGDPFTARDYFYYGNELKDNRHYAEAIESYKRNIELNTGWVEDKINACINMADCYRYLNDQDNELTALFQSFRFDSPRPEALSRIGDQFKRRQVYRTAAYWYEQAIRIPENNTQWSFSYPAYRTWYPNLQLCVCYYYLGDLDAAYRHNEEARKYRPQDPHVLHNKQLLEAKRA

SEQ ID NO: 1300 - protein, 460 aa, Paenibacillus odorifer
MDKTITLCMIVKNEEKYLKRCLESVKDKVSEIVIVDTGSTDGTLVIAEEYTTKIYHFKWVDDFAAARNESLKYATSEYILVLDADEYLESDADLQKDIKPDYDYFLLKIYNDVSYGRAFTHTAVRLFANNRGLHYNNRLHEHLNILDAKTNYKSQYGEVIIHHTGYTDEIMQEKEKTKRNLPLMLQEVEENPGAYNLYNMGKTYLSINENAKAIEYFQRAYPLSSGRMFLPELITKLCYCLGELNQYDDSLKILNDAVKVYPLETDMRYMQGRIFMDAGYIKDAEITLKSCLEFGGDLGVSVTEGTGGYMTRFVLAELYEDQNQLDESYKYIVEVLQEKKTFAPGLSKYFEIVTKSNIPLDDVYQNIIQLYNISNINDLQLLLDVLYGLRHPLLNRFISVYSITAQPNVAASAMQYDKKYIEAKDMWLSMEDIQIENAVDILLLSFVLDNEELFNLAKPH

SEQ ID NO: 1301 - protein, 601 aa, Clostridium populeti
MNREKTVSLCMIVKNEENYLTECLNSVKGIIDEIILVDTGSTDNTLLIGESFGAKIFHYQWDNNFANARNFSISKASSDWILLLDGDEIFDRNYLDDFIQLINESPYDGYLFTIYNYTGHLKDKDFSIHHAFRLLKNHKGYTFKGAIHEQIVSSDQQVTSLPFEASPIVIHHYGYLIDVVAEKDKRARNIPIIEEQLKDDPENAFYLFNLGNEYLAAHQLEKAFEIYSLSRQHLSKNPAFAPYLYYRMIICCTILKRNEEAILLADEILTQYPSFTDIVYCKGILFFNMHQYTMALDTFDQCIKMGPSPLLLTFLDGCSTYKPYLMKADIYRRLNDLDRAIYCFSQSFYLDKKTPQVLYDIAALLHKKHKEEKKTAEELAHYLSDSLPDSVLYIDILISEQLYETANELLQQLSRTHPSSVEILFLRGKLHFYLQENPLAIDCFQQVLDISCTSEILKDIDLESLKYLFTLNLMEQQDKLDSLIQQIETKGTPNLLKIYQEIYNLHLDKKDTLFTEEDDPGIYLPLIFDFLDKLLKIKSFDLFEKYVYLLNRLETNVVLLELARLYEKNGYQEMARKTFIKSLRDLDVIDIRSLDFLATMY

SEQ ID NO: 1302 - protein, 355 aa, Bacillus nakamurai
MISISLCVIVKNEEEVLAGCLDSVKDIADEIVIVDTGSLDQTKEIASRYTDKIYDFEWIDHFAAARNFAFSKAEMEYILWLDADDIFLEEDRRKLIELKASLSKDVDAVSMYYHVGFDARGEVNFKYRRNRLVKRDIGFRWIGAVHEYLEVYGNIMETDIAVTHRKSDKKHSPPSDRNLNIYEKMAENSETMTPRDLFYFANELKDHGQYQRAITYYHHFLSTKQCWIEDEIRTCQYLSDCYKAVGHEEAALTSLLKAFLIDCPRPEFCCRLGDYFTEKQQYPQGAFWYELALSAKSNDTSFTQVEFSTWYPHLQLCVCHWQLGDREKAKYHNDKAASYNPSHPSVLYNQGVLGG

SEQ ID NO: 1303 - protein, 252 aa, Sporocytophaga myxococcoides
MKVPVSAVVITYNEERNIERCLKSLARITDDIVVVDSFSRDNTEDICRRYKVNFLRRNWEGYGPTKNLGNSYARYDYILSLDADEELSEELIEEIKSELNHPQFDCYEIPRKSNFCGKWLKFGHWNPESHVRVFRKDKIKWDNSPVHEKLNMEKGTSVKKLKGAILHYTIYSLDQYDQKNDKYSTLAAERLFKEGKKPGFMKLYISPFYRFFHSYILKLGILDGYYGYIIARETGKVTFQKYNKLKKLRAEK

SEQ ID NO: 1304 - protein, 595 aa, Ruminiclostridium sufflavum
MKNEISLCMIVKNEEDNLQRCLNSVKDIVDEVIIVDTGSTDKTVYIAESFGASVYNYIWDNNFSEARNESLKYASKDWILIMDADDEFCRDDKEAFLQLISSSLEEKTLYYFETLNYCGSFADSSNISINLNPRLFKNNLGYKYEGEVHNQLVNHKISTKDVCVSIKIYHYGYLDSNIKGKDKRKRNIFLLEEQLKKEPDNKYALFNLGNEYFASNEIAKALDYYYKSYENFTPAAGYGFILVLRIVLANYFIGLYTKALEFTDIGIQYYPGFTDLYYFKGCIYKSMDRPLMAVRAWEKCIEIGDPPSGLKFLYGTGSFKAMYELALICMEQKDYHSAYKYFNETIRIKPDLIISVYKIAYILKEENVASDEFKYILELFFEDDAKAAIVLADICYSVGYYEAALEYIKKCEENGIKSDDVRLLEIKALVRTGDFEKGIQINNFDSNHYFFPSFSMYKVICAIMLKEKLLAFYIIDSLKNNSFQDKNKKIYESYTQLVNLFFGKETQVLTEDEKEKEYTAIIFEILEIFLINKRFDEFYIAINLLNLISDKSVLLHLGKLYYKYGYFDMSKKELIRSIKEFEIYDKDALNILKQL

SEQ ID NO: 1305 - protein, 364 aa, Bacillus oleronius
MVTISLCMIVKNEEDVLARCLETVKDIVDEINIVDTGSTDRTVEIAKEYTDRVYFFEWTGNFADARNESFRHATKDYIFYIDADDVLLEEDQKKLKELKESLDPSVDSVSMFYDAGTDEYGNVTLRYRRNRLVKRARNFLWKGDCHNYLEVYGKIINSDIAIKHKKISHSTGRNLNIYQTKIDRGDIFSARDYFYYGNELRENGHYEKAIESYDQNLSIKEGWIEDKVYACINKADCYRFLGDLDNELKSLFQSFVYSKTPRPEACSRIGYNFQRKREYKNAIYWYSIAAQSEADTNQWSFTYPAYYTWYPHLQMCVCYYNLGDFQNSYEHNEKAYSYRPNDERILHNKKLLEDKLNINSKNPT

SEQ ID NO: 1306 - protein, 377 aa, Clostridium hathewayi
MITVSLCMIVRNEEDVLARCLDSVSSLVDEIIIVDTGSQDKTREIAARYTDHVYDFTWIDDFAAARNFSFSKATMDYQMWLDADDVMEEEDREKFLQMKNTLNTRQKENAEDGPDSTPDVIMLPYHVAFDSHGRPAMAYYRERLLRRKSHFIWQGAVHEVIAPAGKIIHGDAAVCHRKIHPSDPDRNLKIYENMVDSGRKLEPRHQFYYGRELYYHARYEEAARILETFLKEGNGWVENNISACLNLSECFMKLGKSEEALTALFGSFRYDEPRPEICCAIGKWFLERGNQDRQYLKQAVYWYLQAKGQVTDEKSGAFVNPDCHDFIPDIQLCVCYDRLGENAKALEYHEKAKAKKPDNPAVLYNEEYFAKKKGSTV

SEQ ID NO: 1307 - protein, 585 aa, Desulfotomaculum reducens
MKNTITLVMIVKNESENLGTCLDSVRDQVDEIVIVDTGSTDNTLEVAAKYTDKVYFYLWDEDFSAARNYAIARAGGDWILFLDADESLVCEPGQLKELVSRDNKIDAYMLPLDYPIAKSTDEYNRFLVLRLFRNNKGYHFKGKIHEQVVVHNHEVVGLADNIFIKHSMISPKERNRKRGRNLTALKKAISEEPDNYFLQYYIGVEWLGLGKPARALPFLQSAYQNLTDNHLLFRAPSLRYLLICLNALGNYDQTICLSQETAFKYPDYTDIYYLGGIAFEEKAEYKLAIKWLEQAVKCGVPPVIYSHMNGTGGFLAHYHLGFCYEKLGQVDVAQECYERALEVNDSYIYPVCNLFLLMLGRFGPGYTLNYFKKKGYLKKSDLALTVADLFFNSGYPGLAKGCLELLEEISHKTEEVVFQLGRYNIYSGRFQMGLNYMVQIPEASDLFTTAQTHRAVALLLAGRFKEGRNLGLEMWKNKMSKDTARAVLTLSNFMQGEEILRYPAKVNDLELMKSSITLLDMCYHYLPDRDGQRCPYLNQVISILEKMITGSSPDGYLTLEQYYKNKSNNLKEFFNYKFGTGGFMA

SEQ ID NO: 1308 - protein, 553 aa, Paenibacillus macquariensis
MIDTHHPLISLCMIVKNEAEHLATCLESVQEVVDEIIVVDTGSTDSTIQIAQHYGANVISFPWTSDFAAARNVGITQAQGTWILILDADEELDHSSKEELKLCAIHLEYEGFFLRIHNHTGKEKSSPTATVNPILRMFRNRPEHLFRGIIHEQIAASITEFRPNAALHLSTVMIHHYGYADHTVSEKDKIQRNVTLLTKELRRSPNDPFQHFNMAVEYMRLGEHQKALDHIHKSMALIVPDTSYGHLLHKYEIRCRYALGQIDEALNCCNQAIGIYPEYTDIFHLKGAIFFANRMLYEARSTLMKAIVLGPAPTHYHTETGLGTYLSCNMLGQIAEEVGHDSEAITWYTKSALFQPDWVQTSNRILRMMKCVDREQDIPELLANHFPLHIQDTEIRNEVIKWLALDGSYQAAQSLISQLDTFKTDESEASWRSLISSDHPFISDIPQETLTLAIPYAYQFGQENKAFNLLRQWEHRYQNESRNSTDILHSTEQIQDEVLEPKQPTESLMNEAYHLGRTWIALTDAILSRNEPSSPHYSAIHRVRLMLPLPRIK

SEQ ID NO: 1309 - protein, 320 aa, Unknown
  Description of Unknown: Eubacterium xylanophilum sequence
MIEISLCMIVKNEENVLARCLDTIADLMDEIIIVDTGSTDKTKEIAARYTDKIYDFEWIDDFSAARNYSFSKATKDYIYCADADEVLDEVNRRRFRQLKELLLPEIEIVQMRYCNQLDKGTVYNFDAEYRPKLYKRKRDLVWIEPIHEMIRLDPVVYDSDIDIMHMPEENHNSRDFRVFQKYINKGNGLSKRLHHMYAMELLMAEDDEAILEAEEYFTQIVNDPNRDIEQVKEAACIVARAARIRDDAGTILKMCLKDLLSEGSSEMCYELGEYFYGKGDYNEAALWYYNAMNETQNICNIHTSTDWAEERYNMCAEKLR

SEQ ID NO: 1310 - protein, 337 aa, Unknown
  Description of Unknown: Lachnospiraceae bacterium V9D3004 sequence
MITISMCMIVKNEGKVLRRCLDSVADLVDEIIIVDTGSTDNTKAIAAEYTSKIYDFEWIDDFSAARNFSFSFATKDYIYTADADEVLDDTNRERFLLLKQALLPEIDIVQMYYCNQLENGTAYNFDKEYRPKLYKRLRTFTWIERVHEMVRLDPVIYDSDIEILHMPLNNHSGRDFKVFLKQFNTGARLSKRLHHMYAMELYISGKDEDCINSIPVFEDTLSDTTRNEDELNEAMAVLTRAYRLNKDERSFFTTAIKAVANAPSAEVCCELGEFYYSIGNYNEACIWFLNAATETESILSIKTSGIIPYNRLADCYEAVGDAETADIYRKKAEEINV

SEQ ID NO: 1311 - protein, 362 aa, Unknown
  Description of Unknown: Bacillus sequence
MIEISLCLIVKNEEAVLERCLTSVKEVVDEVIILDTGSTDRTKEIAASFTDKVYDFTWVNHFAKARNKAFSYATKPYIMWLDADDILKEEDRHKLKELKSTLEEKVDAVSMDYHLAFDGNGGVTSSIRRFRIVKRERGFVWHGAVHEYLEVFGELHHSDIAVTHLSADDGHDLTRNLDIYEGMKASGQAFTPRDLLYYANELTDHRRFEDAVEYYLKFIKTDKGWSEDLIRSCNKLADCYINLGLPKVAKDWTFRALEYGKPKPETCCRIGHSFMEKQAFSEAVFWYEMAIRNKEENAYFQNVACETWIPNLQLAVCYDKLGFTEKANEHNEQAATFLPNDSRIEYNRSYFKEQLQLLKQND

SEQ ID NO: 1312 - protein, 367 aa, Cohnella sp.
MITISLCMIVKNEEAVLERCLESVRDAVDEIVIVDTGSTDRTVEIARRWTDAVYHFDWIEDFAAARNASFAYATQSHILWLDADDRLLEKDRLALLQLKKSLDPNVDAVSMLYHCDFDSAGNVTLAVRRARLVKRSRDIRWEGVVHEDLIISGACIDGDIVVTHGKLKEGSDSGRNLRIYAKLLESGGTMGARDLLHYGMELHQHRRYAEAHEIYSKFRSLPSTKGEEHIFVCIRQADCYYHLGDRDKELLATFQAFQYDTPRPESCCRLGYYFMEQGRYAQAIYWYKEALDAPIPENRWAIRNEVSRTWLPHMHLGNCYAQLMEYDTAFEHYFKASAACPGNAYLEERVEETARLVRQQSARSASS

SEQ ID NO: 1313 - protein, 662 aa, Desulfosporosinus orientis
MAEKISLCMIVKNEELSLARCLRSVSGIIDEIIIVDTGSTDSTCDIARQYGAVLHHFPWNGNFSEARNASLELAQGDWILFLDADEELSPNSRDILLRLIENETVEGYFVKIINYLGKEGWVETVPDLVFRLFRNKKEYRFRGAIHEQIADVILENNISARYQVAENLVIIHHGYLDQVIQEKDKKYRNLMLIEKELELNPTNHLLQYHYGVELYRAERYAEAEAVLIKSASDIDPNTIYFPKLIRYIVLSQHSSGHLQEALNSAAVGLKLFPNYADLYFYSGLILFDLKKYTQARDAFLQAASMPEQPPQYASFGGVRGFRAYYYLGQIAESYLDEEEALKFYLYSLRDNPHFTHALEQLVRILKPTKEPLYTKECLEKVCDFCTPAANRLMGDIYFRHGAYGLALQYFDQVEEGFPVSSDIKLRKAICMIQERRFFEALRILEDFSPESPEYPLATVNRLLCFWIQDRPQKVRSLWKELHALGLAQDTENVISLFLAFSEKTSPSPQFVLGAEGMQLLLDIVQRLVAMKEIKRALFFLHALNLNSLTDYYLNIAQIFMNYNEEIQAIPFLQTAIEMAPSAAAHFQLAEICSQLNRHFEAEQHYRHALQFDPDSPRHYIRLINLYTEWRQVILNEALAKFPQNDLFKILAKEVSSSNEPAD

SEQ ID NO: 1314 - protein, 1482 aa, Oscillibacter valericigenes
MNDLSIVMAIDGEEAEKSAEMLAPLFDEFDLELLVISNKETVNLRFPYKIYQFREDPRGFLNFCLNTSLADKIMIIPAGWQLVPDLFGQITKYLRRKDYRNLSCGVKSYLAEDKSKYYVHDEVLIYTRGVWGFNESCHCEIEDISFLNVDEKSITAGITRLLDTEHYCELADWYQSFIQEKTRPIRERFLTILERQKALSISPDASRKLDSLFIQLCKDSRYKKYLNLKKQLAVGGGRPERFHPTIRLRHPPAYICWLLRPLLKEYRSLELLSRFSEKTLRYALGQLLCQDGEAPQYLYDYIENASESVTGAVFPALFDAYINFQKDRSDSPDLKKRLLFVCNLYLETFSAEKSKKGAADLMEFLDAIQKAKKLETAGRFGAAVALLDLASGHLSEYRKPLRYYIQKIRYAHRLYSHVLSICMIVKDEEKNLERCLKSLLPLMRSGMAELIVVDTGSQDKTLEIASQYTNKIFSHPWNGDFSEARNESILYADGEYIFILDADEEFRPSDLEALIQNFSAEDYRDAKTFSIRLVSFTAQDLKQYSIMMQPRIFQNDGMFYYSSAVHNQPVSEQPLAALNIELLHYGYIMTRQIREAKFQRTATLLRQELQRNPGHIYYRFQLSASYAMYGDLKEARKQVDLYMRLLGAEALPNDIVLMYYNNAAIIYTECQQYDEALKICDLGLKAQPDYIDFLYCKGYICFLREEYQEAMACFLNYLRLIEAFYTHEIAEDGRFAFYSISGKEYVKKWYVAAGYRLRRFEDVISMASRFTEPVLFKDSFHEISGAYFKTGRFHDLQVLLESGAARCPDAGMEYVFRHFLLARFHELDKTAQKDCLSSFDPAFREKYLETAALSRPDYPLFSFDLIGKYDLNGVDYESLYSFLAESIPAVLSFSVSDCSNPAELGNQKTLAALLLRWVKELLLSCASSEDLAKVFNKYMEISAKLVAMKQQDLLEAKERLFIGKMLMAFEYLKTGDTKKAAECMEDSTLHYSEMHDFVNFAVDSLIPKETVTENSGNGGARDDVGSSALQLQIAGLSASTSPESVLKLCGEAGSRGACDAEFYRIQSAALMAADRTEEAASTLSHALEQYPDDPGLQRNLYYASLLKKDYPAAQQAYSRLKIENPRNKSVPLSPCLTAHSRGDGQNSTRVLQGTLDLSSQTAFQADVLKRKGIYSRSLNYAPEINAEFKSDYALDVSRLKTRDDILHTTRDITSKIIPQFDVFHFHHGYTLTFDHFDLLALRDLGKKVFMNYWGRDVRPTSKVPCGYKRGNREKDCDESILRRLESLSALIPECIVCDEEVYEYVRDFFQSVHIIRPMIDLERYKPAYKSKRGGRLTILHACPPGMAEESKQIGASIEAIQENYPINYRIVQGIPHEKAMELYREADLIIDQIRPGSYGKLAIEAMALGKPVICGISDFMQENYPSELPILRASPDTLRQTVEYVLNNRELLFELGKKGRSYVEKYHDSSREAEKLIKLYGC

SEQ ID NO: 1315 - protein, 355 aa, Massilioclostridium sp.
MVKISLCMIVKDEQDVLARCLDHIKDIVDEIVIVDTGSTDNTKQIAMRYTDQVYDYIWQDDFAAARNFAFSKGTKDYLFWLDADDVVLEQDAEKLLQLKQTLSPEVDMVMMQYHVAFDKEGNPSFSYERERLVKREKGYQWKGAVHEAITPSGNILHTDIAITHQKLHPSDPDRNLRILEKIKKNTGLDPRQQFYYARELMNHHRDKEAILVFRNFLDSGKGWVENNINACLDLSQCCQRLGQKQKALESLFYSFIFDRPRAEICCEIGACFLREERYQQAIYWYQAALQCDKEDSKGGFILPDCYDFIPNIQLCVCYDRIGKHQTAYQYHQVTERLKPHHPMVVHNKNYFQSIL

SEQ ID NO: 1316 - protein, 342 aa, Lysinibacillus sinduriensis
MQMPSISLCMIVKNEEEFIERCLKSVHELVHELIIVDTGSNDRTLEICKKYNAAIYPYQWGDHFADARNFGLSRANGDWILWLDADEELETSKSQLMMDFITQTDASMLFMPIINYYGDTLPVKQEQAYYYHQPRLFRNNLGVKFYNRIHETPNFPEQEDSRYKSETLEVPIHHYGYIKEITTKKKKSQRNLHLLQEEYQNPGHSPWIEYHLASEFYRNQDYGIAFTYINESILGFLLQGLKPPAILYRLKYGILYETNSIDGACSSIEKALLLYPDYVELHFIKGLMLFYKEEYSDALDSFEKCLKLGENHSEYLIMKGSGSFNALHYKESCLSKLNSTKI

SEQ ID NO: 1317 - protein, 249 aa, Unknown
  Description of Unknown: Candidatus Amesbacteria bacterium GW2011_GWA1_47_16 sequence
MLTAVVLARNQAHNLPQCLKSLRFCNEILLIDDDSSDNTSVVARTYGAKVFRRSMNGDFSAQRNYALSLVKTGWVLFVDSDEEVSWELSREIANLPQDSSVKGYFLKREDIVWKRRLKYGDLYGFRILRLGKHDAGIWKGKVHEVWNISPPLGTLESPLLHYPHQDTASFLHKINRYTSIRARELYDRGRKSGILSVVFYPVFKFLFNWLIKMGFRDGLPGFIHAVIMSFHVFLVRGKHYLLTKGVSDS

SEQ ID NO: 1318 - protein, 584 aa, Paenibacillus sp.
MSIADPSPTEDPNSNPVYTRNEYGHYWPEEYIWRVAALKDWILSYAIEEGYDALFLLDSDLVLHPSTLTQLLNGEEEIVANLFWTRWQPGTIEMPQVWLRDEYTLYEERRNEQLTEEEKQRRSAEFMRKLRKKGRYEVGGLGACTLIRRSALEKGVRFARIDNLTLWGEDRHFCVRAQVLGIRLYVDTHYPAYHIYRDSDLDGVTAFLQSAFKHTIEGTEASKHILISLCMIVKNEEKSLARCLDSVREIADEIVIVDTGSTDRTREIAKEYDCRIVDYEWKDHFADARNFAFSQAEGEYILWLDADDVFEEKDRQQLLDWRERLDSSIDGLSMEYHLAFDGSGNVSHKLRRNRLVRRDKGFEWHGAVHEYLAVSGNIIHTNIAVTHKKDKEYTDRNLRIYKRLEERGEIFTARDQYYYANELRDHGLNEEAVQWYTRFLDSGHGWIEDNLSACLKLAECMGRLGMKEQELAALFRSFTYAIPRAEVCCRIGTWFAERTEWDTAIHWFETAVALKRPQDPLANIDEPSWTWIPHLQLCVCYDRLGNHGQANYHNELALRYHPTHPSMLYNQQYLKEKLQNGVLR

SEQ ID NO: 1319 - protein, 371 aa, Ureibacillus thermophilus
MSSISLCVIVKNEEEVLANCLESVKDICDEIIIVDTGSTDNTKEVARKFTDKIYDFTWIDDFSAARNYSFSLATKEYILWLDADDVILPEEQKKFKKLKKNLHSKIDAVSMIYVTATDENGNPTFYYRRNRLVKRSKGFKWIGAVHEYLAVSGNILEADISIHHLKKNKKPDPDSIGRNLRIYENRIKNGEEFSPRDLFYYANELKDHKQYKKAIIYYQEFLDGKKGWVEDNIRACIYMADCYAYLGEKDNELMSLLKTFAYDEPRSEACCRIGDIFQERKNFKNAVFWYELAVKMKNKKTGGFQHTSYTTWYPHLSLCVSYWQLGNVKESIKHHEITKQYIQNHPKVLFNEEFFQNYLKKHKNNEGRMKQ

SEQ ID NO: 1320 - protein, 658 aa, Lucifera butyrica
MLSLCMIVKNEEKNLARCLSSVSGAVDEIIIVDTGSADNTLEIARSFGAKITSFLWNNNFSDARNASLSLAGGDWILFLDADEELAPGSINFLKQAMEAEDVEGYFLKIVNFLGNEGWQDTCPDLVFRLFRNRPDYRFHGAIHEQIVDVILEKNKQARYQRAENVIILHYGYLDSQIEDKDKKARNLQLIEQEVGQDPENRLLRYHYGVELFRDGRYEEAAAELIRAANGIDPQTIYLPKLLRYIVLAYHAAKKTEEALNILKTAIPVFPDYADLYYYQGLLHYERKEYDRSFQAFNLAVTMPEQAVHYAPFAGTRGFRAYCMLGQLAELFCNPEEALHFYIAALRDNPRFTTALEKIIAILDPVKEPAYTKTALFQLCDVSTPSANLFMAQILFSQAAYGLALEFLDQGTVHQPLAPETSLSKAICLIQNRRFFEALRIIETFEPGHPLFPLAKLNQLFCFWLQGNRRQVRLLANDLLSLGLSADTAAVVGLLRDSLTKKNPKPVTLGEDGTALLADILKRTLSLDEAAKAESLLGSLNPEIMETFSGTAGKLYLRFGFPALAEHYLRQYSARFSEDAETLEHLATALTEQDRPEETILCYQQCIRLEPKMPRYYIKLIRLYEQLRNNLLQTLTHKYPQLEMFRVAQSRDDTAWWSP

SEQ ID NO: 1321 - protein, 355 aa, Cuneatibacter caecimuris
MKTISLCMIVKDEEEVLERCLRPVRPFVEEIIIADTGSKDSTKVIAAGYADQVYSFPWNDDFAAARNFAFSKASMDYCMWLDADDVMTQENLEKLKIWKNQEDRADVVMMKYLTGVDEKGRPSLSYYRERLLKNHSGFWWKGKVHEAIPLAGTIQYTDMEVLHQKVKKGDPDRNLRIYENMRKEGGLQEPREWFYYGRELYDHQNYSRALEVLHHFQEMPGAWLENKIESCLQAAACQEALGNETEAMGELVRSFLWSAPRAEICCEIGRLWMKQKQWKNAAAWYQQALRDTRSLQSGAFIREDCRGFLPAIQLCVCYDHMGSRKRAYGYHCLAKKFRPDSEWVLYNDRYFSDTN

SEQ ID NO: 1322 - protein, 675 aa, Paenibacillus prosopidis
MTDALLSIQLIVRNEETLLPFCLDSVKTIADEIVVVDTGSTDRSVEIARSYGAKVIVSKWNDDFSYARNQGLAHTQAQWIFYIDADEVLTEGKESLRERLTATNAEAFWVNIENVLGRLPEERLQHRMIRLFRNNPSYRFRERIHEQIIPSILERCTPDRLELSNLKLTHLGYFAEIKNQSEKRERNERILASMLSESNQDPFVLYNLAIAKEQRGDTQEALKDLLSAKASAPAAAAYRPVLIRDIAKLYLTIERPDEAARMLNEECGNYQDYPDLYFLLGRSYRLQGLYPEALQAFQKAAGCQPSSAPYAIETGTATFRAYTELGELLAKLGQYESAKTCYEKAMEFHAGYMPALLGWTAALDALNVSIDTITAGLQQLLAKLPDRAKKYAEAMIYLGRFEELIGTHNDERDPAEPELEYFTALAHLHLKQYDQAILILQNLSATVLPDRRTDISQMLALATWSRGSALGYEFYWELDADVRRLYRSLERRLWKRPKEAMDPAMLQMAREMIGKAVQTGLLDTASELAGSDPALLMHAAKCLYRSGYVQLAADLFIHLLEGDSLDAEATVCLAEILYDRAHYGEAAALFEQAVPEIGDAARIGAVLSYLQTSRSLLQQALEFTPDSSLLKGELQKTATGIELLNKIGWRTEWTPAQRRSAGVVTPDFLMHDRER

SEQ ID NO: 1323 - protein, 362 aa, Ruminiclostridium cellobioparum
MITISLCMIVKNEEETLARCLDTVKDIVDEINIVDTGSTDRTKEIAQQYTDRIYDFPWTNSFAEARNESYKYATKDYILYLDADDVLLEDDREKFKKLKETLDPSVDSVSMYYNAGIDEFGNVTLRFRNNRLVKREKNYRWYGDCHNYLDIHGKIINSDVAVTHKKLRHSVGRTVSIFESKLARGDTFSPRDYFYYGNELRENGRFQEAIDNYDKNLEMKGGWVEDKIFACIYKGDCYRSLGDKTKELASLFQSFNYSPPRGEACSRIGYNFHTRRDYKTAIFWYELATKLYPDPDRWSFVYMAYYTWYPHLQLCVCYYRIGDFQKAHEHNEEAAKYRPSDPSVINNRRLFERLFQKSDAEQ

SEQ ID NO: 1324 - protein, 595 aa, Unknown
  Description of Unknown: Clostridium sequence
MKNQVSLCMIVKDEEEYLPKCLKSIKDIVDEIIVVDTGSTDKTVEIAQNYGAKIYYFKWNNNFSEARNESLKYATKDWIFILDADDELSLEGREAFKVLLDMELDEKAIYHFETLSYYGSVIENGNIAVNLNPRLFKNYRGIHYEGEVHNQLIRVDGDYNAVCNDVKIYHYGYLDKRIISKDKRNRNIPILNEQIKKDPNNKFAYFNLGNEYGAEDDTNKALECYYKAYENFTPNIGFGSLLILRIIVSNLILKKYDEALKFISIGNSNYPKCTDYYFYESIVWKEIDRPTLQIKALKKCIELGEPPSEFKFIFGTWSYRAYYELGKAYMKYKDYYTAYNYYVDALKSKPDYIEPLYDIADVLKAQNVSLEEMKRIMEEFFPEDKKVHYGTIADLFYHIGYYNIALEYIKEYEESVNVTENTIMLKSRCLIRTGDFKECTSINYNDKKSSNYVILSMYKVLSFVLLNRYEDALFIVNSFNAKNLSNYDKKYLGVYSELIKLVTQKSTSMLAEDENDKEYMNIILEVIEILLINNKFDELTVAVNLLNLVNTKYALLYLGKLYYKHGYVDLAKKEILRSIKEVDIYDAEGLDILKY

SEQ ID NO: 1325 - protein, 590 aa, Natranaerovirga hydrolytica
MNKTVSLCMIVKNEEKNLSRCLKSIDGLMDEIIIVDTGSTDKTIEIAKAYNAKIYHYEWQDDFSAARNESIKYATGDWLFFMDADDELCHKDRERLLELIQKGAKDIYFFETHSFVGRTPGANITVNLNIRLVKNDGQYYYESPIHEQLKNKKQALTNLKTSIVDIKIFHYGYLKENISSKNKRERNKSILQDLMKKEPNNMFHYFNLGSEYFAENNYIKALECFNQVYKNFDEKTLYAPKLILRMVLCCYFLGLYEEGIELVEIGLLKYYPKYTELEYLKGLIYHKQKKYTLAIDAFNKCIQMKDSPSALKFIFGVGDYRSFAALADIYMALEDYYKAYEYAVKTLLYKKDYAQGVYHLVKILKAMQAEEKDVFKIMESHKANGKISNLIIGDALLKEGYHTLASQYIQLEKKESIHKDTLKAKYLFKSKAYEEVVRFLEHKPFTIDTFKMLSLSLILLKDEKIFKYLETIEDKEALKACRDLVKVYGELAHILFEQPTAVISYEKKERVYTQIIMEILNQLLQNNEFDVFEKALELLNLISDDTVLLQLGKLYHKNGYEKMAYKEIIRSIKDFDVIDKEGLRILEQCV

SEQ ID NO: 1326 - protein, 353 aa, Clostridium sp.
METISLCMIVKNEEAVLERCLNSARGIWDELIVVDTGSQDRTREIAARFTDQVLSFPWQDDFSAARNASFERASGSYCMWLDADDVLLPEDRDAFLAVKEQDLPEADVVMARYQTLDADGAPVLSYYRERIVRNVPWLRWSGAVHEAIPPLGRVVYTEAAVTHRKERPGDPDRNLRILEGLRASGRNLSPREQFYYGRELYEHGRYEDAVQELELFLTVGWGWRENNLEACRVLSACYSALHRPRCALRALLESLAFDAPRAEICCDLGNFFLEREDYRSAIRWYEQALSCTRDDRSGAFVRPDCYGYLPAMQLCVCYHRLGEREQAVAWNERAGAFRPDDPAVLRNRAFFAG

SEQ ID NO: 1327 - protein, 352 aa, Unknown
  Description of Unknown: Lachnospiraceae bacterium XBD2001 sequence
MVSISLCMIVKNEEMVLERCLESIHDLVDEIIIVDTGSTDDTKSIAAKYTRLIYDFSWVDDFSKARNFAFSKATGDYIYSCDADEVLDDVNRNRFLQLKEVLMPEVEIVQMKYVENGLQSVLNSNWEYRPKLYKRLRTFKWIDPIHETVRTEPVVFDSDIEILHMPESLHQKRDFHIFATAYKTDGRLSKKLYSMYAKELLKCGSTEDVRIGSEIFAEVLEKEELDADLFRQLCCIVARNARLQGSDADFLKYAMKVNAVAPCSEICCELGEYFFAKKDYEEASLWFYNAIDGTESILDVHSGGNLPMLRIADAYSHMADAMDPEEAPTGRIEELQRLATEYRNKAKEWTMP

SEQ ID NO: 1328 - protein, 363 aa, Paenibacillus sp.
MIVKNEERTLARCLDSVASVADEIIIVDTGSSDRTMDIAARYTDRVYTYAWHEDFAAARNESFAKATQEYILWLDADDVLLPAERAKLEGVKQQLLPEGEANAVILNYTLAEGPEGSPLVTDRRLRLVKRDAGCRWHGRLHEQLSFPQSGVITADIAVTHRREAGNHSARNVRILRKWIAEEGVAQGRLLFYYAGECYDRQCYAAAARGYAKLLEQSSGYREDRLIACARLAECYERLGEPGRKLGALLQSFQYDLPHADFCCAIAACFHERQEAVSAIYWYMQAVDVSSRDPGLRPVPVPCRTWLPHARLSLCYAHLGNWEQALMHNTKAREYLPNDPGLLANRQKLEVVVRKEMKEREERD

SEQ ID NO: 1329 - protein, 649 aa, Paenibacillus beijingensis
MLISLCMIVKNEEEVLERCLDSVKDIADEIIIIDTGSTDRTKNIAAKYTKHIYDYVWTNDFAAARNEGIRRANSKWVLVMDADEYFNPADALKLRSFLETETPQESVIYAVNVVSFIGSSMEQSMINTGEVPRLFPNHSNLFFTRPIHEQLHSLNGTALTVYLAPVSMYHTGYLKGVVEAKEKSKRNASIFTELKKTTGYSAYDYYTIGNEYGIKDDIPKAIYYYERALKKSEKLTSRSWYPRCVISLIQCYLLQHRFYDAWTLIEQRLSNWRQYPEYNCFKGNIYYYLGLFEEAKLAYEETITAADELAKSTHLFWLDSAEFASTIPLQKLLEISNAENNTEKTIYYLTKLLMQNPYDYKALAQLMELLLLSDPPASVMTFLSRTYNENDVKHLLILFKVSLSLGSEELAAHYYHQLKTNDQELKPADLLDFYLLVGDRKRYESTLQQFEAHMKMSEELLVNRISASLIWNDSDYYNRISIEQNDGLFTTYKTYQQIINRENIDLESIQVSLIVYKLLSRLFQLRQYEIYDQLVNKISNSDIVNSLANFLYKKKQFDLSMNYYSILLQENQLDGTSLENLAFYHFNNGFVSEGLEFLEAAIEKRPHEPYLYVLYLQRCTDRVKKETYRQQFGFNYPQLKKIPAINKFL

SEQ ID NO: 1330 - protein, 653 aa, Unknown
  Description of Unknown: Paenibacillus sequence
MNMLLSLCMIVKNEQDVLERCLESVKSAVDEIIVIDTGSTDRTKAIALSYQAQVHEFTWGNDFSAARNEGVRRAAGKWILVMDADEYFAAGDAEKLRQFLESAEPSSHHIFSINVINFVGKSMEQAVITSGEIPRLFPNGFGIEYYRPIHEQLRSPSGELLSSLAPVSLFHTGYLEEMVNSKSKLNRNASIFKELKEKQGFTAYDYYTLGNEFAVGKDIQKAVYYYERALKKQNKNINSSWYPHCVISLIHSYLLQHRLLDAWKLTEDKLSAWKDYPEYAFYKATILHHLGFMQEAEKTYVATIETAALKSKESQVFWLESAEFASTIPMRKLSSIYEWQKKWSEAVHYLTKLLMQDLYDYSALRALLKIMTRFDTTEATIELLDKLYEPGNSKHRYILFRSALANHAAELSRHYYESIAGDLALSHEDMLEYFFLIKDKSGYAQTAALIPSGFIHERMARIHALADHAWGLSLALPLSLDDSEEQNQAAHRIEAIRSYLRGETEPEDVTLENFGPLLDLLKDSFNFREFAIYDQLINRYSHDFVIQQMADYMFVQEQTEIALNYYSLLLEQNALNGKNMENLAIHHLHQNLVENGLAFLEEAIRELPGQIYLYVLYLKHASEPLKKEEYRQKLLAQFPGARKLPIFTDLLAR

SEQ ID NO: 1331 - protein, 381 aa, Paenibacillus sp.
MIVKNEQRTLARCLDSVAGIVDEIVIVDTGSSDRTKEIAAQYTDRVYTYEWKDDFAAARNYSFDQATQEYILWLDADDVLLPAERAKLERLKQQLPSGGETAAVILGYTLAEGPEGSPLVTDRRLRLVKREAGCHWHGRLHEQLGFPQSGVITADIAVTHRREAGHHSARNVRILRKWIAEEGVAQGRLLFYYAGECYDRQRYTAAVRAYAKLLLEPSGYREDRLIACARLAECYDRLGEPGRKLGALLQSFQFDLPHADFCCAIAACFHERQELVSAIYWYMQALDVSSRDPGLRPVPAACRTWLPHARLSLCYAHMGNWEQALLHNSKAREYLPNDPGLLANRQKLEAVVSKVNSGLEEKEKEKEKEKEKEKEKEKEKE

SEQ ID NO: 1332 - protein, 351 aa, Clostridium diolis
MLSLCMIVKNEEENLKSCLPKVLTFINEIIIVDTGSSDNTKMVAKEFGAKIYDFKWCNDFSKARNFSISKASNDCVLVLDADEFVLNFNKDIVYEFISNPENENKVGRIQRINIMEDSNGSKNYIERVNRLFNKKYFCYDGIIHEQLVALNGKEYETENVDIKVDHVGYTKDELNRTHKLKRNIDMLQEALKNNTRDPYIYYQLGKSYYMLQNYSKASIYFEKALEFQLDFRLEYVENLVETYGYSLINSERYSDALILENCFEIYSNSADFNFIMGLIYMNNAKFTKAVECFLECTKFNQSKVEGVTSFIAYYNIGVIYEVLGFKEKAIEYYSMCDDYEAAKKRLNMLII

SEQ ID NO: 1333 - protein, 734 aa, Anaerotruncus sp.
MKAKVKKPGQRPLVSIGMIVKNEEKYLEDCLKAMSPIREAVPSELIVVDTGSTDRTVEIAEQYADQVLHFEWCDDFSAARNVSLEAASGEWFLYLDGDEILEENCGPIIEFLKLPNNPYGTASLIQRNYSDYEHTEYSDFHMIRLYRNIPGMRFQGSIHESINPFIVPTKDISVIAHHDGYVQGVNEKKQQRNQKLLLLELEKNPEDVRILRHLADTYGLQKVSDVEERTRIAREIIRILGGNRPDHTEWIYAYHTMVFSAIIRREYAAAQQLIKEFFQDKNEGDLAADMEMRYYQGNIYFDCEEYPSAREAYLEYQRLYQLYQDGKLNTRDVYSVPIAFAVPYNYAMSCYAVAKCWQVEENYPEMKAALEHAGSLTEKTLERSDASLMMECLYAYEAEDFSRLPMLLEQASSLKEGEGWKDFTIWFEKRFDLFLVRKKDACLTIAQTDLQNPFAQLCRLRTAQTREQAQELLEQLLDDPDAVKTPLFADLLYATVFYQFDLQHTLSALDSSLVERYWETLAKQRPDWPELLDTYLMEHPLQESDPPVCWFWQTRLMLSLLLSPEPDTKVLFQQPWLDEERFASLAQRYLDAMTHYCRMVYQPAMLLPENRVALPAEYRFVIGWQEAEALQKEQGDGACLQRLGEMLQEFPLMNRLIGLFTARTRQRLEAQKQQREEFEALAENVKQQFYRLASDGQIAHAAQILESYRALCPDDPELLLMQSQLDGPRYTLES

SEQ ID NO: 1334 - protein, 352 aa, Unknown
  Description of Unknown: Lachnospiraceae bacterium C7 sequence
MKTISLCMIVKNEEKVLARCLDSVADLMDEIIIIDTGSTDKTKEIAKHYTDKVFDFKWTGSFSDARNFSFSKASMEYIYAPDADEVLDEINHKRFHDLKEVLLDEIEIVQMYYVTPKEHNTVQNAKKELRPKLFKRNRTFTWIDPIHETVRTSPIVFDSDIEILHLPESSHGKRDFSIFEKTFKEEHNLSEKLIKMYAKELYKCGDKNDFFNALPIFLELYNIASSSSSNITNCIPEILCIIAHCYRLKNDVLNFFKYALSNMVENPCSEMCYEIGYIYKENNDPSEAILWLYNCSNETSPVIDVSIPGEKAYILSSQCYKELFDITNDSTYLNKSNECISKANSFSLPDIL

SEQ ID NO: 1335 - protein, 363 aa, Alkaliphilus transvaalensis
MITISLCMIVKNEEALLARCLDTVKDLVDEINIVDTGSTDKTVEIAKQYTDRVYFFEWIGNFAAARNESFKYATKDYILYLDADDVILEEDRIKLKQLKESLDPSVDSVSMYYDASTDEFGNVTLRYRRNRLVKREKNFVWRGDCHQFLDVKGKIVNADISITHKKIKHAVGRTISIYEKKIERGDVFTARDHFYYGNELRENGHYKKAIESYDKNIATKEGWIEDKIFACIFKADCYRHLGDLENELTSLYQSFKFSPPRAEACSRIGYIFQRQKNYKIAAFWYELATKQVPEADRWSFVYVDYHTWYPNLQLCVCYYNLGDFEKSYFHNEEARKYRPQDERILHNRQLLKDKLKSLMTQEN

SEQ ID NO: 1336 - protein, 341 aa, Lachnoclostridium phytofermentans
MITVSACLIARNEEEVLARCLDCVQRIADEIVIVDTGSTDRTKEIASRYTNLIYDFTWVDDFSAARNFSFSKASMDYLYVADADEIIEEEQIYNFLRLKETLLPEIEIVQMYYCNQLEFNTTYNYDKEYRPKLYKRVREFRFYDPLHEAVRLEPMIYDSEIEIIHKPLSNHAPRDFATYQKIIAREEKLSEKLRSMYARELFIAGKDRDFIDAFEYFCNVALHNTLGLTELKQCQCVIARGARLQQIDHEFFKVCLKNVACGEPSSEICYELGEHYRLSGDNVEAVLWYYNAAFETEAELNLHYQGDYPLNQLALCYHNLGNEEEALKYERLRDEWKAQKR

SEQ ID NO: 1337 - protein, 1771 aa, Weissella soli
MGIFKKKDSVQKSGISISDMVVLDNHLLFNSKTEITKFQMNIVDNVVEIPVNKHGHKYVLDLREILETVKQKGTFNIYGLVNDKVSTLVLEKGNLETEIFLKVDLTSTLVNKATIKISQNGSVALQVTSVVENNAQTAVFNTQAIDVKKIDGESIYFGIFNEIAIHSLSDNSFEIIRLRDGQLFLEDLKQKLVNRNTPEGYYEFGFFNEDNEFILFEKSKLKFPSIKQIAVVGEYDNQKSYEVIVATWGKSIGVKVENLRTTIQITDEIEVSNDEIRINGAFNSILSVDLVNRKTLQDIELPFEKIQNGIQIDFSKLTELQENGRYNLYVRTSDGVDYRIQNPQKKKLSNYLSSEEVKLENGRHLSIMYTYTGRLIVDISSTPLAIRTSDSKLSDLVSVTKVISDETATRFTLNSMLPIEDAIIFDGINFQTANEINDNYLVFDLKNILKRTKYTLYIKVQGNNNYSVVSNNVDDNKRDHVIYVLKNMEVFSFEKAEELNLTTIVTFYNVEDYLEELLESLTHQGLALTEHEILMINDGSNDRSREIAVAYQDQYDNFRLIDQENAGLGEARNTGLANAKGKYINFADGDDIIIENGYREMLDRVLKTGSDIITGGVKQYKNGKEIISGVYRKIFTHEIKQTSLAETPILVYDTTAWNKLYKRSWFTALGFHFPTMLYEDIPVTVPAFSKANSIDVYPGTVYLWRIRSNPNKPSITQRRTEISNWNDRLVAIQAALEGTKSNPVALLEYQTKVLTMDYPMYIKLQQKLSGEYKRSLQSTAKWFLETFDKQAINQMSYLDTLRLHLASQGDWRSLTELENDLKNDVFYPEIIDGTVVTSQYSKVAHLEDYHLKPGDITGWLSVISAERHDDKLIQLTVESNISVNGRLEHTFQDMSVALTVNNQIIAEGQLIAETIEDIKTKLIFYVTPEAITRALGESDTQLVSVQVRVAGVEANLEIVNRYRAAFDRQTIRQNGHRIGLGETTNFALIAFDYVTTTNIEKLNVNNHELIVTLDNPVSGLILHNMDNNNEYQFGKISDTQFSLAIYKVKFNSPATKQFRLEEINSTKEIGISTSIGNTYSEYNYQAISVVTNNLGQTVIDFDYRPVLVSEFLEAENTVDLVVLVPESVIRMVFEDSDVILRQLNVQIQDGQTIEAVLPVGNIEQLNHQYQATIRIPKSLNFTGNETKELNFVVYDGVFNKVWNSIVRLGRQTPMQLENTTFKFVADTTRKNHPLFIQAQVHSFENISDSILHEWKKKYRDSNTKKQTNNYAYFRQFLPIEDDVILYESFFGSGMTDNPYAVFKHILENDLEQKYLHVWAVKSLKLTPQMARYIAYPNVVFVQHNSDAYRHFLAVAKHIIVNTSMMSYFARREGQRVIQLWHGVPLKALGRDMKTTRGANRNVIRSLAQATTFLNPNLYTETKVMDTLDLKDIQNVNRVIAAYPRWERVLNAKQENYLLDVLAKEVPIDTTKKIALYAPTWRGDNKQVKNATADFIKQYQLIKENLPADYQLVLKVHANAYKDLIRSGVDVGLFIPEYLDAAEILSVTDVLISDYSSIMFDFYLTKKPVISWMYDKDEYVSEQGFYPEIFSEMPWIADNERQLVYYLNHLDEYEANDSSFISDHIDMNHVQNLLFTDEFKTEATKVDVQLVSTDQFRKNTSKILEEITRVNQHPLVLMHYGDYSQADNLLFSKLPDDTRNFYRVGPIVSSEAEFLLLMKYVSGYSINDQELSVLQQLKEIEIQRSLGNINVSKVSALDKVSADYWISKLLIL

SEQ ID NO: 1338 - protein, 624 aa, Paenibacillus polymyxa
MMKTVALCMIVKNEQEYLRRCLDSVKDKVHQIIIVDTGSTDDTVSIAKEYTSDIVQIEWTNDFSAARNESIKHAKTDYILVLDADEYLGENFNLSEEIESGADYYFTKIYNVMSSDRGITHLAIRIFANNKGLHYRNRLHEHLNTMEHEDKLKAGYAKLTIFHTGYTDEMMESREKANRNLPLMLKEVEENPTVYNLFNMGRTYMWVGEHEKAIKYLQKAYPLSKELTIAPELISTLCRSLGELKRYQEALIILKEATAIYPGEVDLIHLQALFYMEINYYKDAIEKMNKCLEVGDRGITVTEGNGSYIAHFRLAEWYESRNDLVKSYEHILKAFKLKNDFVPVMGKYFKIIEKAGVPSEEVFSSTKQLYPISNGGQLEKLLEVMYQLRHPLLEKYLTEYNVTVQNNVMATARQYARDYDGAQALWLEMADVDEQNGEDILLLSIILKDETLFRKFKPLLNLSQKEIKKLYKIIMNEPSQDVKLTPHLENILERALIQLIRLQEFETFEMILDYLWQGGVNVKVKVCEHLVTYGFNEIAIDLLVKLFEIYPRNVRIIELLGDICLSSKYYQDAQLFYTKLLELCDDYDAYERAYELYERVDDQISKSSILEQIKLKFPLCAWVK

SEQ ID NO: 1339 - protein, 799 aa, Paenibacillus silvae
MQNRLLGIHMIVQNEEKHLPRCLNSLRHKNLECFITDTGSSDRTPALARAYGAMVLHARWEDHFAQARNISLPLATTEWILCLDADEYVIEGLEELMKFLPDVHKSITRLCITIENQFGEGAEDKVMSYPVRLFRAHHGYRFTGRIHEQLIRAHDHEQNYTVIPKGNTSGVNEAVDSSNANEEETFVDIEPLAPLRLGHDGYLASVIASGEKPKRNLRLIQKELEDHPGQPFHLYNLGVARCQLGELEQAVNAFHESLRLAHLQAPYRPTLVKDLAKVLGSLERYEEAHTLLALERQRYPEYPDLHLLYGEILERQGLEERAYQCYARASTCSVKPFNQMKDYNGEFEPVYVSEAGSGSYRGYTSMARLAEKRGFGEEAIRLYTLALEHLFTYQPAWTGLAETLQQQGHSDEHIAERLLEQFKRLGQKQQQSNQSGDINSSSNARNDEASPLPIVYALAASGAYKQALLLVDDQACHICIPAGDLIHWLLCANRITDAWHLAEESWGARNQQDSEQMPDLSDSGSEIQNDRQITLRPDERADWALACWASGQHLSASFLARTSPLERDMWRVADRLLLDYRLSPSACNPGSETADEQLLHWSEAAELAANQVVTRAVQNGQLVIARQLHERLAGMMFTKERAEMTTLRNYAGLLVRHGYTMLAADMLIQCMTEGELDAEGLFWLGETLYAKGYIEQALSLFEQALERDSAFTQARAGAAVCYLKLALELIGQERERSQKAAVLEARQRNLVQQLLTAEGMPWRTIYRARERRNHHAGRAATDTAASEGAADIAVYDREG

SEQ ID NO: 1340 - protein, 355 aa, Unknown
  Description of Unknown: Virgibacillus sequence
MVTISLCMIVKNEEHVLERCLDSISHLVDEINIVDTGSNDHTVAIAKKYTDRVFHFEWTDNFSEARNQSFSYATKDYIFYLDADDVIDKMEQEKLFHLKKHLNPEFDAVSMIYLAGIDEYENVTLQYRRNRLVKRRKQYQWFGDCHNYLQVRGKIFHSDIAVSHKKNAHAYGRNLHIYEAMICKSRSFTERDYFYYGNELRENGFYQQAIEAYTNGINMKYGWIEEKIFACIFRADCFYYLNEAELALESLFQSFRFSKTARSEACSRIGLLFQKKREFLLAIFWYELALRVVQPKSSWGFSYPAYSTWYPHQQLCICYYNLQAFDLAAHHNNKAMEYRPNDELLRFHQTLLKGK

SEQ ID NO: 1341 - protein, 760 aa, Paenibacillus amylolyticus
MKNRLLGIHMIVQNEEHHLPRCLDSLKHISTECFITDTGSSDRTPEIARTYGATVLHACWEDDFAHARNITLPLASTEWVLCLDADEYVTQGLEELLNYLPKVHKSISRLRITIENRYGEGVEESVISQPVRLFRAHQGYRYAGRIHEQLVRSSPSRLGQDEAIDMNKSETYTDEQSQLIETEPLAPLCLIHDGYLASTIAQEHKPRRNLKLIERELADEPAQPFHLYNLGVTYCQLGEVEKAIEAFSESLHLTELLAPYRPTLVRDYAKTLVGSERYDEAHAILIVERQRYPSYADLHLLYGETLELQGLEEHAYQSYARATEYWEGIDRVGHSDGGSTLDASYVTEAGSNSYRAYTAMARLAQKRRFYKESAHLYGLALDSMFTYAPAWAGLADVLQHSGETDENIAETLLARCRGIEKSGHGDSICGEMPHSYAVTNEDHLVMVIYVLTGCGAYEQALKMLDTDACTARIHVADQIHWMLCANRVSEALQLAEEHWSVGCVHEVNLPAEHRMDWALACWTNGLRLSEAFLATTLPQEKNVWKVMDRLLDQLSKEPRSMEPASQEQKLIQWGPQAEMVAEKVVQQAVKTGQLTLAEQLHELRAMMMCDHWGTTLTRRRKFASLLYRQGYTMVAANILIQCMTESALDAEGLFWLGETLYAKGHNDQALSLFEQALEREPDMWQARVGAAVCYMRLAMEAIRQELVRSPSSGVLAAQHNALEQRLRTTEGMPWRTLFHAKERRNQLASGTNFPMHDREG

SEQ ID NO: 1342 - protein, 364 aa, Ruminiclostridium sufflavum
MVTISLCMIVKNEEETLARCLDTVKEFVDEINIVDTGSTDKTIDIARQYTERVFNYEWTNNFSAARNESFKYATKDYILYLDADDVILEGDQVKFKELKETLDPSVDSVSMYYDAGTDEFGNVTLRYRRNRLLKREKNFQWYGDCHNYINVRGKIINSDISITHKKIRHAVGRTVSVFEQKIERGDIFSPRDYFYYGNELRENGRHEEAIKSYDNCIAMKEGWVEDKIFACIHKGDCYRTLNDPNNELTSLFESFKYAPPRAEACCRIGYIFQRKQEFKTASYWYEQAAVQIPDPDRWSFIYTAYYTWYPHLQLCVCYYRMGEYQKSYEHNEEAARYRPTDPSIVSNKKLFERLKSTDTTLQQG

SEQ ID NO: 1343 - protein, 360 aa, Salipaludibacillus agaradhaerens
MITISLCMIVKNEEKVLDRCLQTVKGLVDEINIVDTGSEDRTVEIAKEYTDRIFFYEWTGDFAAARNESFKYATKDYILYLDADDVILEEDQEKFKKLKKSLDPSVDSVSMFYNAGVDEYGNVTLRYRRNRLVKTDKKFKWGGDVHNYLNVSGHIINSDVAITHKKIKHATNRNLSIYKTKIERGDVFSARDYFYYGNELRENGHREKAIEAYEKNIQMTEGWIEDKFYACINKADCHRQLGEQERELEALIQSFIFSKTPRPEACSRIGYHFQTKRLYDHAIYWYEQALNLKPDTNQWSFSYPAYSTWYPHLQLCVCYDRIGKKQKAYDHNEKAREYRPRDRAVLHNKTYFEKTLNLTE

SEQ ID NO: 1344 - protein, 473 aa, Acidibacillus sulfuroxidans
MNRISLCMIVQNEEQFIAQCLQSAVDLVDEIIIVDTGSTDRTLEICKSFGAKIYSFSWNDNFSEARNAALSYAHGEWILVLDADDELSISTHDFIRDLLNQKSYDAFFFITKNLVGDPKNPSFLNYAQLRLFRNQPSFRYSGAIHERIPKLPNITYQLVPVMITHYGYLDSVVQAHHKVERNLAILHAELQTKPFDRFLHYYSGNEWLRSGQPNAAIEHYEQAMRSKTESEEQDWLPDLPLKYAFALWQTGQIGRAILVVLKAIKEFPEYTDLYFLLGNMYLEQQEWELAKEAFDRCLHLGEPSPVFPTQAGCGTYLPAFLLGVIEFTNRNWTNARIYFEQSVHDDPDYLPAVTYLCLCDWCEARYSLVNERIQFLRVQNGDKNSLWGLIYSINQSLMTKKIYIDLDNLTHTTSFFTCLATLTSCEGQVQRLGQLLLQLPIQWHRLAMREEWYYALYGKYHLMSCTTLREIRR

SEQ ID NO: 1345 - protein, 473 aa, Paenibacillus odorifer
MNRSRRKPLISLCMIVKNEGDSLSQCLKSVRGVVDEIIIVDTGSTDASVQIALSFGAKIIQHPWSGDFAAARNAGLQQAHGQWILVLDGDEELSEESKGELLLCAEHMEYEAFFLRIHNHKGLTPASQTITVNPIIRMFRNRPKYRFSGIIHEQIAEAIITATPQAPMHLTTVVIHHYGYAEGVVVKKDKIKRNVELLKEQLRLNPKDPFHHFNMAVEYMRLGEYQPALKHIQQSLEEAPPDTSYIHLLHKYEIRSLAELKDYPGALAACDRGISSHPDYPDLAHIKGALLLQLGAFAEAKVALLQALIIGAAPPGYHTEAGFGSFLTYYMLGQLCEEMGDETEAIACYTKTAQLHPEPTPVIARLLRALKCAGRESEIYGWFHAHLPDYTVTKNRILLELLQTEGCNEAAAQLINATEQPISIEVAFNQASEQGRSQIVLADRLLASLSSSATYSPAVKRVRLALPLPKVSE

SEQ ID NO: 1346 - protein, 360 aa, Neobitarella massiliensis
MIVKDEEAVLARCLDSVRALVDEVIIVDTGSTDRTAQIAAAYTDKVYSFDWCDDFAAARNFSFEKASGDYILWLDADDIVLPDDLRQLLRIKKKGIGADVLMVRYNTGFDKLGRPTLSFYRERILRRSMGFHWVGRVHEVIQPRGKVLYTQAAITHHKLHRNDPGRNLRIFETMRREGQPFDPRQQFYYGRELYYAGAYDRAKKELQTFLQRPEGWVENQVEACRTLSQCCRALDDPSGALQALFSSFLYDQPRAEVCCDIGHLFINRRQYRQAAYWYQQAAARPRIEGGGFYSPACYDFIPYLQLCLCCDRLGDYQKAWDYNEKAAALRPDEPAIAHNRQYLGELLGRKQTKKRAKTAR

SEQ ID NO: 1347 - protein, 661 aa, Desulfofundulus thermocisternus
MSTEIILSICMIVKDEEKNLPRCLNSLKPLLESMKAELIVVDTGSIDNTVEIARRYTDRVYLHQWNNSFSDMRNISISYARGKWIFIIDADEELENPAELVSLLKSGRVNKYNTVRFKEKNFLSLDKQRYVVHVTERLFRNDGKFRYFGTIHNQPDYRYPVLNSDIWLVHYGYINDDQELMEKKFKRTSEMLRKELEKDPDHIYYRFQLSRTYSMHKDNDRALEEIRKTYSILKNKFPERIDSCYYVLGEYARISLNAEKYEETLRVCREGIKIRPNYIDLYLYMGYALFALEQKEESMATFQKYFDLYNKYHEGQVNLSEYTAVELYTIDTEVKDLTAHKIAAYLYYIEKYEEALKYLELIKGNKKKIDLLIKIHLKLSNYKILREYYQNLQNKNEKALFIKILEKEKNVLEELSRQKLEKEFAQGDDCYALLNRIRQEEDPVVTIKVFLSRYDLNKLPVFPYSEIVRLMIKNKMNIIPVFTKLENGVIRNLVKDLIDRDGKARDYFYNFLLNEKVGGGDFHSERIYISIASVVLLTDIEEAGKNNDGLNERCVNIFTKYVQHGVSYIKNLYQVERLRLIYKTLDNIEDKFFILMHLARDAADRGVYKSAMRYLKEAVEVYPYMAKLINLHTDKFIASISKGGSLNGSATGARKSKNNKI

SEQ ID NO: 1348 - protein, 357 aa, Clostridium beijerinckii
MITVSLCMIVKNEEDTIGRCLDSIKDVVDEIIIADTGSTDKTKEICSKYTSNVYDFKWIDDFSAARNFSFSKASKDYILWLDADDVLLPEDAEKFKALKETLDTSVDSVTAKYNIGFDEYGNVTMSYRRNRLVKRENNFKWIGFVHEYLQVAGNIINSDIAITHKKLKQTPKRNLDIYKGKLKEGLEFTPRDTLYYANELYDHNMYDEALEYYNKFLDSKQGWFEDNIRVCGKICDYYQSVNKVEDARKYAFKSFEYDTPRAEACCKIGFSFLHERKYKQAAFWYEEATKLEKPKDSWGFFNDACWTWLPHLQLCVCYDKLGDHKLAYEHNEIAGKFRPNDSRILYNKKYFKDIGVS

SEQ ID NO: 1349 - protein, 676 aa, Bacillus methanolicus
MRERQIGIHIIVKDEAEWLPQCLESIQGADEIIVVDTGSTDDSPILAESYGAKVVNMLWQDSFSDPRNEALRHANTEWIFYLDADECLVSGLDAVRDVLQTTNAEAFTVLIDNKLGPHPEDRLKHRALRIFRNGRGYQFRGRIHEDIGQSIVDKCGSSFIKDSTIQIDHYGYLPQILNKKNKVVRNEKLLKKELAEKPNHPFYLYNMGITYCQAGHLEEAKAYMQKALIHTPDVAPFRPTLIRDLSKIMLELQEVQQVETLLRKELLTYPDYSDLSYLLGESLGMQGLLEASLESYHRATEHNNDRYVMEVGINSYHAFNKMAETAVFLGHLEDAARWFHRALQVHNTYVPALQGIAEAFQQLNVSDKEISILFQDIVRPQSSDDYAVLTEALYNVGAFREVVDLIPETQLTDPRLLFRYATALIQNGNYADADQILSRYANISETDDIERLFFLRSICQWQLVGYLNEKFLVEIPDFIRGPLSDLNRSFTNETKSTEEPVKDQRLSEYAQKLIRESVSLQCLDTANRLAVLNPDNLLLYAKELYHLGKTLQSADLLLDILHQNRYDKEAMFMIGELLFDKGHYMQAAEIFETSINNGDENPRTRTGAALCYLHLAAVNLKEAISRESDVQTLSNDLKNIDESIRLLNRTLWHTKWVGYRRRIRDEETSHLLVHDC

SEQ ID NO: 1350 - protein, 257 aa, Rhodanobacter sp.
MGREPLSVVVTCFNSAATLDACLHGVSWAEEIVVLDSGSTDASLAIATHYGANIHSQPFAGYSAQKQAAINLASHRWVLLLDSDESLDEAAATSLQRALLAPACAGYQLWRREWQFWRWQSRRARLNHYVRLFDRQRARMSGHEVHEEVQVDGPIGVLDVVIDHHGEPDISGRVAKADRYSSLQLADLARRRISWLRLRMVGYPTVAFLRYYLLRGHWRSGWAGFIAARIHAFYAFLKYAKLYEQRRSGSAEPRGRH

SEQ ID NO: 1351 - protein, 385 aa, Phormidium ambiguum
MVNESAKFLNKPLISLCMIVKNEAENLPRCLASAKPCVDEMIVVDTGSEDNTIEIAKSYGAKVSHFQWCDDFSAARNYSLSLASGDWILVLDGDEQLIVESDNWRQELTDNSEVNAYGLVRLEANVSHIIGGFHGRIFRNLPDLKYVNRFHEQLQFTDKRNLQFGRLEGVKIIHYGNVESEKVIEKAARRDIPILEQMRSESPLNFWLLDCLARKYTHIGEEEKAAECYAEILDKLTPNLIDGNPPEEFFWIPTLLHFLGVKYFEEEDYETARLLCQRGLEWCPNYPPINNLAGEVVKTLGFPLGAIAYFEKCLQLGQTGNYYVGEPFELSFLTTYPAYNIGCTYWEMDRPQEALTALEMALNFDAEFTPAQDKVTEIKQTLGLQ

SEQ ID NO: 1352 - protein, 3377 aa, Unknown
  Description of Unknown: bacterium sequence
MEHQMKPLAQYQELAVNKFFSLLPSGAQRILEIGSDVEYAVVDNIATRFDGTVTGINPAAGFVKRSPAEGPANVTILGADGCCMPFDDRSFDAILSIATMEHVLDIPKFLEECHRVLKPNGMFYTNFSPIWSSGIGHHVYALAGRKEARFWKPDRNPLPDFSHLLWDEDEMREYLLDSSYDDRLIEPIINWVYHSDNINRCFFEDYKDAFSAARLQVKDFTAGVYKAPSQQLLEELRAKHGQHRDFSHHFIELVMSRPVLASSLPQHPPTPAGVEGAAGAPPTLGDQSETQNVVINFHRGDQSSAESLLNLLMVVDEGIDCTYHLQYGDPPDTLLIKETIERFREKKEVVLHFDLPDITVPMAFVENDPNLAEYPGNQARRTREQKRSILQWNLCVYKFIQLLDSFLMIEPDCVILKHDWLADIYAAYRDVNLPIFGHLKSGIINGTPIPTHWAGCSVYNGRMLRELDLERTFTERYENPWWRFRNLHETSNGNNCFYGPAFSGYDISFDYFLFAHFWRKTTGSSNPFQWPVSEIANRDDLIFCDFRSTLTAAEIFNRYHDRLPVLHGVKSDESRLMMTGYFSSGGTSTMTETRSDQVAADTANHAESPRQLPQRCLSPEELFVMTNRRLGQFRNKHQGQRCVIIGNGPSLNKMDLSFLEDEITFGMNRIFLMFDQWKFRPTYYVSVNPLVIEQSAGDILRIIAPKFLSHKGIPFFDDPGDIHFLQSIPQWFFSKDPRNGICEGWTVTYVAMQLAYFMGFEEVVLIGVDHHFVTKGDPNKEVVSEGDDPNHFHPGYFGKGARWHLPDLERSEGSYRMAKETFESEGRRIIDATVDGKLTIFPKADYRELFQSKRTTGTGRQDTPAQKGAKPLLFSVITPSFNQAQFISQTIQSVQNQDYPHWEHIVMDGKSDDGTVEILKSCQHLKWLSENDRGQSDAINKGFRLATGDIIAWINSDDWYEPGAFKAVADFFTANPGKNIVMGDCNLVDADGVIFDRVINQERGFDELRKYWISRSIPTQPAIFFRRNLLDEFGLLDESLHFAMDYDLWMRFSQKNRLYHIDRTLANYRFHSDAKGGDQDWSKFIPDCRIVYDRYSPPQVSVIIPCYNYGQYLAEAVSSVITQTYQEFEIIIINDGSTDNTAEVAEQIINSNPHIRIRLINQANSGQPAFSRNKGISEAKGKYILPLDADDKISPTMIEKMVRILDDDQAVDIVYCDTIRFGDVDNAYQTEDWSLTRLASDNIINYCALFRRKVWDSVGGYRLDCGYEDWEFWISAAEKGFIGFRIPEYLFYYRIKPTGRLLLDEQNDAKNKAKIVSFHPKLYDDATRMWSQQLLAENADKENKLQVLIVVHNFPPNWYAGVEIYSYQLAISLIRLGVEVSVLYPLHQEKLLRAEIEESSFDGIRIFRLLSDRSLPEHGGLTAQVANQEQELLFAEFLRQRNFSAIHFHHTLGMPFSFIDVARKQGVPVCVTLHDCWYLCLGVHLNDTTTNSLCSGPEFPEHCADCFLAKTAITPSREDRTNLSTWIQFRNSQARDALQNVDCIASPSQYLADLHHKYGISRSIEISPLGMNTVRKSRRTTSSPIAFAFLGNIHELKNTYLLAETFKKVTGKARLIYFGDGEKHFIEKLNTTIAGDGRISYQGAYSPSQLPEILDQVDMVVVPSISENYPLVVREALSAGIPVLASRVGGIPEIITHLHNGILFDPNNQDELQKWLQDIADNPSLLDDLKKHIEPVKTIEQDAGEWITRYTQLSSDHVVNRHLGVLSDAAGKADRAPTDYTAAACTSASNPREYGAREANPCPNPQVNITAREFSQTPHPDTAAMDYGSIRILIDGLETHESIAIIERFLQEQPLHAEAHNDLGVLYYRVSNKLQTLGHYEKAVRFCPLNSNFRKNLASFYFVEMGWTMDAIAIYTDILKTDPSDIEALTSLGIISNSIGRPEEARTFFCRVTDLDPLNDEVRKALVDLDPPSSTRMNNVSAELIDMDKSANVSTEELYRKILKLTDDGFIEQAIGDLHRLLLQDTDNALFHNDLAVLYSRTGDAENALFHQEKAVGKAPLNRNYRMNLAGLYYRSVNRIDDAINLYTELLKEKSDDIDTLGALAIISSENDRPEEARIFLNKIVELEPGNIDAHRLLERLDSINNYDFFFDGRPDDATEPHKIKKEFTDCPTGTVTIIIPVYNRLEFTEKCLETLSRNTTAGSYELILVDNGSTDGTADFLQKQEIISKVISNPVNLGFAKACNQGAEVANGLYLVFLNNDTEPQPGWLDALLKTIQANPEIGAVGSKLLYPDSTIQHAGVVIVDDRNIHDPLLGKHIYCGKPSNLPQANIPFCYQALTAASLMISRSAFIDAKGFDECFWNGYEDVDLCFKLRELGYLIVYTPESVVIHHESKSGPERFAKAGQNIDLLHKKWRGKITPDFIITENETTIDTAKGTIFPYKSPNSPPVSEDKQRFPLVSIVILTFNQLGKTKDCIDSIQKHTPELHEIIFIDNGSTDGTSTWLRELCNNNDNYTLIRNKENRGFAAGCNQGIAAAIGEYVLLLNNDVIVTENWLDGLLECLLLTPDGGITGPMTNNISGIQQVPGVQYESVEEIDAFALMFREKNRHRRIPYRRIVGFCMLFRKNLVDAIGLLDENFGSGNFEDDDFCLRAELEGYRNVIAGDVFIHHVGSATFKGNNIDFTSAMTGNRKVFNDKWSRQVRNENEAIKILTLKTLEKAESLYQRGETDKAIDTLLKEGISNASKEHRFYFALADYFIDQERFNDALDSLKELPDSAEGERKYVLLGRALAGMGNLEEAEKLAQLALQNDPSSAPALALSGRIAYDSGRQQEAISLFEAAIKANPGYGEPYTCLGLIALQEDRLEDAVNLLEKGFLYLPISAEAANHYHSLISASGKFDRAEDLFREMHRFYPQHRTLHFLLIDILIRQEKYQQAIAEIEEACTIFGIEDGMLAAGLDLRQKIGPLSVDPKKKKAGTSVSLCMIVKNEEKNLPRCLLSLKPIVDEIIIVDTGSTDRSRTVAELFGAKMLEQPWTGDFSEARNVSLEQATGNWILVMDADEVLAPQDHEQFRQLIKTSTGKRMAFSITTRNYMTKMNAEHWQANNGHYPDQETGGGWVPSDKVRLFSNLKTIRFVDPIHEMVDQSLTQAGIPISKAQIPVHHYGYLDKERQQEKGEQYYLLGIKKLAETGENDCTALSELAIQAGEIGRYAEAVELWSKVLCLAPDLPLAYFNLGFVYLQMGRFTESRDASAKAMKLKRNYYEAVNNYAMAELCLGNFQEASKVLKKTLTAIPEFPNAMAMLAVTRLYANKKDEGLKLFRKLSDNGVNFVEFIHESVKKLISAQRFNEARTILDTALANGYGNEKMHAINTSLQQGQ

SEQ ID NO: 1353 - protein, 642 aa, Parageobacillus thermoglucosidasius
MKPFLSLCMIVKNEEKVLSRCLDSVYGIVDEIVIVDTGSTDSTEEIALKYVDQIYKFEWTNSFADARNYAQQLANGEWILVLDADEYVDRDNLQEMINVLKQTDEHVDAYDVTIYNFMGVYGERVLQHRSTRLYRNSPNIRYYRAIHEQLRKENGQPLNSMLGILNVYHSGYMHQAVTEKDKHKRNAPLIEKELQNRENVAFDYFNLGNEYLSKGEVEKALESFVKAYKQKNDFRLSWVSFCVVQIVLCLKYLERFEDALNVIADAENIYIATADFKYLKGEIYYLQHRYDDAAEELNDLIQNKDKYTHVIKTFEYLEYDPHILLGHIYKYKGDMQRAVQHYTSALSVNNKSYEALYNLLGLLAKFHSEDEIIQFLEKRNWFVNERDISLLLRIVLSLGLETIAEYYISKLKEETLKKGFQIKLNILKGEYEEAIEQLMSSYLYSLETYIKNGCFDLYDVLIASLGSGKSEVIRLLTNIVSDDKEKEFLLFIINETDHIPEQTFYLQLIERTLQLKKYDLFEQLISLKDKFENKINLYLGHLLHRYEFIEVALDFYQSVEDFNDLDAQGFANIIEGLAIRNQITEAIQYGLLGIHFGHNDFRLYKYVLELMKLNGMSAERNNILKKAKNIYPDSKWLMQQGN

SEQ ID NO: 1354 - protein, 259 aa, Campylobacter lari
MDLKQISVIMIVKNAQKTLKACLESLQEFGEIVLIENDSNDDTLKIAYEFSKSYKNIKIYQHKFIGFGPLKNLAISYASNDWIFNIDADELAKKEFLQELRKIEPNKEDIIALPRENLYNGEWIKACGWWPDHVMRVFNKTHTSFNENLVHESLILHEDSKKIKLQNGLRHFACEQMSEIISKMNLYTSYSAQEKFKYNKKPSATKAILRFIFTFIKDYFFRKGFLYGYKGFVIAILNANGAFFRYMKLYDQVCKNEKD

SEQ ID NO: 1355 - protein, 1656 aa, Syntrophorhabdus sp.
MKILYCFPEADNPNHYGYNNIRSSLIELGHSIVDFDFLGMKDRFGKEGMVSELNSLMDREKPDIFLHGIVTDELPVSFLDEVRDREDIRSVVFFSDDDWRIYNHSLSWVGHYNYATTNDINALAVYRQFGYRHVFPMQYAANPRIYYPRETAKRYDVTFVGQAYLGRPQVVEELLARGIDVRVWGSGWDRVPALASVAGPPLPTEEMIETFRASRIVLGMAWCSVTTDAGTIIPQIKGRTFEYPACGAFQITFEDRRLQHYFDMEKEIATFRDGKDLAEKIGYYLDHEREREEIARASHERVLREHTWKHRWDGFFPFMTEENMNIRRRRAWGTWGAPEAGKGAEKRGAGPLVSVVCFVYNRERYMAATIESVLGQTYSNIEFVILNDGSTDGTEAVIKRYLHDPRLKYHYQENIGQTMDRFDELNNRVVALSSGEYICAIGADDVYLPGRVERQLGEFLKNPGLDVSFCNAQIFNDAGQLLPTQFRHERALTFNRFNLLRWLFTVNFIAHPSVMIRRSSLIEQGGYETGFATDYQLWLKTARNLNFKHLDESLWLYRVHDDSSTSEKNADRCAAATIDVLESVYRSNSIDDFYPEIALCSDRQKALYSAHLDFGNDMMRNSFFYLPAFAVREYEAALAVNPGGMEARNNLAVACAIAGDREKARSIFGSLSASEPHNETIDHNISTFLASDPQGNHRPDYRLLAESIGASELKTNVALVEKGAATAPGSTLPAGTSSAALGREQESTSVCKTRKGHTTILIPSVDPGNDLKACLEAIDIHMDEPHDIIVIKNAGAVPKWLKQHVRSGNTIFIDVPASSGYAARCNRGMEKATGEYVLIIGEDTLLLKDSFSRMLHHLGGASNRGMVVPLANHALGTQKIPGAEDLSVDEFSEYAADLGKRSLFRRAETFETGSFCTLFRSETMEVVGPFNEDIASPFFVINDYRLRLLLKGHTAAVAADAAVFRRHPETRGKGRDRVFHETWDTISPGTEKGKRLWHFVATKNARDHYRKGSLERAMNALSEGMRISPDEPRIYYCAADILMEEKHYRQIVDMTEFWPAAEKLKPPYYELLGYCAYYLERSDEARNLAEGALGLSPDTPGALNLLGLLALRAGDSRGAEGLFRRAIAADPSFGDPHVHLGVMAWQGNDTATGLTLIEKGFILSPEKNDFLATYQSAIESTGNFARAETVIREALGLFPKNRNLAYALIGTLIRQEKYLAALTNIQDAIVEFGIDDEMLGAAIAVRDSLGEDILARHGEDRGTLSVCMIVKNEEKHIARCLKSLVPVADEIVVVDTGSEDRTPRIARVFGAKILQFPWTNDFSEARNYSLDQARGDWILVHDADEVISPRDHDRLRKIVHGKPVRAVAYDIVTRNYVVEPATEGWTANAGEYAEEEAGSGWFPSNKVRLIVNDRRLRFRNPVHELLEPSVAEAGAERLACDIPVHHYGKMPSDTPSVKSDLYYELGKRKLSSSQGNPAAFRELAIQAAELEKFEESIEHWKGFLRLVPDDSIAYFNIASMCMEVGRFEEALQCARRSVELNPNSVTAVQTLIVALIYSGKTKEAVERLGSLLEKSPDYPPAFVALAVAHFIEGSEEKGLGYLERLEGMGYRCGPALHSSLKKIIASGNRAAARQVYGYISKSRHSLPEMERLFDQE

SEQ ID NO: 1356 - protein, 646 aa, Paenibacillus baekrokdamisoli
MQPLISLCMIVKNEEKVLEQCLSSVQELADEIIIIDTGSTDGTKEIALKYTEQVFDFQWINDFSAARNEGINKATGKWILILDADEYVKQDEVDSLRNMLNLTETDKPVGIVVDVMNLTGNSLTSTTGFYQSSGTRIFTNGHGIHYENKIHEQVICQDIMAQFKVSFTVFHSGYVTQIAEEKKKSDRNMEIFNELKKTGKKSGPYEDFTIANELAAARKLKESVYYYSKCIKRSKITDPWYSHCCYRLIIIFKILKRYNEAYAYIEKGLQLWGQYTDFHYLKGAVLNEFGMYEQAVKAFETCLAIAEENGKQNKQFWLIDTDTCRLFPFISLAEIAYMRKDIGKTVFFLTKVLQENSKSFIHLYRLTRLLLQSEPPDEISRLLEQIYPQNQPFNCYIVFKVFLELGHELLASKYLDNCKALNLSMEANDMVRYALLTRNEKIASEWLEKLPSNSDSMYSNALIAALASKNPSWIYQYVKDSSQPYYDIGQYVICILEQNQVEQYAGNHQDQLYALIVDLFKLGYFEEFDQLMNLVENEALLNKVADFFYEENLLEIAIQYYSALINQEALSAAGYMNVANLYLSQNEEEEGLMFMQKSIDMDPAIDRIPYLISLLSDTELISAYQDKFADLHAGYNQLPFIKNLNA

SEQ ID NO: 1357 - protein, 348 aa, Roseburia faecis
MITISLCMIVKNEEPVLARCLDSVASMMDEIIIVDTGSTDRTKEIAAQYTSRIYDFTWCDDFSAARNYAFSLATMDYIYCPDADEYLDLENQRRFLRLKGALLPEIEIVQMNYITPPDFNTVQNCKKEPRPKLFKRLRTFSWVDPVHETIRTDPVIYDSDIDILHRPHVMHAKRDFAMFEKAFRENRVLSEKITRMYARELYKCGDEEDFLRATDYFSLHYEAHADAESACILAHAARIQNSVDDFFSICLKDMCSSSCSEICYELGQYYRERQNPQEASLWFYNAAFETQPVLDIEISGKKALLQLAECYRTLAENELCDPCSAGDLLSRASEYEQQAQAWELPEEL

SEQ ID NO: 1358 - protein, 688 aa, Carboxydothermus islandicus
MGKKLAQTTETREKLISACLIVKNEEDVLERCLKSLRNFVDEIVIVDTGSEDNTVEIAKKYADIIDYFPWNGDFAAARNASIDKASGEWIFIVDADEELILDNYNELQNLKQFLKTASIDVGGIGIGILNISNITFLDVNSIYVNQIRIFRNKPEYRYRGAIHEQIVGKILENGNKIHIYGGKILRHYGYISEIVQKKDKINRNMVILERELKKDPKNSFNRYNLGLEYDRIGKFDKAIEEYKLAVKYLPNYNVGYANNLFKRLVRDLIELKRNKDALKILLDVVKIYPEDSEFYYYYAGTLVNLKKYENALKIIDKAIAMGEPPPYIMHLRGVGSFRAWHLKGRIKEALGDYKDALTCYEEALKIEPFFLEAVDSLIFFLYNQLPREKAREEVKKRFSNVDHEVVIGNIAAFLGALKEYDLALEFTEKIPDSLELKLKKAEIFFWQKKFNKSSELLREIIVEELKKKNPFLYSTGLYLAVLVEVCLNDIDNAKNYYKLLAKEELLSFNEKNYILGCFLESLSSGKLKQVEYKDEFDREKLEKELWQLAATFLSLDKFDEFEIVYNLIESNHFINNKKDKFGKLFYRQEFYDLAAEALLEAVKKHEADDETYYILGKICEMKNLKEEAISFYQKALSEKREFKYYLALITLYNSLQRYEELKEILSEAIRKYPEAEILKALNAVVKKL

SEQ ID NO: 1359 - protein, 323 aa, Unknown
  Description of Unknown: Firmicutes bacterium CAG:194 sequence
MPMITISLCMIVKNEEEVLDRCLSSIADLMDEIIIVDTGSTDRTKEIARRYTSKIYDFTWTGNFADARNYSFSKASAQYIYCADADEVLDAENHAKFRLLKKGLLPEIDIVQMYYCNQLSYNTIYNYDKEYRPKLYKRLHTFTWVNPIHETVQIQPVIYDSDIEIGHFPTSSHASRDIQAFEKMYTDGLRIPASLHTLYARELLIAGQYSELMHAIPVFTDTLQDNTRSLDEWMEACCVLTRAYREKNDIPSFFKYAMKAVTFEGDGCAEVCYEIGCYYLSVSDPQEASIWLSAALSAPCILQLEVHKRAESALQKCQGKLSE

SEQ ID NO: 1360 - protein, 636 aa, Listeria grayi
MRPLISICMIVKNEEAVLRQSLASFHEFVSEIVIVDTGSTDDTKKIASEFTDKVYDFEWVGNFSEARNFAAKYATGKWIVVVDADECLEKENYLAVESFLKRLTQKEEIFTGEIISFTGEKGSVTVTNKMPRIYRNNGDIAYRGAIHEQLFNRRTGNTAISDSPLKIYHYGYMSEVVDRQDKVARNLEILKKEMKEEESSGFAEFNLGQELYREHKFEEALQAFSRAFQKRTSNRLVWAKISALNIAKILEAKKEYADALAILEEARIIWPDTPEFFLKKADIKRALHQLPDAKKIYHYLIEQTAVIFQPIAYYEATSFLPYKALGDIYQVEKDYVKAIKHYSLAYQQNSSDYEVKYQMIQLLSKFHSPSEVYDFISRHGFIENEEDGTKILSFTTQLGLGNLSAIILNSMPDLNIVLQEIMQVKIQTIQNIFPVISKQAILAGIRTNLIDVADLCIWHFENGTLPIEQIMKNSNAGELYQFLYENGPAVEEEIYLFVMERGIALGKGEFIDQLLVLRSHYEDSINSRIADLFFQYDYKDIALDLYNTVDASAVTKEGHLNLIQYLVEENITEEALSIVERGLDNFAADFRFHEWAILLDETNREMRISEAIDEFPDSTYLAELQGNLIDLESVNK

SEQ ID NO: 1361 - protein, 616 aa, Tumebacillus flagellatus
MIVKNEEKVLPRCLESVKGLVEEIIIVDTGSTDRTVEIAKQFGAKVYHFEWIHDFSAARNFSLQQATGDYILVLDADEYLEKNATLPEDLKLSADYYSVPIKNLMTDSVVVHMAVRLFKRSAGLTYRNKLHENLYVLEHEDLTNADATFTILHTGYLPDVVKSKNKKIRNLELVEQEVSENPSGYNLFNYGVSLMNTGQYEKALASFKKAYPLSVKYTFVRFLLLNMAQCLHYMKRYEESISIMQDAIAVHPGFTDYYYAMGIAYEELGYWKDAEEIYQTCLQLGDTRDDVSFEGAGSYQSVYRLAVLHKKQGRLEEAFDMAFQALQQKPDYRPALKFYLKTMFESGVSAEDMYQQLNLVVPLSDLSVLKTIIAVCYEIRHPLLDRYLQLFPDEVFSPEIRGVSRLYAQRYEDARDEWSKQETFSPDVLKDLMLTAFLLQDLSLFKRAEAFLNLRTKDKKFIGDLMKRQTPKQEPLTEDAADLLLHLAVQLLVLKEYDLFEWLSPYLTQMPVAFQCSMAKALDDAGHTQTALDLLLPLYGGTQPSVEVLLTLGDLCFRRHFSEDAEVLYQKAFQREATYANHERLARLYEQLGKTERLQEIKSAIARTFPLCKWVR

SEQ ID NO: 1362 - protein, 261 aa, Unknown
  Description of Unknown: Candidatus Peregrinibacteria bacterium GW2011_GWC2_33_13 sequence
MTISVVINTLNAEKYLEGCLESVKNFDEIIICDMYSTDKTTEIAQKFDCKIVYHEKIGYVEPARNFAISQAARDWIFVVDADEIIPEKLVEFLKNFAQEQEKNNFQYTTVAIPRKNWFFGKFVNGDWAIDRPIRFFKKGSVNWKDEIHLFPKVDGQIFEIPMENEELTMIHYQCASISDLVNKANIYTNFEVKKWIDSYYNFSILSLIFEPFGVFLRMYFRQGGYKDGIHGFILALIRGYLYRFLIIVKIWEYNSRNNAGK

SEQ ID NO: 1363 - protein, 661 aa, Ruminococcus sp.
MKVRTTEKKEILLSIGMIVKNEEKVLERCLKSLQPLMNAIPSELIIADTGSTDSTVEIAKKYTDNVFYFEWINDFAAARNSTLKKAKGKWYFFLDADEYLDEDVSEIINFFSIPELYLKYKTLEIMIRNYMDVNKTNYRDACLARFQRINDPKDPVEFIGKIHESIWIRQPLGYFSTILHHTGYCYSSAQQSMNKKNRNMQLMREEYEKNPNDLRLLSHLIDGAGNDNNEKEKYISEALVIAKAERRHLYSNVVYMQAVQNLQNSRPEYCLELCREYYDTLDGVENCVATVAVAMTEAKILSALARYNESYLAFCRYFDLYERYKKDELILTDSSAHPVDGVTESEYIRCICMAALDLKKSKRYDEAFQLLSKFDIVSLDGEDFKNVLGSIREICQDKKQYSTLAEYYGKIINCDDDNKCELSLYMMESTYYSIVGEDNRMAFAKDVVNTGVKGKYSDLMKLVLTQNEKSFADDLLTFIKNVDDWKEGYSEAIYLAVKHGIDISGVVDNMIASEFRSKLEMIAVNHDDFAGYVLCYGVPESFTSNIKRFLWITSMYEKAAYRSFMLDDNRKHEMYLMFTNLLGEYVSNIYNPELLQDEADIQVLPSLHKFGYYMLQANSALLNGDSVGYVRGMKKALQNCESMKEIVEFMLERFKQKMGIK

SEQ ID NO: 1364 - protein, 254 aa, Winogradskyella sp.
MIKLSGVIITYNEERNIKNCLQSLINVVDEIIVVDSYSTDRTKAICESFNVTFIEQEFLGYVEQKNFALNKASNDYIVSLDGDESLSKELQNSIKALKANWVYDGYYCNRFNNFCGQWIKHSDWYPNRKLRVFDRRKATWKGINPHDNVILNDNSSSKTQLKGDILHITYQSYSEFNKKTEYFSTIASKAYFEEGKTSTIWKIFFNPAWAFFKAYFLRLGFLDGLNGFVICYQTANITFLKYLKLLELQKSKEE

SEQ ID NO: 1365 - protein, 442 aa, Carboxydocella thermautotrophica
MLLSLCMIVKNEENCLARCLTSIQELVDEIIIVDTGSTDRTLEIAASFSARLFSCPWTHDFSQARNFALEQARGDWILVLDADEVLIHQGREQLQRFLTAPGSLYEGFYLPVINLHEPDNWLYRSQDLVVRLFRNRPHYRFSGVIHEQVLPSIAAHAGKEAIGQAPLTIYHYGYLPAVIQQKQKCQRNQQVIQLALTQNKQDPFLLYSLGCEYLTAANPRTALHYFEQALAVIPTGAGYLPDLALRAGYCHFLLGNWADAEKYAPLAPQLYLLLALQELEQNNYAAAETLLTLAARGCPEARAQIQQARGDMALARQQPAMAARYYLAALQSQPTYLYPLTRLLELAQTHPRLWQDEWFCLYTPDSCLRLLQFLNWQHDTRLVLYYIMSLAYQKAFLPLKQLEQQALPCYQAVIYLALGAVFSPDPCWSLLSDLFWKEEGWL

SEQ ID NO: 1366 - protein, 357 aa, Bacillus indicus
MVTISLCMIVKNEEEVLARCLDCVKDIVDEINIVDTGSTDKTIEIAKQYTDRIFNHEWTGFAPARNESFRHATKEYIFYLDADDILSEEDQEKLKKLKETLDPAVDSVSMFYNAGTDEFGNVTLRYRRNRLVKTSKNYRWEGDVHNYLNVTGNIINSDIAITHKKTGHAVGRNLNIYKMKIERGDVFGARDYFYYGNELRENGHYQEAIEAYTKNIDLKEGWVEDKVYACINRADCYRFLGDLDQELKSLFASFAFSKTPRSETCSRIGYNFQRKKDYKSAIYWYERAVEEVPDENRWSFSYPAYSTWYPHLQMCVCYDRLGEAEKAYQHNEEARKYRPEDKSVLSNKAYFEKKLGK

SEQ ID NO: 1367 - protein, 275 aa, Unknown
  Description of Unknown: Archaeoglobales archaeon sequence
MPRLDNVGSTDVTQRILQAQQRSSPLSEKPITKPFTLSVVMIVKDEEQYLARCLDSLQPLKYDELILIDTGSTDRTVEIAQEYPNVKVFYFEWIHDFAAARNFSISKATQEWCMWIDADMYFLEEDAEKLHAILHNRLYQHENNAFALMLLNVDTDDAWNLARIWKRSDNLEFDSPVHEVLGPPERMQLRALDITLQHDRDGQVGGLEYHDLLLKWLERDPEDQRALFYMAKHCHLMATQAKTPKEVEDLYDEALKYYEQAAQKGRDSGVYLNAG

SEQ ID NO: 1368 - protein, 653 aa, Paenibacillus ferrarius
MDQLLSLCMIVRDEEKVLRRCLDSVKDYVDEIIIVDTGSIDSTKQIALEYTDQVFDFEWINDFSAAKNAAIQRATSKWILVLDADEYVDSTQMSHLLAMLEQANHDAPMGYILTIYNYTGPIRKGKMVESTALRLFSNHPDIYFERPIHEQVVYRHGHFEQIYYRLSIFHTGYTLEVRQEKNKSTRNLAIFERLKETKQFEEYDYFTLGNEYFAVGDLKKALYYYKRATTKKMENQAFMLHCLNQTVITLIELDRLKEALEVVENGLRRFPAYADYYCFKGLILEKVGLAPLAIEWFETSLKISNSPPNKDGRYWLVSPNYGSIIPLVHLVNLYLKDSDVPKAVSALTKLINLSPGDQKVLYQLFILLSQSEPTSSIIDFFEKIFVNPSQADILQLFQVSLLLGNQELTAHYQHQCEQHKISLSSHYKLLSALIRNSQDEFERIMQLMLPQEQSEHNNKLYILASLVWNRAAYSDQFCETIDGSTLQKEQLYQIVQVAFQLTTEGTCPTLDSEQLNYAVTLLIDLFKYGYFDAYDRFIEKLQPYYFIVANLIGDHFYSQSQIQLALDYYSMLIQHEQLAAVGYENVGKLYMNQGDVEEGLAFVRKSIELNPYRPYLYVFYLAQCSDADLSKDVLDRYKEQYPHYYGLMMNAMR

SEQ ID NO: 1369 - protein, 207 aa, Paenibacillus pinihumi
MSDNIQVSLCMIVKNEEAVIGRTLKQAEKHVDEIIIVDTGSTDRTKEICLEHGARIYEFGWTNNFADARNYGLDKAQGTWIVWLDADEELEVEDAGLWRSSLNRASRCCGRSRLSTISAALLPIPTAPIWLHSTGSFAMEQDYGLRVPFMNSFRSDICRMMLWSCGSFRHVFIIMVIWMPSPYRRISISAMYLCWSGRRSVRITIRG

SEQ ID NO: 1370 - protein, 358 aa, Oscillibacter sp.
MVSVSLCMIVKNEEDVLERCLESAAGLADEIIIVDTGSTDRTREIAARFTDQIFDFPWADDFAAARNESFSHASMDYCLWLDADDILLEADRSAFLALKETLDPAVSVVMAPYHTGFDEGGRVTFSYYRERLIKNRAGMRWEGAVHEAVAPAGQILYGDFAVTHRKTRPGDPDRNLRIYEAQLAAGKTLDPRQQLYYGRELYYHQRYEDALAVLESFLAEGRGWLENNIDACCLCSYCQEALGRDEAALASLFRAFVYDRPRAEVCCEAGRWFFVRERHGQAAYWYALALTCPRDDRRGGFVSPDCYGYLPCIQLCVCYSRLGDQERAESFNELAASYKPDSPAVLHNREWFRSLASA

SEQ ID NO: 1371 - protein, 366 aa, Desulfosporosinus sp.
MMSDPITISLCMIVRNEENTIARCLDSVRGIPDEIVLVDTGSIDSTKVIAKQYTDRVMDFTWIDDFAAARNYSFSLATMEYIFWLDADDVLAETDREQLLKLKNYLDPLMDAVNMPYLLSFDQFGTVTFSLRRNRLVKKSRNYQWIGAVHEYLEVYGHVLNSNICITHKGTGSNHSDRNLKIFEKLKERGDPFSPRDLYYYANELFDRKLNNRAVDAYQEFLKTGQGWVEDILSACGKVADCYQNLGEKGRELEYILKSFEYATPRAEFCCRLGHYFLRAEQYDQGAFWYKLATQLEKPLDSWGPIIEACWTWLPHLQLCVCYDRLGKRELAYEHNEIARKYRLEDPQILHNKKYLEGVLGLSSKE

SEQ ID NO: 1372 - protein, 653 aa, Unknown
  Description of Unknown: uncultured bacterium sequence
MSLKNHLSTELELSDKDTQKKARDAYDKGDYVGAYNLYLSIYQKENNPRGLQLSIALCLLRMNKRRQARLFAFKELLDYPDNDTASRLITEQSSKVVGKTVFRRFDNTVRPEKFPDISLVLIVKNEEKDLPRCLDSFKDIVKEIVIVDTGSTDRTVEIAKSYGARVEFFEWTNDFAEARNVSLSFASCEWILRTDADEYIEEPEKAKLLHCINSGVADIYLCPTVSKLKNGVQTVENVRLIKNNLGIIYHYPIHETVALSAAKLGLVQCLTNVEFLHSGYEFVEEGSSERKTERNISVCSQYLEKHPEDFYVRLVRGLLLLNTPRKTDAISDLERGVKDIPDDASPVKYMGLAYIALCQQYVFQKRDIDLINILLDAQVDFNVYSCMMQFIGQIYLFNRGDWKRANKIFDWTLKRYTTKLTFSDVLFPDKYNQVECLQLMAETCVLLKENDKARKYYLQAKKLKKSISEQSDNQNSEKHYEDVDSFSAEQLRILAKTPKENLKYIETYSNILRAASKSELTAQDYLDLANCQIQLNNLNFAQILIEESRLINSELPFASNLESLMALKEKDNEKALIKAVEAFIKDPGNSSYQNNVEQISKLMLLTPVQGIKKVGLNWLESGKIKDGLFALMLYLKFEPDDTEIGALIAKYLN

SEQ ID NO: 1373 - protein, 359 aa, Clostridium scatologenes
MISISLCMIVKNESDVLQNCLESIKDIADEIVIVDTGSTDNTVEIAKKYTDNVFFFEWIDDFSAARNYSFSKATKDYILWLDADDVMLSEDQKKLIQLKNSLNSSIDSVTMIYNYAFDEFGNVTLSLRRNRLVKRKLMFKWYGPVHEYLAVNGNIFNADIAVSHKRIHSKSGRNLAIFEKRLKKGDEFSPRDRYYYANELLDNGFYEKAAENYSIFLNLKEGWIEDRISSCYKISDIYSHLGNPEKELEYVWKSFELTTPRAEFCCKLGYYFLSKNDIENALFWYKLASELKKPEGNWGFFLDSCWTWLPHIQLCVCYYRLGDYKKSYEHNEIARSFRPADKMILNNKSLLEGILKNGK

SEQ ID NO: 1374 - protein, 629 aa, Bacillus sp.
MGDKMQTISLCIIVKDEERFLDRCLNSAAKHVNEVVLVDTGSSDRTLEIAEHYDANIFHYNWTNDFAAARNISIKHATSDYILVLDADEYLDEDADIQRVLITEKDHYTVRIKNHLSSGGAIYHPAVRLFKNNRGLKYQGRIHEHLNVEDKSLGLSHEFGDVLIHHDGYKDEVVKEKEKHNRNIAILLDEVAKNPSGYNLYNLGTQYRANHQDEEAVNYYKRAFELSKDRLYIQSLLYNMIDSISRLGRHEEALNVVNAAIESFPNHTDFYFLKGRIFEELAFKNDAIRAYENCIRLGEVDLFQTLEGVGSFLAYVRKGAIAVEKGQYVLAFDMALKALEVNKYHMPALRLYLEMMTKTHIPLKAMQEHLSNIFSVEDVKDLKHLIVVLTVIKSPLLQQYIDLYKLQLDPTVSMIAKLYSRHYSEALEIARKLGDINESESNDLFLLAYISNSEQLAVAAKKHLNISNREWKQLKRFFQSKPEELGNVSERVANIIVFIAEQLLILQEEDLFNRCITTIQNGPAMLKMKLCHMLIENRYSHIAMDLLVAEYEQNKQNPQWLELLGDVCVQENQDKDALSVYNRALELRPEYRIYEKVYEIYNKLNDQEAALSIKREIADAFPIVEWAKA

SEQ ID NO: 1375 - protein, 325 aa, Unknown
  Description of Unknown: unclassified Bacteria (miscellaneous) sequence
MISISLCMIVKNEEGVLARCLDSLAPAVDEIIIVDTGSSDSTKEIAQRYTKRVYDFVWTGSFADARNFASAKATKEYIYTADADEYLDRENQEKLLQLKSILLPEVEIVQMLYCTTGEFNTVYNFEKEYRPKLYRRLRPFTWIDPIHETLRTDPIVYDSQIEVIHCPESSHAGRDLQALLQAGMREERFSKKLHHMYAMELYRSGGDRDFINAVPVFEKTLSEDGRSMDEVKEAMCVLAKAYRIAGDLPKFFGFALKDAVTTSCAEICCELGTFYEENNDLEEAAIWYQNAATETESILDIRTSQNIPQEGLRRCSGEAGCKERE

SEQ ID NO: 1376 - protein, 812 aa, Anaerovibrio sp.
MGIKISACTITKNEEKNMPRWLECMQAIADEIIVVDTGSTDNTVAIAQSAGVNVYHFKWINDFAAAKNYALEQATGDWILFLDADESFTPEAQKLMREELERFHRDKTVGCLLCRMLDVDADNDYRVFNTALLPRIFRCSPYIRYKGAIHEQVENRQGNKKMVFAEKLEFIHTGYSSSIVKLKTERNLPILLSELDKATTEKERRRLYPYLMDAYNTLGDHDKVLLYAKKCISTGYRMIGAEGHFYEVMTMSMYNAKKPLSEVFSALDEAEAAFPEEPFFHFVRAMALEEQEDYLGAEKATLKGLKLREAVEEKLRCGIGVSDTSRGFLPYAYERLGKIYAMKGDKQQAADNYILALKNHKYQTDALKGLCLLLLGSDDIELIQLLNSFFDREKDGNFLVRTLKGCVSTGVMAYYGKSVKDYNEGFVYMAGGRFDSGAVKLGQRYKELSQLGVLSAYNMDEFPVDGYIDTLIGNQYREKLLDKSADEGTVLKRLKEYRIRIELDDISFPEDSMPLVSIMIPTYNRPELFERTLMSAINQSYPNVEILVNDNSTNDDTEVLMDKYSGVVNVHFFRNKEAKTKAENFMTFEHLATGKYLQWCMDDDLLAENKLSKMVPVLRDNPNITVVSSVRGIIDANDELIDSSTAIKLPIPANDEYGYFYGEDMARQMLLNCKNLLGEPSAVLFRRNDLTHHYWQAEAKGYKTISDVAMWCELLEKGHAVVFKKPLSYYRRHDNQEGQQEEVILLSRLEWMKLITNYYEQGVFIKNHADYKKALMALYNEYVNKFSNNEYLRQAANFVTYKEAMELIVGLV

SEQ ID NO: 1377 - protein, 214 aa, Bacillus sp.
MITISLCMIVKNEEHHLPRCLESIKGIADEIIMIDTGSTDNTKQVAREYTSHIQDFQWRADFSAARNFSFEQATQEYILWLDADDILLPKDRDALLKLKQTLSSDIDSVYMPYHTAFDANGNVMTSTKRMRLVKRSKPFKWEGIVHETLACKEKYKYLNSDICVTHMKNMEDMSNRNLAIYIKALEQGHHFVTHDLFHYALELMLQKSYNEAIP

SEQ ID NO: 1378 - protein, 773 aa, Paenibacillus sp.
MDFMYFFVLEVFALKNRLLGIHMIVQNEEHHLPRCLDSLKHISTECFITDTGSSDRTPEIARTYGATVLHACWQDDFAHARNISLPLASTEWVLCLDADEYVTQGLEELLNFLPKVHKSISRLRITIENRYGEEVEENVISQPVRLFRAHQGYRYKGRIHEQLVRSGPSELVQEEAGDMDKSETFTGEEHMLIETEPLAPLCLVHDGYLASTISKEHKPRRNLKLIERELADEPAQPFHLYNLGVTYCQLGQIEQAIEVFRESLHLTELLAPYRPTLVRDYAKTLVGSEHYDEAHAILALERQRYPSYADLHLLYGETLEQQGLEERAYQSYARATDCWERTNRVGQSDGGSMLDASYVTEAGSNSYRAYTAMARLAQKRGFLNESAHLYGLALNSMFTYAPAWAGLADVLQQSGETDENIAETLLSRSSGIGELDQGDLIRGKMPHSYAMTNEDHLLQVIYVLTGCGAYEQALKMLDTDARTARIHVVDRIHWMLCANRVSEALQLAEEHWSVGCVNEVNLLAEHRMDWALACWTNGLPLSEAFLATTLPQEKNVWKVMDRLLNQLTKEPRSMKLASHEQKLMQWGPHSEMVAEKVVRQAIKTGQLTLAEQLHELRAMMMCDHWGTAITLRREFASLLYRQGYTMVAANILIQCMTESELDAEGLFWLGETLYAKGHNDQALSLFEQALEREPDMWQARAGVAVCYMQLAMEAIQQELVRSPSSGVLAAQYTALEQRLQTTGGIPWRTLFHAKERRNQLASGTNFPMHDREG

SEQ ID NO: 1379 - protein, 339 aa, Paenibacillus sp.
MMKASLSLCMIVKNEAASLKRCLESAAPYVDEMIIVDTGSTDGTLDVARMFTTSVISCPWNGSFSEARNQGVALATGDWILWLDADEVLECDQDPRLLKELTGGHELLLSVRTIHYTGKEANPAEAYQLAQTRLFRNHSGFKFIYSIHEMLNAEEIMERSGRLILPPIVPVSIHHYGYMDNARKNKAGRNLRMLEQAYASEEKHPWLEYHLANEYYYNGEYDQAVKQVNQSIVRFLLRGQIPPSMLYQLKYASVLALGNEQEFRASIDKAILLYPDYVDLHFYKGVILYRNGDFEEALATFKHCLTLGDDNLNHLTEYGLGSVQAMQYIRLCKEKLNEL

SEQ ID NO: 1380 - protein, 620 aa, Paenibacillus ferrarius
MDKLLSLCMIVKNEEKVLRRCLTSIRDCVDEIIIIDTGSTDGTREIAREYTEQLYEYKWEQDFSAAKNEALRKSRSKWILILDADEYVQTEELAQMRSFLLSLDSTKPISFLLPIYNFTESVQSGKFVESTAIRIFLNHPDIYFVRPIHEQLIYQNGELQTTFYPSLHIFHTGYTEETLREKDKSNRNLAIFEKLKETKEFEEYDYYTLGNEYFAIRDFPKALENYKKAMTNRSKNQVYMLHCFNRTVSVLMTLELFDDAMSLVEEGIQRWPDQVDYFCFKAAIYKDVGLYEKAAEFFELCIQIAENPKDSSGRYWVVSPNYGSFIPYSNLASIYHSLLDIPKTVYALTKLINLDSSNQAVLFQLLKILLPNEPISSIITLLDKIYLEMSRTQVLQLFEIALLLSHKELAEHFYHLCLRENIPLSSLSQMRYALISDDLQTFDTCLSDIHLDNSSDQQGQINKLMTIAEVIWNKPYHSEDHIDIELSVSILIDLFNMGHYSAYDSLIQNASQQDKYVIANRLGDHFIGNGQYQLAIDYYSHLLLDDKLESSGYENLARLYLMQDEIKESLQFLRKAIELETNSLGAYTLLLRYCDEEEKKEVLRVFKERFPECYSVVKNY

SEQ ID NO: 1381 - protein, 381 aa, Bacillus cohnii
MQTQTISLCLMVKNEETFLRKCIESVQATVNEIIILDTGSTDKTIEIATEYTDQVKYKVFNGDFSAMRNEVLKYVQTDWVLFLDADEFFDETEIPKIKEAINKVSSDVGGIRFYRYNFFASGGWYSNKVLKLFRNNLEYKYAKKVNESIDTSIIQSGYLIEDSDIVLNHIGHTRSREDRDAKSKKYIQLMKEQLEETPNDPVLHGYIGLISRTLGDFDYAINKTTHALNINPNSSTLHMFHGHVLRSVNKNLEALDTYKKALELRPNDAGVLNMIGVMYMTLGNLAEAEEYFGKAFESNPALIHSLLNKGIVRFYQKDYLSAYEYFSKVIERNKSFLYKDIFGILECDPYKSFYYETYMEYSGLESYIAICESKMKEVLNY

SEQ ID NO: 1382 - protein, 340 aa, Unknown
  Description of Unknown: Firmicutes bacterium AM59-13 sequence
MQMITISLCMIVKNEERILARCLDSVKDLVDEIIIVDTGSADATRRIAQTYTDRVYDFTWIDDFSAARNFAFSKATCEYIYSADADEVLSEENRVRFQALKETLLPEIEIVQMKYGNQLHNGTVYNFDEEYRPKLFKRLRNFIWEEPIHEMVRLEPVVYDSDIVITHMPEQNHAGRDIANFRKQIAAGRQLSRRLYGMYARELFLGGADRDFLEAENYFQMQVASPDRSGDEITEGCCVAAKAARLRGDAVSFFKYTSKVIAVDGCSEICCELGHFYETSGDLEEAVIWYYNAVYETQPVLALRTSGAEPLEGLVRCYDRLGLSEQAASYREELNSRSEE

SEQ ID NO: 1383 - protein, 662 aa, Desulfosporosinus sp.
MAEKISLCMIVKNEGQDLRRCLNSVQNIVHEIIVVDTGSTDSTSDIARQYGAILHHFLWNDNFSDARNASLELAQGDWILFLDADEELSPDSREILIRLIENETIEGYFVKIMNHLGKEGWIETVPDLVFRLFRNKKEYRFRGAIHEQIADVILEKNSEARFQVAEDLMIIHHGYLDNVIKEKDKKHRNLSLIEKELELKPNNRLLQFHYGVELFRAERYTEAAAVLIQSATDIDPNTIYLPKLLRYIVIAQQSSGQLNEALNSAALGLRLFPDYADLYYYTGLILLDLKHYSQARNAFLQALSMPEQPPQYASFGGVRGFRAYYYLAQIAESFLDEEEALKYYLYSLRDNARFTHALERLVGILKPTKEPDYTKECLEKVCDFCTPEANRLMGDIYYQHGAYGLALYYFDQAEDESPVLPDIKLKKAICLIQELRFFEALRLLTDFTQESPNYPLATLNRLFCFWIQNNPQKVRTLWKELHALGLAQDTDNVISLFLAYDAKHAPSPQMVLGSEGIFLLLDIIQRLVALQEIERAMYFLHALQPKCLIKYNLKIAQIFVNYSEENRAIPFLQTVIENDPLAEAHFQLAEIHSHLGRFSEAEQHYKHALHLDPDTPRSYVRLINLYTAWRQSILKEALAKYPENDVFKKLAEEGASNHERTD

SEQ ID NO: 1384 - protein, 642 aa, Acetoanaerobium sticklandii
MKYKLSICMMVKNEELHLKRCLDSIKEVVKRDDVELIIVDTGSIDDTRAIAEQYTNKVYFKEWFHDFSGMRNVTLSYATGEWIFIIDADETVENIEVFNDFLDNKINESIKTYFVREKNYVNIKNLDAYSMIITPRFFYNDGSFKYEGTVHNQPIYKQPVAYLDIILGHYGYIVLDKKIMDEKFNRTTQLLIKELKKKPDDMYYLFQLATSYNMHGDTEDSYEISKKAYELIMKCTKKQQIEGFAIFSVHLSNCLVLKKYNEVLDVSEKSIKLREDYIDGYFYLLFSYEKLGNLDIAKKYAEIFIDLVKRFDTLPISKDDSIAIYRTDRATVNKIKFFLVKYYINRNEHRNALKYLNENKIDSKNINVFIDIYIETNQYNKLKDLYYKIEDLDLKLILFEKIEEKIDNYKPNKKKQIRSLFTDINEDYSQFCRFSVDININTEDKLIIANKIFANMKKNTTNLYYAEVMSFICENMTLNLSFFNKFNRSTTFYYLNYFYNNKYSEVYLKVFDWIKNIDANQPSFKNEVALKNLLEGIILRMASEYKNTGIETAISSNVFVFDKYIQVGLSVINKLYITKGMSLKYEYIADVESKFLILMNLYYENLNNANTTAALKYYKLAAEAYPELADFLATFLKKEFIN

SEQ ID NO: 1385 - protein, 689 aa, Hydrogenispora ethanolica
MSTVSLCMIVKNEADNLPRCLKSTAGAVDELIVVDTGSTDNSLEIAKSFGARVSSFPWNGNFSAARNASLANASGDWILFLDADEELTPESARILRQITATPAVEGYFVKILNYLGNENWNEVCPDLVFRLFRNRPAYRFRGAIHEQIVDVILEQNQTARYQTAENLIIRHYGYLNQAIEAKDKKNRNLRLIQAELERDPQNRLLRYHYGVELYRAERFDEAAVELHQAANGIDPAAIYLPKLLRYLVLAYQGAGCPEQALETVRIGLSLFPNYADLYYYGGLSHLEQRDYVQAYHAFRQAAAMPEQPCYYASFSGIRGFRAYYQLGQLAEVFLNPEEALKYYIHSLGDNPAFAPALRSIVRLLKPQDDPEYARQCLEKICDFCTPQAQLWLGQILFQESAYALALQYLESGSAGPQVPGEVKLWRAICLCQQRRFLEALHLLKEFPPADPLYPLALLNQLLCFWIQGNRRKTLSLARQLQTLGLSEDTAAVISLLTHVLPQQQKIFELTDSQGQPIFLAWAKRLLKRGQDSGKPAKTAGVRLGPDGISLLLDILLRLIDLNESALAESLLNRLDPEVLSGQAGAIGQLYYRYQRLDEACQYLRFYAETHPESAAALYDLAEVERDRGNAIHAETLYRQALALDPKEPRFYIALIRLYQKLRRELLEEAVAQFPEIPVLQKLLREAQEQ

SEQ ID NO: 1386 - protein, 358 aa, Roseburia sp.
MATISLCMIVKNEEAVLARCLDSVRDLVDEIIIVDTGSTDRTKEIAARYTGQIYDFPWESDFSAARNFSFSKAHMDYIYAADADEMLDETNRTRFLRLKQCLLPEIEIVQMKYVTKTDFNTVLNFKKEYRPKLYKRLRSFTWVDPIHETVRLDPVVFDSDVEILHMPPAPHQNRDFSIFRQAYQKYGILSNKILDMYAKELFISGSDTNFADAAPIFRAYLASPAANEPANATLAKKAALVLLHTARITDDFPSILKFSLDDMLTTPSAEACMEIGEWFFEKKQFDTAILWFYHAAFEAESILNARSSGNLPLARLSDSYRALAELSRGQKTDAEISAYLNAASDYLAQSEAWELPEE

SEQ ID NO: 1387 - protein, 610 aa, Unknown
  Description of Unknown: Acetanaerobacterium elongatum sequence
MPVRLSVCMITKNEEEFLDRCLSSVSAVADEIIIADTGSTDDTVQIAKKHGATVYPIKWRNSFSAARNLSISKASGDWILLLDADEVLEETDIPLLREFMNTTSCDGCNFTIINYIGRTAGGLHTMHNAFRLLRNNGLYRFEGAIHEQIIRRDGKPIPAGAIETSSIRLYHYGYLDDVVRRKQKRKRNLPLLLKELNADPQNPFLMFNLANDYLACGEHEKALKLFDRAYHKMDTTQAYAPHLVYRRAVTLYNLGRYDLAAKAAQDGLNIYPACADLEYLLGTVFSEWGRYTLAIDSFNRCMSMPKPPDSLRFMQGSTTLRPLMALGNLYLRLGDYSRAYDAYAAVIKKDINCCSVLYQIGKVLNHIYADKATVVKKLIGFFLSPDYTPNLILLTDILIQERLYSQAASCCEKAAEDLSYKQDTDFLKANLYFYSRKFGEARRLFEELVSQEAASTNVLQNITCQSAQYLFVISLIEGKTVLDSDLALVERYCDRLTYRVYTQVRNVLNDRDESVFSPDESWPSVLTEVGRLFDRVLRTGEFDLFERLLYLLNWVDSKAVLIELAQVYLDNGYPGMAREQVLRSVKELDYLNPAGLSILAQTAGIPRAST

SEQ ID NO: 1388 - protein, 657 aa, Paenibacillus rubinfantis
MKRLSVCMIVKDEEELLPRCLESVRTIADEIIIVDTGSTDKTKDIAAQYTDQVYEYSWTNDFAAARNESIRHATGKWILILDADEYLSPDDQDKWVAFMEQEKPLEYLAYTLPIINFTGDKGYEDEISTSPVTRLFPNFKGIYFERPIHEQLTRGTAGELFHKKLDLNIYHTGYQNLRVDEKNKHERNMQIFNQMQQNGEMSAYDWFTLGNQYRYAKEEQKALECYELAIKDAGTKTVWYPHCLVGLITLYYKQNKLDKSWEWTESRLAEYSEFADYYAIKGVQYETLGFFDEAIACYLKAIETAELRAVNNQEIWLVDPMYSFDMPVQQLIEVYSHTNDNQKAIYWLSKLLNKNRKNPTVLLKLVEWLCHNDAPESVIQLLNQIYDVNDPSDVSLLFKISLALGQEELVNYYRPYLDIDSQLTSGDRIRLSLVQQDKQDWMKSIQSAIGHEEDRPFYMWLQGLIGAMLWNESDLLHRLTLSIKDEEVQKLHQFVMSTLLTNQPSPKSSDYEVNSEKLFIIARQLFLLKQYELFDIFMKKFQTNNLVNQLANYFYSINVLNLAMDYYSILLSSQALNFNSLENLGLYHANQNYKEDAVEFLSSALREEPQARHLYYFLIKNARQEEKTHYIELFKSEFPEFTTISFIADFLHKQIHG

SEQ ID NO: 1389 - protein, 367 aa, Paenibacillus daejeonensis
MIVRNEEEWLGRCLSSVSSYVDEMVIVDTGSSDRSVEIAASYGANVIHYKWENDFAKARNVSLAHATGDWILWMDADEELAPEDGPALREGISVSEDPLLLIQLINYYGAAPPDSSRAYHIAHHRLIRNGRGFCFSQPIHEQLNTEAVLGTVAAIRTLPVRIFHYGYMDEVKHSKKKTERNLEILLRQKEDESYSPWIDYHLASEWMGLQKYEAALGSVNLAIARFLAAGQLPPSIVYKLKYATLLEAGYAAKICPAIDKAIRIYPDYVDLYFYKGMARFLLGQYDEAAQTFSECIAIGESCNHHLTMRGTGSFFAYYYRGQCREHMGLPNEASADYIAALQLHPQFEQAAQALNTLQVAEEERGCR

SEQ ID NO: 1390 - protein, 653 aa, Desulfotomaculum ferrireducens
MGKGISLCMIVKNEEKNLGRCLKSVKDVVDEIIIVDTGSSDNTVALAKEYGAKVYHYQWNDNFSEARNYSLEQAKADWILFLDADEELTSDSREHLTRYIREEQVEGYFIKIVNFIGKEGWVETCPDLVFRLFRNKPEYRFHGAIHEQIVDVILEKNSNAAYRIAEGVVINHYGYLEQQIEDKNKKIRNLRIIEKELASKPDNNILQYHYGVELFRAEKFEEAARVLVQVANKTNTNTIYFPKLLRYIVLAYYSAKQPAQALEVVQVGVSLFPNYADLYYYGGLCCLDQKSYKKAAEFFLKAVAMPEQPPQFASFAGTRGFRSYYHLGQIAEKFLNYDEALKYYLDSLKDNPNFIHSLERIIQILEPRKNPDYTRKCLEKVIDFDNNQARLALANIFYDQGAYQLCLEFIEEVIANGLVAGDILLRKAFCLIQRKRFLEALRILGELSGDNNLYPLAKFNELFCYWVQGKKKKVRELVTELCSKGLSVDTENVLKLMLKTQDKRIKTQKIYLGVDGVTLLLDIINRLLDLGQLELAWEMLNKVAPPCIEERKWELSRIFYKYGCYEKAIELIEDYLQHKRSGEAHFLLAEAQREIGNYAEAEKHYRYAIEIEPEVPQYYIKQMELYKVWQEVLRSKSLEAIEHPAGKDPGGGI

SEQ ID NO: 1391 - protein, 457 aa, Paenibacillus assamensis
MTTPSFPITLCVIVRDEEDVLRRCLQSAKDLVAQMIVVDTGSTDASAAIAKECGASVYHFEWQDDFSAARNAAIEKAEQPWILMLDADEIIDRESWQEEQLQAVFKQPHVLGCYVRIAHLTHCWNQNFNLNHRPAYSAIDMACRLFRNDPHLRYAGRIHEDITATIEAVSTEESSEAICWSSFTIWHDGYAAERLQNKDKSARNLHLLHLQLEEEPLNPLWWYAYGTEHFQAERYAEALPWLLRTITSLSKQPRLPGYASDVWLKAVFAYYSLNQIDSAVRLAEEAMNRFPRFPDLLLLSSTLYAIRGSLAEAYRCAEKAASCGDRTHLYTSTDGASTWRAHWMAAFLAERTGNYAQAAHHYEQAAAYTIAQHPSAVLKSAAAWHRSDWISSSRWMRSAAAASEQTLPTIAHQLTQALAASVHSSAAAHLLPFVPALHRATRIDWASFTRHFLYDDT

SEQ ID NO: 1392 - protein, 356 aa, Unknown
  Description of Unknown: Lachnospiraceae bacterium Marseille- P3773 sequence
MSAISLCMIVKDEEANLKKTLQSVCDYIDEIIIIDTGSKDKTKEISKQYTDKIYDYAWNNSFSDARNYSISKASNEYILVLDADEVVDEFDMEQIKSLISANPEKVGRLLRVNEYERNGMPYRQMERVNRLFSKKLYCYDGIIHEQVISKEGSEKKYDTYLLPLKIIHSGYEGDLETRKKKTERNIELLKEAQKENPQDPYIIYQLGKSYYMAEDYVQACSYFDKALYFDLDTRLEYVQNMVESYGYALMNCKEHERALQLISVYDEFKGSADFVFMIALALMNNGRFQEAIEEFLKAAEKTSCKMEGVNSYMAFYNIGVIYECMGNFENAYVYYVKCGDYEPAKERLRQMKQVKL

SEQ ID NO: 1393 - protein, 630 aa, Caldicellulosiruptor hydrothermalis
MADVRLSICMMVMDEEKNLKRCLESLKPLLLREDVELIIVDTGSKDKAVEIAKNYATKIYFKEWNHDFSDMRNYTISLASGDWVFILDADEEIENPENVIDEIEKAEKKQAKTICLTVKNLTQEEDKKNYVINISPRIFKKNYIKYWGKVHNQPIYHEPVYYSDIAIYHYGYILLDTKLMEYKYKRTVTLLLKELEKDPTNIYYRYQLGVSYSMYGKLKEASIEFEKAYNLLRTQNSEIKKRFVVLYCLYAKTLLGLGLYDIAREIAEEGINYNSDYVDLYYIAGQSLYMIGRRKEAVEYFKKYLNFFAKNEKPQILNDPSLAFYYVNDYYIDQAISYILQYYFDTKNFGEVKNYIDLFRDNSSRLKHYVLMYLETQEYKKLKEFYVQSEQKEKIAELIEKFIVDLKLDEEERNKLYKEFATVDNLYGKYAELWINPVEAADIINYIFNYGEIKNLSAFYFKALLCHLDKKEFLLKKLKEIDILTLRVKIAEALTAKFIDFEDVISLLEVIKTEKADIDILARYTSLALLVLLNFPRQSDERLYEIFLNYTENGILLMSRLYENEEIKEKYRYFLSEEEKYFALMYLIYLSLQEKRMDKSIKYLREAITTMPKLVKHLKRFSKDILGVDV

SEQ ID NO: 1394 - protein, 542 aa, Bacillus sp.
MSLISFCMICKDEEKRIEACLKSIVDIVDEIIVVDTGSIDRTVEIAERYATKTLHFVWNDDFSAARNYALEHAAGEWILFLDADEELDEQTAPLLRSLAKENKHPAYFLQIVNHISNKGEKVVETCPVLRFFRNDNRIRFTGEVHEQIGGAIAEVYHNESVAYTQIQIHHYGYLEEIVQEKKKKERNMTLVLKQVRREPDNPFHHYNLAGEYIRVGSLEDALLHLQKVKELCDISHMGFGPLTIKKEIFTLYSLNRKKEVLNVCRKENKRFPYFPDLLFLWGRVAAEIGLFAEAIRVYRIIVSITEVPLHYTMDEGILKKKAPFELAKLLERKNRKEALALYKKVLQHDSQQREVLERIMALLESIEEVEDIFQTFHYWDDLPLLQKTCEMFFQQQKNSLIIYIYERGNLSNDLLYDMAAYMEHRTIHQSIITAFHDWVENKQLRMKNKTHVFISFLRTGEWPDDIFPSEEDWLCIQYGFQLALQKENHHKLWQITSLWRYFISIVNGKEEQIYRQYVYSLHIAKIPEVYINKRVSIQPIYK

SEQ ID NO: 1395 - protein, 502 aa, Paenibacillus catalpae
MAELRKRISLCMIVKNEEKHLPGCLDSVQGIVGEIIIVDTGSTDETIAIAESYGAIVIRSGWEHDFAKARNKGVEKASGEWILFLDADEQLDEATKPQLLEYARHADLSALLLQIRNQIGPDHDQGSTIHPVLRMFRSDPAHRFEGRIHEQISFSILRKNPSARFHLTDVIIHHYGYRTQVVAEKNKLQRNMELLELALAEDPDNAFHRYNIGVEYLRNNRAADALEAFRTARRSAGFEQLSYAHLVLKYESLSLQLLGRWEEAAATAREGAAVFPDYTDLWHYIAFCSASTGQYKAAMEAAEKALEMGAAPARYHTEDGMGTFRTAYLQGRIYEAMHDEQGIVHAYITALRFKPSLLPPLFRLCKYMRAAGREGQLAALMARRITCPDEAAMLKLAGVMVASGCPDSAIAYLEWQAELYKEPALRNSLASHANALLEGDFSRLPFAGYSGKDEVEDMLSPAAHWRERAEYYLERVQQQKEQIVEKQAIQSIRLLMPGFEGW

SEQ ID NO: 1396 - protein, 637 aa, Paenibacillus curdlanolyticus
MQPSISLCMIVKNEAPSLKRCLDSVKGLVDEIVVVDTGSTDNTIDIALQYTSNVFSFTWMNNFAAARNESIRHATSDWILVLDADEYIQSEDHDKLKSFLSQFDKSIPAGIVLTINNFMSNETDFSQIMESTGARLFVNHPCIHYVEPIHEQLISTDIPINWVSYSFHIFHTGYTKQTVTTKNKSERNMSILMQLQAEKKNDPYYNFVLGNEYANIHEHHNAHQCYIVSYEGTKTTDTWFNHLLDRLIATELQLELYNEASRHIEQGVKLYPQKADYHCLRGVLLEKLGFRKEAALHFSKCLDIFKQAGNTPYWVIQPSFGTTLPMQALADIYRRQGNFEQAVSYWIQALQQQPANYSLLKVCLEHWGHIATITNIIEDLGLIYPNSIPLNQVMLFKIALQTGNRDIAAYYRKNVSSFPIQWSEEDAILDRVLFPDSSSTLQTSGSKSSIPVSIAVLAAITLNDNQYLNPSYISDDAITWVLELQQLLSNRPIDLTKLPGQEGWYAELLLQLWKMQQYDVYYELLQKTANSPVLNALANLLYNSGHIEHALELLLLLLEEQALDSDALLTLAEWGLHHDNIDDAFDMLSIIIESQSNSGAVGLLLEHCNNSRYHDRINKMPIETFPNISTLYPNKLS

SEQ ID NO: 1397 - protein, 683 aa, Sporomusa silvacetica
MILSICMMVKNEEANLERCLQSLQPIRDGLDAELIIVDTGSTDNTVGIAKNFTNKIYFHQWDNNFSEMRNISIGYATGKWIFIIDADEQLEDCQPLIDFLRLPKRDKYGSVAITVKNMVDLENNEYSSMIAPRFFKNDGYFRFEGVIHNQPVFKGEALAIPQVYLLHFGYLPTDKELMERKFQRTGTILKSELEKDPKNIYYWTQLSVTYGMHKDFPEAIEYAEKAYSLLPKKRTPKHMFLFSHMALTYQHVKNYEKVEQICREAMTIKEGYLDIYFYYAEAHSMLKRNREAIIYYEKYLDLLDKREQTSKHDVTIIEYSLGCQELAYWNLSVLYAKEKEYDRALYYSKQITNSKYIKNNMVNTIECYLKLDQYVNVRKFYDKWVQEDWKSFFFENLDKIVRQYDRKVHIDVARNFCNVNHQYALLCNLIVEDTDNGYISEKMQQAVEKIRMESLPVYCSDIFYYLLKWHYPLEKIVVNFKEIWLTCAFDFVGKHHDDLCTVIYNYLQKYTCNYRVHEYKLAKTLARCAILLNKLSMDQYKELLDRYVQEGIHYLQIVYSPLILEGTMIYEVKNDEEAFLLYMYKAQIYRTSQPAEYVKCLRQALQVFPVLNSGIEMLLVEIQVTRKTEQNEFDTYKQEIKNRIQQLIDRKKMNEARIILEEYKSIVPNDMESILLESRILIS

SEQ ID NO: 1398 - protein, 374 aa, Synechococcus lividus
MAPLLSLCMIVKNEAHQLRRCLTSVQPWVDEIILVDTGSEDDTVAIAGEFTPHVYAVEWQQDFAAARNYSLQWATGEWIFYIDADEELIVTDSHWRSQLLDQGIDCFSVLRQEAGTHHNWSDFANVRFARRQPGLRFVGALHEQLNTAQGKVGALKGIHLLHHNQQTQEQFLKKIRDRNIPILEQMVQRGDRRLMNLVCLGDHYAACGRTEQSRDWYHQALDAIAEDIEQQRLPQETTWLRHLLFWATYTAFEAKDYDTAQYYASYGLRYFNAYPPLLYAAGLIVFELGLPRGALPYFHRCLDLFSRGTYDRSEPFDRQWMTTQPAYSLGFTYMTLQEQERAITYFQKTLEFNPHYQPAQQHLQHLLSATAPSG

SEQ ID NO: 1399 - protein, 629 aa, Paenibacillus sp.
MIVKNEEKVLERCLLSVKTLVDEIIIVDTGSIDQTKAIAARHTDKVYDFSWMNDFSAARNESIRHASGRWILILDADEYVQPADHDKLRKFLLEYKSDRPCGFVLNIMNFGGSGNDESNVTESTGARLFLNAQSIRYIEPIHEQLTSDFGTPLFTPYPFLIFHTGYTVQVVQEKNKSERNLSILEKMNAGEKRNNPYFCFVLGNEYTSAGREDEALDVYRRSLERSSPSDTWYFYLLERLAVLEMKKGNYSKAHVNIRNGIKLLPERTDFLCMEGILLEALGLWNAAENVFHQCIQIAVEAEKKGSPYWIIKPSYGKIVPHQSIAEIKRRKGDITGAIHHWVKTLQHQPKNYAVLQLLMEALLQSEPYDQVADIIEQLYPIDQPMNKVLLHKIALKIGSIELVSKYASDVLELGVQLDKADIVQQNLLLRNWSTSTTSSLRPNSLEDSLAIAAAIVHQEISIADTATGDTTACTALVQEALLAINNKTWNNEVLTNQEDRFTQTLQLLWRYGYTEIYLSLMQIMASETVLNNMADWFYTRGFHEQALDLYSVLLENNLLHAKGLKNVGVWYINCGNMEEALPFLEASFKKEAFVDIIGLYKEHASPEAYRRFKSSYIEQFPNTSQCIFL

SEQ ID NO: 1400 - protein, 638 aa, Unknown
  Description of Unknown: Bacillus sequence
MKPFISLCMIVKNEEKVLNRCLSSVANFVDEIIVVDTGSTDSTKEIASKYTNNLYDFEWTNDFSSARNYAATKASGEWILVLDADEYVDEENFNQFIQEVKNDNGIYDAYTAKILNFTGNFGENLLQNFHDRVYKNNGEISYYRHIHEQFKSTKGKQLNIKNSSLLIFHSGYLSKVVSEKNKGQRNKELLNFELHNGAKNAFDYFNFGNEYYSIGEYEKALESYLQAYKQKSDFRLSWVSTTLVQIIICLIHLKRYNDALNIITDAQNMYMASPEFPYLKGEIYFTRGQLDDAKQTFLQIVNYPQQYHHIIFRPDLKDQKPHTRLGEIYLYEENYQQAIYHYTCVLNINKYNEESIKKVIYILNKFHSVEEISAFLKSNGLISEKNVSSYVKACFDVGNPSLAINLLEDYLDEYKLLNKVALLKRLCIDNIGSIEQFHEIFKPEIIKHLMESNWVNIIDVLLLKDHISTSNDLLTVLNYLKQNESMNKLMDLVDGNESIVNIDEDLIIYALQLFFVYKKFDLCNSILKEIEKVDKHTILIVARVLFSNGFKGEALQLYNLCDWDAFNAQDFINIIHSLLEVNNKDNAIEVSKYALSIFNEDFRFYKYILENTEDPSLFKTTFDQAKKIFVESIYFNQF

SEQ ID NO: 1401 - protein, 373 aa, Paenibacillus sp.
MISISLCLIVRNEEDVLARCLDSVKGIADEIIVVDTGSVDRTKEIASDYTPKIYDFEWIDHFAAARNFAFGKATCEYILWLDADDIFKEEEQVKLLELKASLSTEVDTVSMLYNLTQDETGAVTNRLRRNRLVKRSRQFRWIGAVHEYLEVYGAAFAADIAVTHASTRHDNDRNLRIYEQRLAKGDELSPRDLYYYANELKDHSLNERAVHYYSLFLQSKRGWVEDNIAACGKLADCYASLGNQELALESALQSFSYGSPRADNCCRIGYYHLQVGAYETAAFWYESALRAPRQDEAWSMQNTSCSTWLPHLQLCVCYDKLGEWLKAYEHNEIARAYRPDHPSVQHNKTYLEGLLLPAQTLEPSDLSLTQTAP

SEQ ID NO: 1402 - protein, 651 aa, Sporolactobacillus sp.
MRCKLMSPLLSLCMIVKNEENVLKRCLDSVKDGVDEIVVVDTGSTDKTKEIAGEYTDKLYDYEWTNSFADARNYAQSKATGEWILALDADEFVDYDNLMDLRKELRENVNHFDVGLVKIFNFTGQAGQLIYNNYHVRIYRNDPSINYYRAIHEQLKKTDGSSLKEQVSSLVVYHSGYLTSTVDSKNKHKRNKALIDKEVRENGQTGFDYFNLGNEYLSHGDTEKALDHYVKAYKKRPDVRYSWVGPCVLQIIQCLIQLKRYKDALNVIRDSEAIFSRSPEFKTMRGRIFLLQGRINDAEHELIRLVDNKDDYTDTIISPDYLKYFPYKFLGYIYEKKEDLQKAVFHYSKAFHFNLNDEDLLRRYFRLLLQNTSPEAFYQFLLDEKLLENKNSAKRLMKVIVNLSDSNEFVSEILDHSFFNEDFGAQAKYLLIQKQPKDAFKLISQLSPKQLIYIFNEGIFDFFDFLILCLLLNQQKLLAAYTGMMKQVAGLVDLLSNGKSKDKVNPSIYLIVLKRLIRLEQFDLFEKIVGYKTFFDKSINIRIGHLLYNDGFCDLAVSFYQEAGTSLFDEQTYLNVMEQFKKQNMLEDAFQFALRSLNKGYQHFSLIKDVIEIANQVNDEPIHHAKRDLAKFALKLYPDSKEMREVLFANR

SEQ ID NO: 1403 - protein, 655 aa, Paenibacillus jamilae
MKRLSVCMIVKDEEVLLARCLDSVKGIADEIVIVDTGSTDRTKEIAKEYTELVFDYEWSNDFAAARNESIRHATGKWILVMDADEYLSVDDHVNWNKFLDRERPNEQVAYTLPIINFTGEKEYQDEITTSPVTRLFPNFKGIIFERPIHEQLTKGPSGELFHKKLQLNIYHTGYQDQRVMEKNKHERNMAIFNSMKKSQVMTDYDWFTLGNQYRYAKDEEQALECYERALEGADWNAVWYPHGLIGLISLYYKQGRLHLSWRLTEDKLSLYQDYSEYYTIKGIHYETLGFFEQASAYYLKAISIAEERAANQKEFWLVDPMYSFEIPVQQLITLYFRLNDNQQAIYWLSKLLSKNNKHPGVLLRLIEWLCQNESESSVIGFLNQHFDMDKQADPILLFKVSLALGQNVMTTYYHKYLSNDDFLSISDRLRIAVLEQDKSSWSKTGLAIDKVGKEEQQQVWLQIVLGSLVWNDNELLKESVAIIVDEEFNGVEKLISQFIQEEIIPDQQALEKHADSLFLIAKQLFLIKNYELFDRFVQFTKSTKLINSLANYFYSMNLIDMAMNYYSILLKEQLLDAKSLENLAFYHLNHGYFDEALDFLKELIEIEPKARHLYYFLIRHGERQEKQLYIEKFTSKFPDFENISFIREFFNQNRT

SEQ ID NO: 1404 - protein, 364 aa, Cohnella sp.
MTTISLCMIVRNEEEVLARCLDSVSDLVDEIVIVDTGSTDRTKEIAANYTDRIYDYEWTDHFADARNYSFAFATQDYVMWLDADDYFREKDRLKLKKLKDELDSAVDSVVMEYHLAFDAYGNPLAMSRRNRIVKRSRQFRWYNPVHEYLLVEGNYYLTDIAVSHGRVHENTGRNLRILEQIVQREGEVTGRDIFYYANELSDAGRFAEAAEQYRRFLDQPVEYFEDNLTACARLSACYHQLGLLDQKLTALLQSMVYDVPRADFCCSIGQCFLDREDFVKAIYWFKLALSQERPPDHHFGVLNLICWTWLPHLQLCICYGMTGELELAYEHNEKALSYLPNDANLLQNKAKIEQALGIGGTEPE

SEQ ID NO: 1405 - protein, 595 aa, Cohnella sp.
MGEPLLISLCMIVKDEGATLARCLSSVQGAVDETIVVDTGSTDDSAEIAKRYGAVVVREQWKGDFAAARNAGVCLAQGRWILFLDGDEALESSQHAQLRQLATRDDYEGFFLQVRNYVGNGEQGATVNPILRLFRNRPEYRFQGRIHEQIAASILESRPGASFHLTELVIHHYGYQREYIEAKDKVRRNMDLLEAALQAEPDHAFYRYNLGVEYLRSGRPEEALEHFARASRLVDPERTSYAHLLSKYEIRCKQALGRWEEAYVQTAGAIRLYPGYTDLLQYKALCERALGRQAEAIGTLIEAMKQGVPQPIYHTEEGIGTYQTAYLLGELLEEYGHYEEALLAYKKALGYRSSLTPPLYRMFRLLRVAGREKEIPQWLKTSFRLASPEAWAKVVAILLQCRCGRAAAAILQEKQGRKLPEGFRLLAEAEAELQRGRLDAARRGLRSSGRKGQGARDSALASAAIAEHLRWLDGDVKEPWSDRITIALASSSQGSEQPIKLTGDELSGGVWPQLQRLLEGSYSCGKRQEGLHVLHLWQRTLESPEATPAGADALVHGLSAIADRHLALLTSSDFGKRHKEALTAARLRLPHEDGM

SEQ ID NO: 1406 - protein, 531 aa, Desulfacinum hydrothermale
MKKPRISLCMIVKNEEHNLPRCLDSVQGQVDEIVVVDTGSTDRTVEVASRYGAKMVTFAWNGDFSAARNVSLDHASGDWVLWLDADEELLEGTGGMTLPELAASTDVDAYLVPIQNMKADGSFTAHFAVRFFRKLEGIRFEGKAHESVGDWLLRQNARIAQSPVPIRHWGYAVSDGELQRKLDRNLELLMAQLKQTPNSSYVHYYIGMTLIGKKDFEGSFRHLQKAHELGPETPNMECLVANMIAHHHLHRCQYDEAEKWARRSLAVTTQQHTGRLFLGIALYNQKKFAEALPLLQGAYQFQRQPLMRRRSDISLEHAHGEKELLWAVARSAYEVGRYPLAYQFLERLSRSYSPDGTVALLQGLCALAMESYRSATCHFQQAGALGASWAVLGAPWVQALLRLDRADEALRVLEDAGASFFHNEKAGSIFTTLVERCFESQRIGALSKVLERIVRNGPTHPLVLDALAVCRIKAGDYARAAEALEALLELDPGNPEVRRRLAAVWYGLGDRERAAHLLRHGRSREAVGAMW

SEQ ID NO: 1407 - protein, 655 aa, Paenibacillus macquariensis
MPKLDISLCMIMKDEELHLERCLSSIQHLVSEIIIADTGSHDKSVSIANRFGAQVIQIPWEDDFAKARNTVLKQASCSWILVLDADEEVDNWQLEELRNLLNNPDNQGYFLSLKNYVGETIDHSYVTDAVCRLFRNDKRITFCDRIHESVAPSIWEIPDANIAFSSLRIKHYGYLQHELVRKEKGTRNLNIIQHSLQQRPGHLPLLYALGTEYYQLADYESASTILIPLLHQIPATSGFTSDLYLKSAYALYMCRKLKQSEAILLEGSILFPDFTDLLETYAILLAEQGRFSPAYEYLQKALNAGDVSIKYSSTSGSGTYRTHWVAGTICEQMLLFEEALRHYEHSLEFRSDYMPTWRSIVPLCLLSNQIPRLLLITERYHTSLTSDILMFLTPSALNSRSLPWLSQLRSYLPSEPATIVDAMLFQQTGDRHESAQRLEVLLHTFPNHPMILSYQWAVTHESEVSQSAIRWMNELIHVKPDMNTIQQRLEDHPDTSLNPPNPQMLEYALQLFIQTGSWNTLLTLFRHSSADIRWSALPQSTLAGLLQSPHAVQQQWCHIFLQQQEHHFSDDQSHEETIISYDISEWLYYASIAQACGELPELNEQMEERLCHSGEPIPLVALAYYQLLRVYSLHTSHTPKSSICWPLLFRSYINI

SEQ ID NO: 1408 - protein, 377 aa, Bacillus lonarensis
MITVSLCMIVKNEEDVLARCLDTIKDCVDEINIVDTGSTDRTVEIAKQYTDRVFFFEWTGRFADARNESFKYATKDYILYLDADDVVLEEDREKFKKLKETLDPAVDSVSMFYNAGMDQFGNVTLRYRRNRLVKREKNFQWGGDAHNYLNVFGHIINSDIGITHKSVRHATGRNLSIYKDKIERGDSFSPRDYFYYGNELRENGHPEEAIESYDKCIALKEGWVEDKFYACINKADCYTRLKENQKALESLFQSFVFSRTPRPEACSRIGDKFKVANQFKDASYWYELAVLMKPDENQWSFSYPAFSTWYPHLQLCVCYDKLGDIEKSYENNEKAREYRPQDPAVLHNKHYLEKKMEKLKEEKEKKEQEKEDKVEKE

SEQ ID NO: 1409 - protein, 638 aa, Cohnella lupini
MTKLISVCMIVKNEEAVLNRCLQSISALVDEIIVVDTGSSDATKAIALKFTNHVYDFVWINDFSAARNEALKYATGRFILTLDADEYMDEANLSLLRDSLSKVEPRTDTLYQLKVVNYKGRNQPTTEEPIFRVFANYSNISYVRPIHEQPKTHSSPTTKVVPLPVKIYHSGYTEDVIKSKNKHERNMNIFSEMQKHSQLGPYDHCMIGRQLIMMDLHEEALEHLQKALKLGNKKEVWYKHNLISMLEVYLSTNKAIDAFIFMEKHFTQYLHYPDIRGLYAMVLERLGFWSLAKKEYEEAYKIAENQIKTKKEDVFVSGDLSFRIPTWNLAIMNENEQNYNPTIDYLAKLLIANKSDLESIGKFIEIASLNEKPEIIIQILEKLIQADSEITSNAIVGKLSISLNKLELARHYCDDKLLSGLYNPSEQLRYALIISNVTLFQSVLNKLTSELILQDPMVKRLIALGILIWEVKEWSSLIESDVLLSRFTSQLLNEDVPEHSDEAEEMACMIISELYSLQQWDPYETTLSHYETPKVINYLANFFLASHQSKTALQYYQHLLDHDAMYANSYANLAFYKYSQKETSEALVLWEKAINLDPSRKKLYIQYYEACQDPIKKQMMKKRLLDIEPQYSAIRLLK

SEQ ID NO: 1410 - protein, 364 aa, Paenibacillus sp.
MERCLASAAPFVDEIVIVDTGSADRTLAIAESYGAIIIHHRWQEDFAQARNVGLEHATGDWVLWLDADEELEAADGEAMRESLATEKGPLLLVELINYYGADPPDPLRCHILAHHRLFRNGIGLRFVNPIHEQLNVNEVITSLEPPPTIKARIYHYGYMDDIRLAKDKSGRNIRMLQEQKKLPDYSPWIDYHLASEWLTAAKYDEAIKDINLAITRFLQIGQLPPSLVYKLKYAALLESGHAYLMWPAIDKAIQLYPDYVDLRFYQGIALLLRGNLREAENSFNQCLAMGETCTTHLTMKGAGSFLAYFYRGECRRLSGRLDLAQEDYKETLKQNPQFVEAEQAKLKLETGRKGSEVNVTGSHT

SEQ ID NO: 1411 - protein, 252 aa, Fluviicola taffensis
MKSLSVVIITLNEERNIQRCLKSIRDLADEIIVLDAFSTDKTATICEQYNVQFVQRAWEGYAASKNHLNSLATSKYILSLDADEVISEALYLEIKAEKGNGFKGTYSVNRLTNYMGKWIYHSGWFPDIKPRLFPKEGSYWSGEYVHEELVHPPSEVKIFKGVLEHYSYYSYEDHRARADKYSILTAQKFNAKGKKAGPLKPIISAVGRFVAMYFIKLGFLDGWKGFKIAQISAQSNVLKYKELRRLNREGRN

SEQ ID NO: 1412 - protein, 265 aa, Unknown
  Description of Unknown: Phenylobacterium sp. sequence
MIRLSAVLCVHNEERRLARCLDALGFADEIVLVLDRCTDRTRAIGEAYGAVMVSGVFPLEGPRRAAGMNAASGEWILEVDADEIVSADLAGELLRSLDDDRFAFRKTPVDNYVGDRLIRHGWGGAFGTSLAARFYRRGSKRWGDERVHPGVAFDGPEGPKFTSPLRHQFADDVSDVFRRLDRYTDLKAQDLREHGGKTGVADNAWRGLRRFWKCYVRRRGWKEGGWGLMIAMMAGLYPLVSAMRAELDRPTADTVEPALPLARAA

SEQ ID NO: 1413 - protein, 362 aa, Paraliobacillus ryukyuensis
MISISLCMIVKNEEEVLARCLESVKDIVDEINIVDTGSTDRTVEIASSFTDNVYHYEWTGNFAQARNVAHAYATKEYTLYLDADDVILPKDKEKFLQLKETLDPNVDAVSMYYHAGTDEFGNVTIQYRLNRLLKTAKKFQWQGDCHNYLNVTGHIINSDIAITHKKISHSVGRNLSIYEERKKRNEDFSARDYFYYGNELRENKYYEEAIKSYQQNLEMHSGWIEDKVYAATYQADCYRILKNEKQELNSLFYALQLAKLPRPEICSRLGYHFQQKRDFKPAVYWYELATTIKTDPNKWSFTYPAYATWYPHLQLCVCYYNLQQFEKAYEHNEKARIYRPEDQRVLFNKELLEKRLDLSNEK

SEQ ID NO: 1414 - protein, 350 aa, Herbinix luporum
MISICIIVKNEEKLLNLCLKHLIPLNYEIVVVDTGSTDGTKDVAINYTDKVYDYPWNQDFSAARNFAISKASNDYIFMIDSDEILASCDKKELETYIQRYPDGIGRVMIISEYYRDNEKYSVKNQVSRIFSKKKYCYQGRIHEQVVPIEGEIATIYDAPIRIYHRGYDGDLETRRKKTERNISLLKKELEDKGDDPYILYQLGKSYYMQEDYFASCEVFSKALYFDLDPNLEYVQDMVESYGYALLNSQQYETAMQLLGVYDEFAVNADFLYLMGLIYMNNAMFTEAIGEFIKASQMKVYKMDGVNSYRAYYNIGVVYECLGLVDKAIKYYKKCGNYSLAVKRLNTLVYD

SEQ ID NO: 1415 - protein, 373 aa, Paenibacillus sp.
MIEISLCMIVCNEENSLPRCLSSVGAIADEIIIVDTGSTDNTKEIALSYGAVIYDFTWIDDFSAARNFAFSKATKEYIFWLDADDYLKDVDHARFRELKHCLPDGVESVNMQYNLAFDEEGRVVTSLRRNRLVRRSCNFKWIGPVHEYLEVYGPAYSSDVCITHEKDKVYTDRNLRIYQKRVAEGEVFSPRDQYYFANELRDHGIYEEACRYYELFLDGGLGWIEDSYQACLRLAECRERLGDREGAFQSLCRTLQYDTPRAEFCCRLGAWHVEKGQLLPAVYWYELAIKLPRNNDSMGVKNEAFATWVPNLQLALCYDRLGQREKANLFNEAALLYHPVHPSMLYNRNYFKNVLGDNYVELHSREAAEKEAE

SEQ ID NO: 1416 - protein, 340 aa, Clostridium sp.
MITISACMIVKNEERVLDRCLKSLDGLVDEIILVDTGSTDNTKLIAEKYNCRIFDFQWIDDFAAARNFSFSKAGMDYIYVADADEYIDEINRERFYKLKQCLLPEIDIVQMFYTNQLEFNTTYNFDKEYRPKLYKRLRQFSWVDPIHETVQINPIIYDSEIEIIHMPESNHASRDFSFFNKLINKGVTLSEKLLGMYARELFIAGDNEDFLKAEPYFINVLESNLAPEQLKAIQCVLVRCGRIKNDPALILKHALKNLASGNASAEVCYDLGEFYFSNEDYQEAAIWFMNAAYETEAELNIRYSKDYPVDRLADCYEKGGTIEQALLYRQQAVELRKEFS

SEQ ID NO: 1417 - protein, 544 aa, Paenibacillus ferrarius
MAKNTISLCMIVKNEEAHMHRCLDSIKNTVDEIIIVDTGSTDNTVQIAKSYRAKVITIPWKSDFASARNAGLSLASGSWILILDADEELDEKNRKELKICAEHHEFDGFFLQIYNHSGNTINSPVSTINPILRMFRNHPHHRFRGKIHEQIAYSIVERNPNPALHITNIVIHHYGYEEQLVIQKDKIRRNLDLLIQSLQEEPNDPFHHYNIAVEHMRVNNHESALPYLQTSLSLVNHEVSYTHLLYKYKARCLFALGHNLEAIQACESGIRLFPDYPDLFHIKAVIHSSIGDKTLARDAFLQAIQIGTAPMQYHTDSGIGTFLSTYGLGQVHEEIGEDNNAIHWYAETIRHNSQMSRPLQRIFRILKCTGSESMIPALLSERFSIKAPEAVLKVVNLLIEESCYTAALSLLTRLDDETYRQVRDEKIKICQLLSGQKHKNIWYWIGLDEPVLERSYMEGNDYDQFELAVKSAYYNDHQGKALELLRNWQPPIVTDSKAVQDEGYRRSRIWTALANAKIGVPDKQSPHYKILRLAKQSLPLSRGY

SEQ ID NO: 1418 - protein, 702 aa, Clostridium sporogenes
MKLSIAMIVKNEEKYIENTLKPLKKLQKYIDSEIVIVDTGSTDNTVEIAKQYTDNIYFHEWNNNFGDMRNISINYCTGDWILVVDADEVLYDVEELAKLIRNKKISKSNGAFVKIVNFNKDVKDSISNGAISPLLRIFKKGTVKYEGSVHEQPRFTNPIIDTNIRFIHYGYDNSNYKLMEYKFKRNLSLLMEELKKDADNIYIIFQIAVSYSMHKDLKEALKYIEIAYEKAKGKIQNYIYVIDKYCFILHSLREHRLLLEKVEEALSKEEFIDFYFYKGEACYNLGKYEDSIEAYNKYLNFYQKLKNNNLIFNNTLSVVTRSLRDIVIYNLSISYFKIKKYYEALNTILQIQDKEMLKDKAFIIFKIIVEGKLWSKLSILNGFIDKYNYESILVYVHKDVLLEDIILLSQNEKLLDNELKEIINIVKYFKENEGINKDLLNKSKKRIDENKIPYSIYIYYILKYDITEIEYFMIYGRDKIENILINLCVNYFDFNYSILEGLEKFKLINTNNISIKTIMEKPLLLSGNLPEEDKEKIFLNYIAHKYYCIIKNYNEDLVGNSKWMLTDEERFVLEIKEVLEDKYKDSVKYIRGIKDILNIQKSYIGYMKILTNNVEETVNKDIKALIPKLIESIKVLINTEKYQEAYNTIEEGLALVKFDFDLMVLKYNLLVQFSYDEEARICLRDIILYGDGKKIKELIYNL

SEQ ID NO: 1419 - protein, 256 aa, Unknown
  Description of Unknown: gamma proteobacterium IMCC1989 sequence
MSVSAVLIVKNEQDRLKDCLESLVWATEIIIVDSGSTDNTLNIAKQYTDKVYIHADWEGFGKQRQLAQGYAVCDWVFAIDADEIVTSDLRESIEHVVQANDQRYAYAINRKNWAFGQFIHHSGWSPDWVTRLYPRAKTSYCDSLVHESLLIPEGIKIESLPKTSHLLHYTYDSLYDYNLKVTGYLKAWADQRVGTKKSSVLKGVCHGMFAFFRMYILRLGFLDGRHGFILAFLTAYTTSLKYFDLWLRQQENTNDG

SEQ ID NO: 1420 - protein, 324 aa, Bacillus cereus
MIVKNEEESIERCLNSIKELVDEIIIVDTGSSDRTIDICKQYSQNVYPFLWNYNFSEARNFSIQLAKSKWILCLDADEEFDGNEISNLKDSINKKKEQLFYLPILNYVGNTVAENNIYQIFQPRLFCNGVGFRFQNKIHETLCIPPNFSQYGILNIPIRHYGYLNSRVKSKKKNYRNLEILKSELEIQNHTPWIEYHMASEHYGVKDYEKALYFINQAILKFLAQETLPPAIAYRLKYTIIMESGNIAKDWRGIDFAIQIYPDYVDLYFIKANILFYLKKYQDALEAVNCCLDLGENNYKYLILKGTGSFRAIKLKQKCLEKLK

SEQ ID NO: 1421 - protein, 586 aa, Pelotomaculum thermopropionicum
MEDTITLAMIVKNEAGNLKRCLDSVSGQVDEIVIVDTGSTDETLEIARRYTDKIYHFPWGGDFSAARNFAIEKAGGEWIISLDADEELVSGTGDLKRLVARDKHLEAYLLPLNNPTAGSPGEYNRFLVLRLFRNNGRYRFRGKIHEQVTVSEKGVVGIAEGPVISHKMLPARERNRKRGRNLALLKKAFSDDPQNYFLQYYIGVEWLMLGKPERALPHFQQAYRNLTDENLLFRGPALRYLIICLKELGRLDEAICLCLEADLKYPEYTDVYYLCGVLFEEKKEFQLAIKWLNQAVKCGTPPAIYSHMNGAGSFLAFYHLGYCHEMLGQAEVAENYYQQALDTNPGYIYPIYNLFLIMLAKRGPRLTLEYFKKKGYLGHIDLALAAAGLFFNWGYPELARRCLGHYETSGKRAKEFYFYLGKYNIYSGKLKQGLDYLKQVSEESSFFIQSQILRAVALLLQGRFEKVRSLALELWKNHAARRRALVLLSLARLVEKGGTLSFPQKVRDIDLLETALEILDQCSRYLPDEDRARKDPRLNRLINGLEALIKNNSPRGHLALIEHYRDKSYSARSFFDYKYGFGGNRV

SEQ ID NO: 1422 - protein, 358 aa, Bacillus salacetis
MITISLCLIVKNEEATLWNCLDSAKEIADEIIIVDTGSTDRSKEIAREFTDKVFDFEWVDNFAPARNQSFKHATMDYILWLDADDVLFEEDQKKLLELKRNLDPSIDSVSMIYNYGFDEYGNVTLSFRRNRLVKRSRNFQWAGDCHVYLQVDGNILDSDICVSHKRVHHSTGRNLAIYEKRLENGDEFSARDYYYYYANELNENQFYEKAIENYTAFLEMEDGWREDKIAACSRLADCYGKTGELEKQRNALYKSFEFDVPRPEVCCRLGSILMDEGNYRAAVFWYKAAIDYQQPEENWGFTFKAYSTWVPHQNLCKCYYYLIDFEKAYEHNEIAREFRPEDPGILHNKKILEEKLKG

SEQ ID NO: 1423 - protein, 360 aa, Paenibacillus nanensis
MISISLCLIVKNEQSTLGRCLDSVREAVDEIVIADTGSTDGTKEIAANYTDRIYDYRWSDDFAAARNFCFDQAQTDYILWLDADDVLLDEDREKLLRLKKEIKDTVDAVSMIYHYAFDEFGNVTLSLRRNRLVKRARGFRWHGPVHEYLAVSGSILSSDIVVTHRRTHVQSARNLTIFENRMRRGELFSPRDLYYYANELLDHGMDEKAADKYEQFLATGQGWSEDVISACLKLADIYSRMRQPEKQIAMLWKTFDYGEPRAECCCRLGHFFMERDRPEEASFWYRLATRLEKPKDCWGFLQDAYWTWVPHLQLCVCYCRIGDFGKAYYHNEMAGRYRPDDPHVLHNRRYLEGVLRNEAL

SEQ ID NO: 1424 - protein, 625 aa, Paenibacillus sp.
MMKTIALCMIVKNEQEYLRRCLESVKDKVNQIVIVDTGSTDETISIANEYTNEVYHFDWINDFAAARNESIKYAKADYILVLDADEYLEDSVDILSSIEVEADYYFIKIHNMMSQGRAIDHLAIRIFANNKDLYYRNRLHEHLNTYEDEEKYKAGHAEFTIMHTGYTDDMLEGREKSKRNLSLMLKEVEENPNVYNLFNMGRTYNWTGNHGKAIEYLQRAYSLSGNLSIVPELVATLCRSLGEMKRYEEALYVLQEAVLVFPQEVDLVHLQALFFKEIGYYRDAIAKMNLCLEIGDQGITVTEGNGSYLAHFRLAEWYEERNDLVKSYEHILEAFKLNMNFIPVMGKYFKIVEKANIPLDDVFISIKQLYTISNSAQLERLLEVLYQLRHPLLHRFITEYNVIVQDSVEAIAYQYVGEYEKSRDKWITIDEITDQNGEDILLLSILLKDENLFKISRPLLNLSVSEQKKLQKCIFDISPGNLKLTTHTESLLEKSIIHLIRLHEFETFESVLGCLWNGGIDIKMKICEHLIAYGFNEIAIDLLVKLYEHNSRNESLNLILGDVCYKSNYFEDANLFYSRISPRKYEIHEHLYEVNSKMGNQNEKEIIIEEIKKLFPICQWVKTEL

SEQ ID NO: 1425 - protein, 335 aa, Campylobacter coli
MNLEKISVIIIVKNAQNTLFECLNSLKEFGEIILLNNESTDDTLKIAKEFQKDFTHLYIYESKFIGFGALKNLALSHAKNEWILNIDADEILENEAKEELKKLEFKEQNILALTRKNLYKGEWIKACGWWPDHVLRVFNKKHTKFNENLVHESLILHPNTQKVYLKNGLKHFAFESIDDLLDKLQKYSKLWALQNLHKESGICKALVRGFWTFFRNYVLKKGIFYGYKGFIISVCNGLGAFFKYMKLYELKKQKPKTCALIITTYNQPKRLALVLDSVKNLDPLPNEVLIADDGSKEDTAKLIQEYQKNFPCVLKHIWQEDKGFRLSQIRNKAIQ

SEQ ID NO: 1426 - protein, 361 aa, Bacillus cereus
MIVKNEELCIEKCLQSVKNIVDEIIIVDTGSTDKTVDICNKYNAKVYKYSWNGSFSDARNYGLKFATGDWILWLDADEELETIHKEIFDKLLNECINERLLSIHLINYIGDTVDIDKTFHIAHTRFFRNHQGFKFIYNIHETLNVHQILNSENLKNIKVLPIKVYHYGYMDSFVENKNKVERNLQILEQELLNENHTPWIEYHIASEYYRKKEYIKSFEYTNLSIERFVKNNQLPPSLVYKLKYSNLICANSIDGAWPGIELAISLYPDYVDLYFLKGIILFRKKEYNNALQVFEICIDMKENNLQHLSLKGMGSFMAWYYKGLCFEKTKKMIEAKNAFETSLKISSNYLPAKEALNKLTK

SEQ ID NO: 1427 - protein, 1623 aa, Gottschalkia purinilytica
MRLSLCMIVKDEEENIVECLDRALKVVDEAIIVDTGSIDKTRKLLLEKYSEDDRVKIIDYEWENDFSKARNKSLQYAMGDWILVLDADERIFCNRNSLEKLLLENKEVVYSIPIYNIYGKDNFTVSTSMIRLYKNDNPIYKGAIHEQIFINGKQYLGGTIDKDICKIYHYGYDNGIFEAKNKSKRNMDIIKSEIEKDPKDPFNWYNKAIMEMIDGNFNSALNDFIKAHNLCNGIRKAYHNDLLIRMIQCMMMLKRYKDTISFIKTLLKDECINKMPDIYYYLGMCYKERKKYKKAIENFKKAIEIGDYYEGISKYGTGSFLSLIEWGEVLKINGRLDKAIEKYKEAIFNKNNPTMKGLEELKILLEENNMTCELKELEEEIEEIKETGTKTNNTEVKIELEKYKEEFKNNIQVLLEQGLIKEAKEMVLEFEKIVKNDVSVFSIKGIMSMMEGSLEEAERNFLKGLEIESFNVDILYNLAYLYESQGKITSAYRYYIKIQKSSSDEILLDEVKEKIKEYEKLNKIKDYKNRKKVLFISHIFPPLGGSGVQRSLKFVKYLRDFGWEPIVVTTGKTKFLLRDEEMISEIPEEVEIIRIDEVDKIDGRYSKKLIKLYSNIVNDNDLIKEYVHFISSSQEAYDNLILFPDQYIVWAKEVLEKIHDKVDFNGIDMIYTTSGPNSAHTIGYYLKERYSVPWIADFRDEWTNNPMMNYDKESIIYKMSFAFEQSIIHYADKVVTCTEISSDNYKRIFNLDNKKVDTITNGYDEDDFNNIKIQNYRDKFRIIHNGLLYGVDRKVDNFIKAIYNLIINGSIDKSKIEVTFGPTDDTERYKNILKDMKLEENIMFIDYLSHEESLKLASKSNLLLLVVGKSEKWKGVPTGKIYEYLRLCKPILALSPKESIVEEIIEKQNRGKNIEFDDIKEIERYILQQYNDWLNGKENSLEITDEVKIYERKLLSENLSKVFDEIHNIKNRRKLAFFCVKNGDSFLDDIITNLSREYEIKKIIIEKYEEFNLIDKWMQWSDICWFEWCDSLAEYGSKISIAKEKFIICRLHSYEAFTNNPNNVNWDNIDKIVFVAEHIRRFVIDKFDIREERTCVIPNGIDMKNWTFKSRNDGFNIANVGYIDYKKGPMLLLQAFKSIYDMDCRYKLYLAGKFKDDRDVLYFNQMVKQLGIEKNVFFEGWQNDLDNWLEDKNYILCTSVLESQNMSVMQAMSKGIKPIIHNFVGAKGIYKEEYIWNTIDEASNYIVSNNYDSKDYRDFIKNNYELSKTIKSIRNIINCTEDSVKEERDVEPLVTIGVTTYNCEKYLTVCLDSILKQTYKNIEILIVDDCSTDNTINIINRYKENHKNVISIYHDKNSGGASKGINEIIRNSNGKYFQWIACDDSLQPQAIETFVKFMENNDSIDYVYSNFNIIDKYSKIKEKCRYNELTSNEIIKHIFNTCSTPIPLNCLYRKSFFVDNEVNWIIYKGNDFSCDTINILNFIKNGIKIRKLEDYLVNYRIHDKNLSYNIEKRIYGSTTIIDYIVENFDEDIYLPNIEWSSIKNRKVYKSYIISRVFEEYIKNHLNGDLIPKYINNNKKDIERYMNYFAKRGIYYLEKFISYTNGNDSESERLKEYFSKYCLN

SEQ ID NO: 1428 - protein, 255 aa, Sutterella wadsworthensis
MNPDATLSAVVLTRNSSALLERCLQSLKFADELIVIDDFSTDETAEISARCGAKVVKHAMNGDFAAQRRFGIEQCGCKWVLFIDSDELVSDELAEEIKHVLQGGEKAAYLLKRENSFPHYDITHGSMRSDCVLRLFPKEGLKVEGRVHEKVSSPFPHKKLQGTLLHHPYENWSATIRKLDVYTEYLAVQQVEKRRKTGFFTGVFIKPTWAFIKVYFFNKGFLDGRMGVMFAVHHAYYTFMKYAKYYLLVNSGGKF

SEQ ID NO: 1429 - protein, 371 aa, Marininema halotolerans
MISISLCMIVKNEEKTLDRCLASIFDIVDEINIIDTGSTDATKEIARRYTTRIFDFTWIDHFAAARNFSFSKATKEYILWLDADDFFKEKDREKFRELKKTLDSSVDQVSMYYHLHYDDEGNVFSRIRRERLVKRARNYRWHDPVHEYLEIHGKIMDSDIAVHHGKLQFNKARNLAIYEHRLAKGETFSPRDLYNYGNELMENNRLEEALVQYEKYFAADSPYTEDNVSACGYAAHCCHLLGRGEEERQYLLKSFDYDAPRVEFCCRLGFWYHAHNKLEKAISWYNHATQIKHLHDWGMINEAAHTWLPHLQLTVIYGALGQIEKAYHHNEIVRSYKPNDHEVLNNKKKLEFYLEKGITVATRPETGGGKV

SEQ ID NO: 1430 - protein, 335 aa, Unknown
  Description of Unknown: Lachnospiraceae bacterium XBB2008 sequence
MITVSVCMIVKNESQVLARCLDSLRTIWDELIIVDTGSTDDTMEIARRYTDKVYEFAWTGDFSEARNFAIDHATCDYIYSADADEILEGENVKAFEALKLCLDPAVDVVQMYYGNQLDQGTVYNFDRELRAKLFKRLKPIRFKDPIHEIPDIDPIVIDSDIVITHRPTSMHAGRDLETFRKIISGGNKLSSRLQKFLDRELYLQGSVEDYESFAGYLKGVTCDPERTADEVIEACTLLVRYHRMRGEIPQMFDNVIKVMAHECNSEVCDELGAYYLSLGDYDNAAIWFFNAAYEVTPILGIKAGKETALLGLIDVYKALGNEEMVTEYTNRLKED

SEQ ID NO: 1431 - protein, 545 aa, Desulfosoma caldarium
MDKPVISLCMIVKDEERHLPQCLESVRGQVDEIILVDTGSTDATPRVAARYGAKVFTYPWNNDFAAARNRSLEHATGDWVLYLDADEELVAFPQGVSLRQMAASLKVDAYLVPIQNMKMDGSFTGHFAIRFFKKLEGIRFEGKAHESVGDWLLRHGARVERAPVVIRHWGYAIPEDRLQEKIQRNLELLVAQVEKNPNDSYAHYYIGMSLIGMGDHERAYRHLVKAHELGPTTPNMQSLVLNMLAFYHLHRKEYIKAEDLARQSLAITPLQHTAKVFLGIALYNQQKFREALPFLREAYQFQRLPLESRRSDLSIEHSYGENELLWAVARSAYEVGNFPLAYQFARRLEKVATGDGPVLVLQALCALALGAFHEASAGFIKARSVGASWTWIGAPWMYALLQLEQLDEARSLLENAGLAFFENKDSAKIFALFVDRHWERGCLSELTETLTRLAQLDAVPVEVLDALALSLIKQQRYKDAVSALEKMRHRDPRRPEIIRRLAALYARLGEKTRAAHLLKSMDAARFTAPGPSLSVSKPFERWAAW

SEQ ID NO: 1432 - protein, 349 aa, Paenibacillus rigui
MLVSVCMIVRNEEAHLQRALDSIPQSFETVVVDTGSTDKSVEIASNAGACVSHFEWVNDFSAARNASINHANGKYILIMDADEELEEGTEQRVMEYIDRFPDQAGTVTIENFIKGESHLHRMVRFFPNTKQYTFQGKVHETVYKDGKVALIQDTCIRVKHYGYEQELYNKGAKTERYLKLYHDHLQQFPDDGYMLYQLGKLHYSNSQLQLALDALERCLHLNEQDHLYYPVMLVMLGYVLKEMGHSQLAEELLEPFIYRYKEFPDLFFLLGLLAMDTGKVGNIKTYFLEALRIGDTLKYTSVKGVGTFKAAYNVGLYYELTGHLTNARLYYQKAASLGYLPAINRLQNL

SEQ ID NO: 1433 - protein, 273 aa, Unknown
  Description of Unknown: Flavobacterium sp. Root186 sequence
MNKIPISVIVSVKNEAQNLPSCMDKLKRFSQIIVVDSGSTDDTIIIAKAMGAEVLQFQWNGKFPKKRNWALQNANLLNEWILFLDADEFVTDEFVNEIEHKIQDPVYNGFTIRFENYFMGRKLKYGYGFQKSALFKKSKGAYEKIDEDLWSHLDMEVHEHPIIEGKVGIIKAKVVHKDFKNLEHYIDKHNAYSSWEAQRYLQIKKSENTLLSLNQKIKYGLLNTGLLPAVYFFGAYFLKLGFLDGKEGFYLARFKSHYFFQIQTKIDLIKNKN

SEQ ID NO: 1434 - protein, 657 aa, Desulfotomaculum reducens
MISLCMIVKNEERNLARCLNSAKDCVDEIIIVDTGSVDNTVNIAKKFDAKIYTYQWDEDFAAARNFSLSKAAGDWILYLDADEELEANCCQRLRALSNLPQYEAYYFQIINLTDGNDPLKHLNIRMFKNKPEYRFEGKLHEQIISSISAASPNQPPVVNSGITILHYGYLASEFIAKDKAQRNYRINKALVDKEPNNPFYLYTLGGSCVNLNDLEGATNYYLKALKNVSLQAMYAPSIFISLITCLLKIGKIVEAAEYIEKCKTHYPDYVDIHFIEGELYKRLGHVSRAILCFEKCLQLGEQKISKYTTRTGVGSFMPLFELAQIYIDQGDLKKALDYQIMGLKLKNNDMKQYLTLAKILKTALGNGQIVYKILKANIKHADKTAEKFILARMLYQIEEYELAGKLFDKIPVKSEEVAYYKCLYFIKTARHNEVTQTLKQINNIALYHDVLQELILAHWNSSPPLDASIYLEQQTDPDQELIKILSYINDRLFNCPTTCKFDINSEAFLLIMNKLLATKGFKLANDVLSLAGLDTTESKITYLSNSNLNNEKLELAARLALQELKQGSTHPDYYYVLGLYFLNNEDLESAHNMIHQALAILPEADQYQRLLKTIYRKQALQMVLKALENYPHNPRFNNCLIHLQKDLMTDTRLKGGH

SEQ ID NO: 1435 - protein, 642 aa, Anoxybacillus tepidamans
MKPLLSLCMIVKNEEKVLQRCLDSVYGIVDEIIIVDTGSEDRTKEIALQYVDRVYEFEWTNSFADARNYAQQHANGEWILVLDADEYVDRSNLTEMVKVLRQTNENTDAYDVTIYNFMGTYGERVLQHRNTRLYRNIPNIRYHRAIHEQLRREDGQPLNAIQGLLNVYHSGYMHQTITEKDKHQRNAPLIEKELQARENVAFDYFNLGNEYLSKGEIEKAIQSFLKAYKEKTDFRLSWVSFCIVQIVLCLKYLERFHDALNVIADAEKLYSITADFKYLKGEIYYLQHRYDDALLELNELVQNKDKYTHCVKTFEYLEYDPHMLLGHIYKHKGDIQSAIQHYTSALSVNNKSYEALYHVLLLLSRFHNEEEIIQFLEKRNWFESDQSILLLLRVVISLRLSTVAQFYTGKLKEKTIQKGFQIKINILQKKYGEALEEILKNSVQSLEMYIKTGSLDLYDVLVASLSTNKFEVVRLLFHLVSDEKEKEFLWFIMNEAEQASEPAFYIRLLERTLQLKEYNLFERLIQLKETFDQRIHIELGHLLHRYEFIELALDLYQCVDNVNELDAQSFINIIEGLSVKNQLTNAVQYGLQAISLGYNDFRLYKYVIELMKLCGMWEERKFIIRQALDIYSDSKWLMQQDI

SEQ ID NO: 1436 - protein, 621 aa, Caldicoprobacter oshimai
MKISACVITKNEEKNIARCINSYKDIVDEIILVDTGSTDNTVEVAKNLGAKTYYYEWNNDFAAAKNYALSLAKGDWIIFLDADEFFAEGHCYNVKKYIALLHRDEKYDGICCRMANIEENGEVKNYIVQIRIFRNHPDIRYENSIHESVRKRSEQLKVFFVDKEDILIYHTGYSSNVGTTKAERNLKLLLESKEKGYFPPHFNGYMSDCYFILRDWDKAIAYAQEYINGGVSFFGYNIKPYINIIEAMIQRGDDTELVIERIKEFIKKFPDNPTFYVFMADALYRVKRYTEAFEFYKKAAELNEKYNGIEINLAVNKRYYLYYKMGYICYLCNDYENAFTYFVESLKDKKHFYPAFMPLYMLVKYNSVQEKLTLFNSIYDLQKEEDVSFLTKAFAVLKDRDLLTYYEGIWIKKYDQRDLTIAYTLFSNGFYEKAFSKFMEAYKSGLFNDELRSITLAAYILSGYDYCSGHKIDSFKDEDRRFLELVFDCNHKKVSEEFNSIYLNVLKQMINVADDESLNRYLALAQFFEKPVWKDIFDIMIDNRMYASVLGVCDYLYSIKSEGADVQVEENELIFYMGLCYFKTERYSVAKEMFSLAKDRGYKDNDLKEFMLWTELYLQKV

SEQ ID NO: 1437 - protein, 260 aa, Vibrio breoganii
MATIGILLITKNADKTLRKCLDSVQNWTDEIVILDSGSTDNTLQIAKEYTKLVYKKTDWEGFGVQRQVAQSYLNTDWVFAIDSDEVVTPELKASILHAIKKAELDTCFSINRLTWAFGKYIRHSGWYPDRIVRLYPRTYTEYNDSKVHESVVIPTNTKVKKLNGDLLHFTMDSLSHYTSKTNLYIKSWADQREGKKSSSLGKAISHALFRFFKMYFIKLGFLDGKHGLLLAILSANTVFTRYADLWIRKIKRNGDDINLP

SEQ ID NO: 1438 - protein, 686 aa, Desulfosporosinus fructosivorans
MMVKNEDKNLERCLESLRELRMKLPCELIIVDTGSEDNTVSIAKRYTDKVYHHPWNNNFSEMRNISISYASGEWLFIIDADEELVAAEKLIQFFKKSYPKSIAGGALLVKNLTGNKVNKNVVVLNSSRVFRNDGAFHYEGSVHNMPIINGQILEIQASINHYGYDSTDQELMEQKFVRTSTILKRELAKNPDNIYYRFQLSVTYMMHKENNHALEEIEKAYRLMKKASDKKKHLYVYCQLARSYMKMSQYQKVEETCLEGIAIEEEYIDLYFYMAQAQGTHEKYEQAIENYSQYMKLVENFDNLAIKLNPVINHYTLPHMDEALYNVSVMLFKTDRFEQALNNVEELIKDNDSDVNLIVRAIPILVDACFTTQNFIRLRDILLGDLQARGLTLVEQALQRIEQDRKKLDKIVEKNFFQVFASFGDKYGILNKIRIMNNTGDTELADAISKFSNANDFNSLPDYYGDLIYNLIRLGRPEEVLGNLTELNAVRYLKYLSDEYGATVNDAILLYCGEDLESDFKKLRSKKMLLKYVLFSEECSDESYLSTFQKYLTSGTTYMQKIYTPLVLDQELIHDVKSVEEAFLLYMLNARSYKHGESGYVQYLKKAVTIFPEMNKGIKLLLQEIEEPANNAAKEMTDLRGELIQHIQTLLDTGEYASAKNILEEYEQICGADADSLTLKSQAMLH

SEQ ID NO: 1439 - protein, 371 aa, Paenibacillus peoriae
MTEHPMTISLCMIVKNEEQTLARCLDSVADLMDEIIIVDTGSTDQTKTIAARYTDRLYTFEWKDDFAAARNESFDKATCSYIMWLDADDVLLEPERERLRALKQRLSMDIDAVVMPLHLAEGEQGELLFTSRRIRLVKRERQYRWEGRLHEDLVIPQGQIVHSDVAVTHRRMQDHTLRNQRILARWISESGKLEGRLLYLHANECFDRKEYAEAAEAFNHLLEEPSGYREERITACARSAECYLHLGKPEQQLDSLLRSFRYGVPQSDLCCMIGDWFFTRNEWSTAAYWYEKALEQQHHLPGMRPVPLPCYSWLPHVRLSHCYAHAGKLDASYEHNQTALRYLPDDPHLLDNERKLREAISNSSPSARSSK

SEQ ID NO: 1440 - protein, 257 aa, Campylobacter sp.
MNLKQISVIVIVKNAEQTLLECLNSLKNFDEIILLNNESSDNTLKIANEFKKDFANLRIYHSVFIGFGALKNLALSYAKNDWILSIDADEVFENECINELKNLEFKKEDIIALSRKNLYKGEWIKACGWWPDYVLRIFNKNFTCFNDNLVHESLILSNNAKKIHLKNGLKHYACNGIESMIYKMNLYTSFSAKEKLKQGKKASIFGAISRFWLTFIKDYFFRGGVKYGYKGFIVALLNANGAFFRYMKLYELNHEKN

SEQ ID NO: 1441 - protein, 253 aa, Winogradskyella wandonensis
MIKLSGVIITYNEQRNIRQCLESLTSIVDEIVVLDSFSTDNTKAICTEFGVKFYEQKFLGYVEQKNAALKLASYDYIISLDGDESLSPELQKSIKELKSNWVHDGYYCNRFNNFCGQWIKYSDWYPNKKLRVFDRRKAKWIGINPHDKISLIDNTKAGKLKGDILHKTYQSYSEFNLKTEQFSTLAAQAYFEEGKTANIFKIVFNPTWAFFKAYVLRLGFLDGLNGFIICVQTANITFLKYTKLYELQKKSKV

SEQ ID NO: 1442 - protein, 626 aa, Anaerotruncus sp.
MKARVKAREGQLCLSIGMIVKNEEAILEECLQALEPLRRAVPSELIIADTGSTDRTMEIAEKYADTLFQIPWSGDFGAARNETLDRAQGEWFFYIDADEVLDADCEALIHLLQSEEAKKYQTISMIRYEYADSTRKEFTTTYYMRIHRRIPGNRFARKIHETLIAYSPIVQLPTLVHHSGYQKEVFREKQLRNRPLLEQEPGPMTPRRLRELSDTYAFDIPWEADRKKELLYQAIEMESQDKSLGMYPSVYTSLANLCLALKEYAEAERIAKQYLNGRAGKPPLMSDMEINYILGLSLHNQDAFSRAVAPLKQYQALYEQYHAGKLCTEDAGSVTLASAGKGEWMLTNFLLAFGYAKLGEYQTARAYLDRTDRKLLLPTHWKLSAAVDVIYAAESGDVSRLWETCHWLQQLPSREPLVESLQLFAQNAGQLAPAFDRYFEEFPAPPKDPGVCRAQLQLISTLWDVSDKNLLEELFPLVCRYIRWDAQFCRLLLRREVCTPENRYLLPGEYAFMLDAEQALALYDRQDREGYFCALQALLKQYPERSREISVLLSPIDESREQERKNREEFESLAQAVKTAFYNALQDGKQEEAQEILSRYQQLNGDDPELAMMRIMMVQPQGGALS

SEQ ID NO: 1443 - protein, 576 aa, Unknown
  Description of Unknown: bacterium HR19 sequence
MAKSSKGNTISVCIIARNEEKNIPNVLSSAKKFADEIVVVDTGSTDRTPEIAREFGAKVYFFQWCDDFSAARNESLKHATCDWIMWLDADDVIDDFNIEKIIELKKNLPPTKDSAYYFLIESKIIESKDSSSRNDAWYWYQLRLFPRHEEIKFEGRIHEQVIFSIEKLKIKQKYTTIKITHTGYHDPEKLQQKMQRNIRLLEEEEKSNPSFWIKRYLAFSYAKLGRIEDALRKLDEALSLIPQNAYMWLYDLHMLGVDIRRFIGDWDKVLYHLGEAEKVRPDEGALNLAKSEVFFVKGEFEKALDELEKARKKGFLVSLIPISPDSLKRKYFMGKARVLYHLKRYDESLRNFEQLVNMSPEYIIEVPQALDEFVDCAGKCEKWELIYETLKKIEDKLEPHHISNLAFASERLGKIEDAKNYYEKAYSMMKDENPDILFNYAHFEFMYGNDLSKTIDLFKRYLEVIQPTKENSVYILTALTALANIFLKLGEVKFSVELLSTACEIAGVKVVADSFSDLSYAWVRISEKFSNKFLKTVALQNATLLLNLSPEKETDKEVYDKIVAEIEKITSQVISQ

SEQ ID NO: 1444 - protein, 608 aa, Unknown
  Description of Unknown: Flavobacterium psychrophilum sequence
MGEKIRISALAIVFNEEHNIRQYLDNMSFADEIIVVDSFSTDNTPSIIKEEYPQVKFYQRVFDDFSSQRNYTLEFATNDWVVFFDADERVTQRGIDEIIATVNGNPEEVAFWFKRIFYYKGRPMVNNSFNKDRAIRLFRKSKCKYSEKLVHETLSINGKSGHLTESIHHYSFKSKEDFLEKRLQYSKLKAKELYQKGVTTNLYHLSVRPAFRFFKYYILGLGFLNGRRGMEIAGILGYHVYMRYVYLREMANHKDDPKILVIQQKMIGDVLASSIICANLKALYPESTLDYLIYPFTQPVVENNPTIDNLVLFDQKYRDNKWKFMQFVFGIRKKRYDIVVDAYGILGSNIIVGFSKAKTRIGFYKSYSSFVYTHTVQELKIPLSNAGLALDNRMQLVRVLEPSLPLINRPKIYLTQEEIDFGRRFLDEKGVAQGTKIYMISVLGSLNIKTYPAAYMAQLLDFISQNSEAVLIFNYIPSQQKEAEELYSLCSDATKQRIRMDISPGTIREFLSVLHHCNALIGNEGGAVNMAKALFMPTFTIFSTWIKKEAWNSFEDGTTTISVHLKDFKPELYGQSSPKEMKPKALELYDAFTPDLILPELKKYIEIN

SEQ ID NO: 1445 - protein, 342 aa, Unknown
  Description of Unknown: Lachnospiraceae bacterium 28-4 sequence
MITVSLCMIVKDEEETLGRCLSCLSDLVDEIIIVDTGSTDRTKEIAAEYTGKIYDFQWVDDFSAARNFAFSKASGDYIYSADADEILDEENRERFRVLKANMLPEVEIVQMYYTNQLKFRTVYNYDKEYRPKLFKRLRNFTWIDPVHETVRTAPVVFDSDIEIIHEQTENHAKRDLEALHRAAVRDGVLSQRLFDMYARELYLAGDEEDLNNAEGFFENICNGGTGSSEELKTALCIMVRIERKLGNIPKFFKYAAKAIAVGGVSELCLELGDHYMELEDYEEASIWFYNAAYETESIFDAGSRGGKALRRMAECCRKLGAPEKAEHYEKSAEEWEDKAAMA

SEQ ID NO: 1446 - protein, 355 aa, Ruminiclostridium hungatei
MIVKNEEETLARCLDTVKDIADEINIVDTGSTDKTKEIARQYTDRIFDFPWTNSFADARNESYKYATKDYILYLDADDVILEADQIKFKQLKETLDPSVDSVSMYYDAGTDEFGNVTLRYRNNRLVKRDKNFRWYGDCHNYIDVRGKTINSEISVTHKKIRHSVGRTVSIFEGKKARGDTFSPRDYFYFGNELRENGRYQEAIDNYNKNLELREGWAEDKIFACLYRGDCYRALGDKDNELTSLFQSFNYSAPRGEACSRIGYNFQKRREYKTAIFWYDLATKLVPDPDRWSFVYMAYYTWYPHLQLCVCYYNAGDYQKAFEHNEEAARYRPTDQSVAYNRRLFERIYPQKKDTE

SEQ ID NO: 1447 - protein, 365 aa, Paenibacillus antibioticophila
MITISLCMIVKNEEEVLARCLDSAKDIVDEINIIDTGSTDRTIEIAKQYTDRVFHFPWTGSFSEARNHAFTYATKEYILYLDADDVILEGDRQAFLELKETLDPAVDSVSMFYNAGMDEFGNVTLRYRRNRLVKTAKNFQWRGEVHNYLEVSGYVINSDVAITHKKTEHKVGRNLKIYETKIARGDTFSARDYFYYGNELRENGHYEKAIESYEENLKLREGWVEDKINACINMADCYRFLGNMQQEFASLCRSFDYSKPRAEVASRLGYYFYRKNDYHTAIFWYDLATKLPADTNQWSFSFPAYWTWYPHLHMSVCYYRLGLFKESYLHNEEARKYRPDDKSIVHNKKLLEEKLNITDEQEQLL

SEQ ID NO: 1448 - protein, 703 aa, Clostridium botulinum
MKLSIAMIVKNEEKNLERTLIPLKKLQDYIDAEIIIVDTGSTDNSVDIAKKYTDKIYFHKWNSDFGSMRNLSIRYCTGDWILIVDADEELYDIEELANLINSKILKKYYSAFIKIVDFSQSIQNSVSSGAISPLLRLFKKNTVKYEGIIHEQPICSEPTLDSQIRFIHYGYDNNNYELMEHKFQRNIKLLFKELDEKPNSIYVYFQIATSYLMHKDLQKALKYIEIAYKKASKKGLCNYIYVIDKYCLILYTLKSYDTLIYKAKEGIKYCDKFIDFYFYLGEAYNNLNQYDKAIQPYEMYLDLYKNRNKNDILAEFSISIFTIEYKNAVIYHLGLCYYQNKFYEKALSLILTIDDNNFMHDKITIICKIIEDGGLWNKFYILNNFIDIHNYDEILIFLHNNVFMENLIMINSQEIDGFLKEMLDIVIYFKNNGNINYKHLEKIKRIISRNKKLYSIYVYYVLKFDINEFDFFINYGKKELKNILSKLIFTYYDFGSYLENKLNNFKEYNTISVIKHNIIMEALLNSRKLQIDKRRILFLDFLADKFYSIVKLYKFEYICDNKWILPPKERFIIELKEAISYKYIDSIRYIKKIKDILNIDKSYVDYIKLLIEENEEFISNNKIKAFMPELVKNIEELINTKKYQEAYNTIEEALSLVKFDFDLMVLKYKLLVNFNYEKEAMQCLREIILYGDIERVTKLINNL

SEQ ID NO: 1449 - protein, 357 aa, Unknown
  Description of Unknown: Chryseobacterium caeni sequence
MKISLCLIVKNEEEVLARCLESARDFADEIIIVDTGSTDKTKEIAKRFTDKIYDFEWVNDFSAARNFAFSKATMDYQMWLDADDIVPEKSVQEINELKKTLNNDVEIVTMKYVLSFDQNNKPAFYSTRERLFKRSRNYEWIDPVHECIPLIGQLQYTDIEIWHKKTKLEALSTRNIDIYRNLENSGKEFSPRQLYYYARELRDHGRLQEAIGYYEKFLATELGWFEDIISSSYDLAVCYKNIGQRNKILPTLLKSFEYDIPRASICCELGYYYKDEGNYDLAFRWFDLATRLAHSTSVGFIHDDHTGYIPNIEACVCLCFLGDYQKADEYNERASLSRPDCSSVKQNREYLKTMLGH

SEQ ID NO: 1450 - protein, 662 aa, Unknown
  Description of Unknown: Peptococcaceae bacterium BRH_c23 sequence
MAVKVSLCMIVKNEGQILRRCLNSVSGLVHEIIIVDTGSTDSTCEIARQYGAIIHHFLWNDNFSDARNASLALAQGDWILFLDADEEISPESREILSRLVENETVEGYFVKIMNHLGKEGWIETVPDLVFRLFRNKKEYRFRGAIHEQIADVILEKNPQARYQVAEGLILIHHGYLDEVIREKDKKLRNLTLIEKELAQNPTNRLLQYHYGVELFRAERYAEAAAVLIKSANDLDPNTIYLPKLLRYIVMAQHSSGQLQEALHSATLGLKFFPNYADLYYYTGLILLDLKHYSQARNAFLQALSMPEQPPQYASFAGIRGFRSYYYLAQISESFMDEEEALKYYLYSLRDNPNFTHALESLVGILKPTKEPEYTMECLEKVCDFCTPAANRLMGDIYFRHGAYGLALKYLDQAEDGFPVSADIKLRKAICLIQERRFFEALRLLEDFPPESPEYPIATVNRLFYFWIQDKSQKVRTLWNELHAFGLAQDTENVISLFLAYSGKNAASPQIILGPEGMLLLLDIVQRLIAMREFNRAMYFLHSLHPNCLIEYYLKIAQLFIAYSEESRAILFLQTLIRTNPSAEAHFQLAEIYSQLGQLTEAENHYKHAVDIDPETPRYYIRLINLYTAWRRNILNEALAKYPENYVFKKLSEEVSSSHERAD

SEQ ID NO: 1451 - protein, 379 aa, Planctomyces sp.
MIVRDEETNLAGCLSCVVDLFDEIVVVDTGSVDRTREIAREFGARIYEVPWTDDFSVARNAAIDFAAGDYIFWLDADDRLDECCRRRLRSLFDGLVDTDEAYVASVRSNIPGAPTGFVVDQVRLFPRNDAVRWSGKIHEQILPALERVGVGVRWTDVIITHTGYSDPEVDKRKSERKVSLLLEELQETPDDPFTLLNLGRASIDGRLLDDALGYLDAGLASSKPDMPIRRNLYIAKALAHQLAGSLDDASAACREGLSSFPDDGELIFRDSCIKKLAGDLDGAEAGWRRLLRLERPRLFLCSVDGVYGHLPLRNLALLAEERGRLREAFRLWAEVLRECPRDRQAVEARLRVASRAFGTWKTRLVGMLKFKPSPPRIGL

SEQ ID NO: 1452 - protein, 697 aa, Unknown
  Description of Unknown: Clostridium sequence
MKGRMIMLLSIGMMVKNEEKYLDKCLASLIPILDNLDSELIIVDTGSTDKTVEIAKKYTDKVYFHEWNNNFSEMRNITLEYCSGEWFFCVDGDEVVENCDEIISFFKQKIYKDYKSASIYVKNLSSLDDEKDFSIFPSLRLFKKDKDFKYVNAIHNQPLYKEPIKVLATILKHYGYISTDEELMERKFKRTATMLKSELEKDPENIYFLYQLSVSYGMHKQYDKAVEYIQKAYDKYIYKKEDINKYIYLYPQLCLCYISINDYLNVKKYANECLKYKELIDIYYYLGMATMLLKDNEEADLSFKSYLKLYEDYYVSEKDVSIIDYTIGKVDEVYYCLYKLSREAGEYERAGNYLLKIEDVHQYDICGNIVDLYIETNEYHYLKEYEQRLLAEDDNNTVIKKFYSELEIKKLKLKNEEVGMLTELFVDGNTTYNYLNKIRLDYMKEKYIDIDLIHALLKKIDLQNQPFYFADLIYYLMINGFDISNEIIEFNFMKINEYFEYLKTKYNDFDEIIYKYILKFKENDEFIHVRINKELCRYIILLDKLEESKLIEIYKIYINIGVEYINYVYSKFMLENERWQEVRTEEEMFFVYMNKAKFYKNIDKKIYIKYLRKALSVYPYMNDLIRYLLDEEKRTIQKNDIELSEYKSKIKDEIKMFISNKAFENAELLIKEYEKIINNDLEILLFKSQVTSGKLKR

SEQ ID NO: 1453 - protein, 371 aa, Halobacillus salinus
MVTISLCMIVKNEEEVLARCLDSVKDLVDEINIVDTGSEDRTVEIAKGYTDRVFFFEWTGRFADARNEAFKYATKDYTLYLDADDVILEEDRKKFKELKENLDPSVDSVSMYYNAGTDEFGNVTLQYRRNRLVKTSKNFQWGGDVHNYLNVYGYVINSDVAITHKKTRHAVGRNLSIYDTKIERGDVFSPRDYFYYGNELRENGHHEKAVESYTKNIEHKEGWIEDKVYACINRADCYRFIENTEMELASLFESLRFSKTPRPEMCSRVGYNFQRKGEYKPAIYWYELATKIENDPNKWSFTYPAYSTWYPHLQLCVCYYRIAEFEKAYEHNEKAREYRPQDERVLYNRELLEKKLGLSQETGQQNDEPSE

SEQ ID NO: 1454 - protein, 554 aa, Ruminiclostridium cellobioparum
MKVKITACSIVKNEEKNIGRSIESYKSTVDEIIIVDTGSTDNTVEICEKYGAKVLHFKWNDNFSDAKNLAIEHATGDWIIFLDADEWFVPALKRSNVMNIVRQAGHVAEGFIFTMKQIDHSKKEECFVTDGVTRIFRNLPDIRYKGSIHERIKRGDRELILARCPDLFIYHSGYSSELLEQKAKRNLDLLNNVYKNGEKDTILYYFLLRENYSSHNYKDALKFVELFQQQDDVEHIIKNYSSAICFYEYAYGVMKNVPDEVTREEIMNLLNKAYEKYPEVPTHSYLLGREAMDNNLDEEAKTWLGKALELNKNYTGTFSNSFPSYISDTYFRLGLINQLKGKQEAALEYYVYSLKYAVVKKYAPIIQNTLSIIGKENEKEIIVFLNSILDIGKKEVLEEILSVLRNTRLYKAFLYYAVKYNREFDGQNENTYIAMILTGQAELAVDTAIKGSLNYKPDYNKGDQIYNGCSDSPEKYNWHLDYALMGILYCRDMELFEKYQLFFDDTTKEIIVAYISGNKITNLTNEILELHNKIFLLIFNIIPEKELAAFRGII

SEQ ID NO: 1455 - protein, 2439 aa, Unknown
  Description of Unknown: Desulfobacteraceae bacterium 4484_190.1 sequence
MNKMSGLIIIPKIYTKSYISIGRYLSLFNLIRDEYGFRIIFEDDYDPANITEDIVIVLKSPNKHYPYLMKSIRELPKGKKLITYVTDLHEQPELQKSFKYTEFHISMKKMFERSDKILCPYDYAFNTLWPEFVEKYEFFPHFLPDYEYFKNVQTNRTPIIKCLVSGAISVFPDYYPLRKYIASRNNDNITILKHPGYFRQDEEMLKSGGKIGIEYYNEINKYYCALATSSTLHYVVAKYLEIPATGSLLMANYTYDLDKMGIKKNEHYVEISKDNFFDVLDEVLSNTAKYDKIRENAKTYIFKHFNIRNRFDQFKKILEEMSMELWSRKSINNKTISCNTNQTDKKATRIKQDRNCPSEQDITKNDPMVSVIVPTYNRPDMLPDTINSILDQTYQKFEIIVVNDAGIDVENIVTSLNKYQNITYVKHAKNRGSAAARNTGIKLARGKYIAYIDDDDIFYPNHLEILVNCLTSSDYKVAYADAYRAIQVPKGDSYETVRKEIPYSVDFSRELLLCQNISPVQCLMHERSCLDVVGLFDETLITHNDWDMFIKLSRQYDFNHIKTVTSEYRTRQDGSSTTGRLLTDFLKTMKIIYRRYEGYVGGNLEIIKTQQKHIQDLEKAIKIKASGRLGSRKVSIIIPVFNQIKYTRQCLETLLANTPDDLYELIVVDNASTDGTKEFMKNLKTKVTTITNVENLGFAKACNQGARAASGKYLVFLNNDIIPLPGWLVEMLRVIESDEGIGVVGSKLLFPDGTIQHAGVVISSNGLPYHLYRGCPDKIEGANKQRDFQIVTAACMLIERKCYFDVGGFDERYINGCEDIDLCLKVRKINKRVVYTPRSVLIHFEGQSEGRQDEMNYNRRLLMGKWSKSIVQDDNYYLDQDGMKLIVEQDGSFKYVSLPNRSPIKTSIIIVCYNSLHDINKCIDSIINNTLLSYEIVVVDNVSLDGTQEYLRTLKNAKVIFNSYNKGFSTACNQGIREARGEFIVLLNPDTMVTKGWDAKLQSHFKEGVGAVGPVSNYVAGLQKYEIYKQEDLTGNIDINNLAEKLYQWNRGKVVETKLLIGFCMMIKKDIVDKIGMLDETLFLGSDDLEYSLRLRNNGYKLLVATDTFIYHKGQASFKTESSSKVERLTQESQDALYVKLEKMYGKGQVPSSMELWGMDWFKPNSRCKSDTKLTSIVILTHNQLEYTKKCIGSIFRYTDVPFELIVVDNASTDGTVEYLESKKRRAMADNRGQKTEKGGQKRDGGCQGIRIIRNKENRGFAAGNNQGIAAAAGAYIVLLNNDVVVTPGWLNRMIACVESFPEAGIVGPRTNFAPGRQCVENVPYDIETLEGLNVFSDRYAEQHSRSAERVLRVVGFCMLIKRCVIEKIGGLDDRYGLGNFEDDDFSLRATLCGFQSWIVNDCFVHHFGNRTFVGEGIDYRKTLRKNWELFKEKWDMPRDLPYGAYNLSQIGRSVFDVEKDYIPLKGETRREGGENESFEILPVTSAKGGVEVDQEENESHGVVSIIINLSHHRELAENCIDSIKKHTGLSHEMIFIDTDTAEPVPACVRRIVEENPDCHLMQAENNRGLAGFYNSVLAEACSGRHVVFMHSDLIVSQGWLEGMVECIESHEDSGVVGPMMNEAEGVQKDVLSDYADAEQFEAYSKSFRKRNRHRYVPVKSVSGCCFACRRTLLEKIGGFDEELGSEKGIVDDLCMRAAILGYRNRIASDVVIHHCNSTREEDRDIRSAMTVEDRKILLLKQSNMAKKDALRKRMLVCSAMEKADELWQKDDISGACDALVEVIRQVPDDQTPFYALAEMLMDAKRFMDAREVLDMMPSDGDEIRKLVLFGYCDEGTGRYDDAESCADRVLMIDPEFPEALNLKGMIAYRKGDAGTAEQFFRRAIHKAPHWGEPFGNIGFMKWAAGKKTEGLEYFEKAFVLTPAATDIFSNYHAAVKSVNAYERAESVFREACALYPNNRRIKYLFIDVLIQRKNYADAMEEIEDAIARFDMDEEMISAALEIRNRLDPSCPSELTGRMPGISLCMIVKNEAGQIGRCLRNTKPIVDEIIVVDTGSTDRTKDIATIFGAKVFDFEWGNDFSEARNFAISRASGKWIFVMDADEIISPQDYGILRQVVIDDTSSSEAYSFVTRNYNIRTDIIGLNYNDGSYALEEAGVGWVPSEKVRLFRNDPRIRFEYPVHEMVEPSLKRSGIRIKRCPVPVHHYGQLNEKRRAGKGEAYYRIGRRKLDETGDGDVMAIYELAVQAGMLEKWDEAIELWQMLIAINPKVPLAYVNMATAFQKIGDYENAIRTVSKAMTLDPRMKEAPNDYGLYQLYAGNIKEAVRVLEDTVNRFPGYLSAQFKLAVAYCCDGRKDKAMEVFRDLERTEMGAGLPVSCSTIAKKFLSLKQFENANAVLTAASELRSGDSEMALPRQSGDGGEGVLRVGGPAVPEALSASG

SEQ ID NO: 1456 - protein, 509 aa, Komagataella phaffii
MIMQLGLTSLAFLALKCDAYNIAPKIDTPNVEPFAPSGGLKLLAIVAIIWYVVVLLVAYYGFFEIMQKFSKRKTLPVPPQVEGVTILRPIKGIDPEMELCLQSAFDQDYPKFEIIICVESENDPGIGVAEALIRKYPHVDARILKGDSHNPDHFGPNPKVNNLAKGYSAGKYDIMWILDSNVWVCSGALSRSVDALNRSLDNGRSTFDFQTGKGRKVNLVHHVPMAISINPQTGTNLDEMFLFTSHSKFYISINKAALAPCVNGKSNLYRRSELDLAVKRLGKGSEPSLDGTTGILAKDAAYYGSKPGQGLRFFARYIGEDNMIATALWFQNGGRTGLTGDAAIQPLGGVNSTSLKNYLLRRIRWLRVRKHMVLEATLLEPTTECLLCGTFGTFAISTLFLQSYFNWKFFIFHLLVWMVTDYTQFHILLTNASQDTATCNVPYFAEPNFNAYGSPFESSNLRTFHRWVLYWLLREVLALPIWISAMLGTRIIWRNRPFRINVDLSAEEL

SEQ ID NO: 1457 - protein, 381 aa, Halobacillus massiliensis
MVTISLCMMVKNEEEVLARCLDTVKDLVDEINIVDTGSTDRTVEIAKEYTDRVFFFEWTGKFTDGRNESFKYATKDYILYLDADDVILEEDREKFKKLKETLDPSVDSVSMFYNAGTDEFGNVTLQYRRNRLVKTSKNFKWGGDAHNYLNVYGNIINSDVAITHKKIKHSVGRNLEIYKKKIENGDVFSARDWFYYGNELRENGHHEEAIKSYTKNIAMSDGWVEDKVYACINRADCYRFTNNLEKELESLYESFKFSKTPRAETCSRIGYNFQRKRDFQSAIYWYELATTLKSDPNRWSFQYPAYSTWYPHLQLCVCYYNLQDFENSYYHNEKAREYRPQDERVLLNKDLLEKKLNIKPAEESKKQESEEEQSSASKEDV

SEQ ID NO: 1458 - protein, 359 aa, Clostridium tunisiense
MITLSLCLIVKNEEKVLKNCLQSVYDIVNEIIIVDTGSIDGTINIAKEFTDKIYNFKWIDDFSAARNYSFSKATSDYIFWLDADDILKEEDRMKLKLLKENLDFSCDAVSMIYNYAFNEVGKPTLTFRRNRIVKREKSFRWIGFIHEYIAVEGKIFESDISVSHMRTHSSSDRNINIFRNKIKEGYILNSRDTYYYGKELYYNNLYDDAVDVLNKVINMDGWYEEKIQALICIADIYLYRKLYGKSREVCYKTFEFDTPRAEVLYRMALSYQEEERYLQAISWYEVITHIEKPKSDYGFIYDEYWTWLPHLQLCVCYYKVNQIEKSFKHNELAYKFNPFNKSILDNFEFFKSLGISSNL

SEQ ID NO: 1459 - protein, 488 aa, Clostridium sp.
MKSLSVCMIVKNEEKNIKRCLDSIESIANEIIIVDTGSNDETLNICSNYNAKVINHKWNNDFSEARNVSLEYATKDYILFLDADEKISKENLEKLKALLSSKKLAEGYFFRLTNIINGTEVGEYVVFRFFKNKRKYRFRGKVHEQIANCIQKHNKDKCIENIDIKIYHYGYDPNKVNIESKYKRNMGILNTYTEEEKDAYYFYVLGNEYARITDFKSAIESYEKSLDLMELKYNYVFYPYLILNIVKAYSNEKQFYESIKFIEKIRFSIPNFKDLYFMECLAYIECGKISKALECLNEYINCPVGNTYEYPHNNFEKIYDIKEMKKNLEQASTPNNNLLSALMIIDKYETSIINTIKSFNEIVSNFTIVTSNKCLEVTELKNIGAKIIYYDDKDLNLLIEKCKSKYIFMVDIGEICSTLSQKKIIELLSNTNEKFFTVNIVNIANNTNCKEVRIIKNENSNFINEYKYALIKNKNVVDSNIYIHKSFN

SEQ ID NO: 1460 - protein, 379 aa, Thermosynechococcus elongatus
MAPLLSLCMIVKNEAHQLRRCLQSVQPWVDEIIIVDTGSTDGTIAIACEFTPHVHAVAWQGDFAAARNAALAQATGEWVFYIDADEELVVTDAHWQDQLTAPGAHAINQWSLLRREQSSDRNWSEFWNVRFGRRFPDLHFAGALHEQLCYREREAVVGELQGVYLIHHNQQSQEQFLAKIRDRNIPILETMVQQGDRRLQNLVCLGDHYAACGDSDRSQAWYEQALEEIASAVEQGILPRETTWLRHLLFWVSYRAFEAKDYETAQYYLSYGLRFFDRYPPLLYVAGLFVFELGLPRGALPYFHRCLDLFEAGSYDRTEPFDRQWMTTQPAYSLGYTYMTLQERDRAIAYFQKTLKFNPDYPPAQMYLEQLLRASANQG

SEQ ID NO: 1461 - protein, 278 aa, Gramella sp.
MISIIILTLNEEQDLPICLDALGWCDDIHLLDSGSTDNTLAIAESYSLTLHYNAFSSFGQQRNHALDAIATKYDWILFLDADEVVTPAFVTAIKTQTAAADEAVAGFYCCWKMMLNGRWLKHCDNFPKWQFRLLRRGRVRFTDFGHGQKEGEIDGVLEYIKEPYLHFSFSKGWTEWFARHNKYSSQEAKSRLESNAPFKDIFASNTSQRNPALKAWLVKIPGWPFLRFLQAYFLNLGFLEGKHGYTYCVNMAFYEHLIKIKMKEIKYQSITKEKQTLL

SEQ ID NO: 1462 - protein, 351 aa, Clostridium diolis
MLSLCMIVKNEEENIKNCLSKVDNFIDEIIIVDTGSTDNTKAIVSKFTDKVYEFRWCNDFSKARNFSISKSSNDWILILDADEFITDFSRDKLHEFINDSLNQNKVGRIQRVNIMEDSSGNKKYVERVNRLFNKRYFHYEGIIHEQIVALDGKTYETGDVNITADHVGYTKEVLNRTDKLKRNIYLLKEAIKDKFDDPYLYFQLGKSYYMLKDYRTSIFYFEKALCFKLDFKLEYVEDLVETYGYALINSGRYADALVLENCFEVYSRFADFHFLMGLIYMNNAKFTQAVESFIECTKFKYSKVEGITTYSSYYNIGVIYEVLGFMEKAIEYYRMCDDYEQARNRLRGLLN

SEQ ID NO: 1463 - protein, 582 aa, Sporomusa malonica
MTGLISIAMIVKNEENMLRACLDSVKAVVDEIVIVDTGSVDKTVEIAKSYTDKVYSYSWQGDFSAARNFAIDQCSCEWILYLDADERLAVRPESLRELITSTTKEAFIVPLKNYCGPGCSDYNVIGVLRLFRNLPHYRFIGKIHEQIGIANQEVVGHSDFPVISHSYINTGRRQDKRRRNMSMLAEQLKHEPENEAFIKYYLGCEWLGLGRYLQAYACFRCAYEQLDESHIFFRSSAVRSLVACLRGMGRFEEALAICMKETAVYPEYTDLFFDGGVVLEQLGEYEIALRWFKAAVDLGAPLIVYQHSNGTEDFLSQYHLGHCCQILGKYEEAAEWYEKALEANKNYMYPLYGLFMVLVTKKSCEELLITFTERGYVSSYESRLALAALFFASSRPDLAVKVCSQAESQIIPSSDLAKYLLYSGHFKQALKMIEALQTRQDLNDAVLMKLEIICYIFLRELGAAKAKCLTMWRYGPLRADAMALLALVKRLGGSRLAISKKYEPVLVDSLLRIMADCVRSYGENSSIFIQVAKCCEEIMSDLEQGSKALLDFWQSEIKGIEMLLDVRYKSMRGLYVWQKAGR

SEQ ID NO: 1464 - protein, 364 aa, Unknown
  Description of Unknown: Lachnospiraceae bacterium MD335 sequence
MKFSLCMIVKNEASILRDCLDSLQDIMDEIIIVDTGSTDETKKVAESYTPYVYDYEWHDDFSAARNFAFSKATGDYIYSADADEVLDEENRTKLKALKRVILPEVEIVQMIYVTEQINHPTENFARDMRPKLFKRLRQFTWIEPIHETINTSPVVYDSDIEIIHRPQGSHSSRDFGVFERVIEEKSFLSDRLLGMYLRELYKAGTEKDLENARAFLEKSLTEKREKRNELLCRQIIAVLLKIYRQADDPVSMLKVSLSSEATVPSAEMCMELGYFFMKKGDFGEAAEWFSRAAFHCESEIDIASSGTSALMALAVSYRGLAKSPKLRALPQKEFEREHTRLTEKAAEYELMARSWKPAELELNT

SEQ ID NO: 1465 - protein, 666 aa, Phormidesmis priestleyi
MADPLISAIICTHNREQYLGAAIDSLLNQTLSGQTLSGQMPDAQTSDAQTSDAQMPAGYEVIVVDNASTDSTAQIARAHLAKFSDSSQSTYIQATYIYEPTLGLSVARNTGAAAAKGQILAYLDDDAEASTEWLTELVKIFEGNEKVAIAGGKVTLIWPPNTQPPSWLSKDLSSALGAYDLGDMPVSIQQPALTPRGLNYAVRKHFLQSVGGFDTHLGRVGTNLLSNEEQQMTRMALDRGWQVMYVPTALAAHNVSPARMKPGWFLRRSWWQGISESYREQASSTTGLWQLRSGGERLVRGVYKTIKYCHRPDQRFENLAYAYGQIAYLGSVIGSLTGASTQCPTPPSSPMTITPGSIPISVLIPAKNEEENLPACLASLVQADEVFVVDSQSEDQSVAIAESLGAKVVQFEFNGRWPKKKNWSLDTLPFRNEWVLIVDCDERITPESWAEIAERIKNPDLDGYYINRRVFFLGKWIRHGGKYPDWNLRLFRHAKGRYENLNTEDIRNTGDNEVHEHVMIPHEKVGYLKEDMLHEDFRDLYHWLARHNRYSNWEARVYYNLLTGMGDDGTIGANLFGDAVQRKRFLKKIWVRLPFKPFLRFVLFYILRLGFLDGYAGYVYGRLLSQYEYQIGVKLYELKFGGRLNIQSKPPESLPTQARPAEANLS

SEQ ID NO: 1466 - protein, 644 aa, Paenibacillus barengoltzii
MNNLISLCMIVKDEEKVISRCLDSVQGLVDEIIIIDTGSVDNTKTIARRYTKHVYDFKWGNDFSAARNESLRYATAKWILVLDADEYINSSDIEGLRNALRLTTTDKDSLKSFMLPIHNFTGRTVDPSRIMISQGARIFENHKGMYYSSPIHEQLTSDHYKITFQNLPYPVYHDGYTEIRVKGHNKSERNLSILESMKTEEKLQDPYFCFILGNAYISDNQLEKAGQLYRACLASSTPNHSWYIHLLDNLISTELKLENYVEAYQLIQQAIQQYPGISDYYCHLGLLYDQFGMFQQAIGYFEQALKCAETAVRQNRPYWNVQPSYGSTVPLQMLLKLHNQLGHKTDAVRYGVQLLQIQPRNYTVLQQVWELLIQAEQDNEAIIRLFQTVYPNASAIEYIALFLVALRTGSRSLSSYYYQKLTIQVSPSDALTYHLLQHEEKPFKLSIDMELDASPALIAAVVYNDPNYLSAITDTEGCESARELWTYHCDLQANPNSSPQLTDSASDLLAKTLLILLSYSYNDIYLHWLQSMATADTINKLADLMYEHGYYEPAIELYAILLDNGVLSPKSMINIGQWQLVGNNADDGYLFIDTAFDHEKDLSVIGWVFNYCSKKQYEQFLERYLDAFPHLIELPFLTQPTNKL

SEQ ID NO: 1467 - protein, 365 aa, Unknown
  Description of Unknown: Lachnospiraceae bacterium sequence
MEDVRFSLCMIVKNEEAVLKDCLDSLQALMDEIIIVDTGSTDRTKEIAAQYTDKIYDFQWCNDFSAARNFAFSKATGDYIYSADADEYIDAENRKKFQLLKQAILPEVEIVQMIYVTEQINHPTENFARDLRPKLFKRLRQFTWIEPIHETINTNPVVYDSEIEVRHRPQGDHSGRDFGVFSRIIEEKGTLSDRLLTMYLRELYKAGDEDTLVRARTFLEKMLEEAAARNKELLTRQIIAVLLKIYRLSDDAAAMLKTGLRSEITVPSAEVCMEFGYFFLKKEDYPEAAHWFYTAAFESESEIDIASSGTSPLMALALSYRRYAKSPHIRALPQEEYELEKLRLTQKAAEYEQMARDWKPQENGF

SEQ ID NO: 1468 - protein, 356 aa, Roseburia hominis
MATISLCMIVKNESAVLARCLDSIADLMDEIIIVDTGSTDNTKEIAAQYTSRIYDFKWTSDFSAARNFSFSKATMEYIYTADADEILDDANRERFLRLKDALLPEIEIVQMKYVTQGTFDTVLNAKKEYRPKLFRRLRTFTWIDPIHETVRLTPVTFDSDVEILHCPQSLHSKRDFSIFIKAFEHDGQFSPKIRTMYAKELLKTGDKKDFTDAKPIFQLIFDNDPADDARKEAACVLARIYRMEDNKNEFFKLTMKDMLTTPCAEICYELGTYFVGQRDYAEAVLWFYNAAYETESILDVHTSGDLPLLGLVECYETLLAGEEAKIPSDTALTIQYEMMLDKYREASRDWRMPEET

SEQ ID NO: 1469 - protein, 286 aa, Unknown
  Description of Unknown: Flavobacterium thermophilum sequence
MITISLCMIVKNEEDVLARCLDSVQHLVDEIVIVDTGSTDRTKEIARSYTARVIDFPWSDDFSAARNFSFSHATMDYIFWLDADDILPAEEQTKFLTLKRTLSSDIDSVTMIYSLAQDEYGKTISSVRRNRLVKRSSGFRWHGMVHEYLEVWGTILNSDITIIHQPNRCASDRNLQIYERQLAQGAEFSPRDLFYFANELFDHQQYERAIQYYEQFLQTKKGGWKIASPPAESWQTVFTHLVMKNRHCDMRSDRSNTIPLGLNAAAGWAITSFSASNIVLPPFGTI

SEQ ID NO: 1470 - protein, 605 aa, Paenibacillus sp.
MKYSIVLLVQHAELAEACIARIKQYTGGTYEIIAINDGGGDIVTRVLKRTQVHHLLTNHTRLGVAASYNLGAVIAKGERVVFIRDHIGVSEQWLFHLSDCLDNHPDAALVGPMSNDVSGMQRLPIPCETMMQLDRTARAMILTQSGCSQKVTRLLSHLLLMRKEVLEQLGGFDERFGLETYEDDDLCYRALQAGYSLYIAQDCFVRYTSPPSLFPEEPNWYSSQLTRNQAIAQEKWGIDVTEALMKWTYPVTVSLCMIVKNEEQTLDRCLSSVKGLVDEIIIVDTGSEDRTKEIASSYTDQLYDFTWVQDFAKARNYAFSQATQDYILWLDADDVVQPHDAEKLQRLLSAVQWDTDAVSMNYNIAFNENGQVTVSSRRNRLVKREKGFQWIGPVHEYLNVYGNIVASDISITHDRMHKNLSRNLNIYETRLAAGEAFNARDLYYFANELADHEQWERAIGQYEQFLKHTDGWVEDKIRACGRMADSFHNLGNIQEAKSQALQSFIHGLPRAENCCRLGFYCLSEERYEEAAFWYKLAADTPKPDMTNAIIDHDCWTWLPHLQLCVCYDRLGKKELANQHNEMAMKFIPNNSQVLANKRYFETVLS

SEQ ID NO: 1471 - protein, 358 aa, Natronincola peptidivorans
MITISLCMIVKNEENVIARCLDSIENFVDEIIIVDTGSTDTTKEIAKGYTDKIFDFKWINDFSVARNYSYSKATMDYILWLDADDVILEEDRRKFKELKQTLDPTVDIVMMKYNVGLDQYNKPTLSYYRERLSRRINNYRWHEPVHEYLELNGKIVNSDICITHKNEGTSSYDRNLSIYEQIISRGKKLSVRGLYYYARELYYHQRYDDAIEYFTKFLDTEMGWVEDNIYACYHLSVCYEYKNDRTNMLNALLRSFKYDNPRAEICCQFGQYYMEASNYESAIVWYTLATQLKKPTDNWGFILHDYWGFIPSIQLCVCYARVGNMQKAIEYNDKAAELKPNDPYVVHNRRYFEACLAI

SEQ ID NO: 1472 - protein, 367 aa, Clostridium fimetarium
MISICIITKNEEKNLEQCLRPLAKLNYEIVVVDTGSTDNSVATAKKYTNQVYHFEWCDDFSAARNFSISKASGDIIVVIDSDEFIVEFDKETVEKIFEQNKRVIGRINIKEKFGAKGEFEAVDHINRVFSKRYYHYVGRIHEQVGAIVNDTNTVRQCNRCNAFNNSVVDYEIVNLPITVLHNGYGGEELRLRKAERNIDLLNKELEISEDTYILYQLGKSYYMISNYQKACEYFSKGLEYDINPELEYVIDMVETYGYSLINTKQYKTALQFENIYDQFGNTADFQFLMGLIYMNNEMFEKAIEEFEKAIRCKYSRVIGVNSYLAWYNIGVILECLEYKDDAIMYYKKCGSYEKALERLTFFDSKNK

SEQ ID NO: 1473 - protein, 649 aa, Unknown
  Description of Unknown: Desulfobacteraceae bacterium sequence
MSGRVRKAKRKRESSKSPLLSLCMMVKNEEEMLPRCLESIKGSVDEIIVVDTGSSDRTVEIAKSYGARIYHHAWENDFSKHRNQSISYATGDWILIMDADEEFYSEDVALLREVIQRSNADFIYLQCFDMEKTGKPHGVFNQVRLFRNGAGMHYTRCVHNQLQAVGRGFYSKLRFKHFGYDLDPLKMEAKHHRTTSLLLRRIEKDPGDPFNHFQLASSYSMHREYHKAIEQGEIALLLRKEKDLRNAYFSTVYYTVAQAHFALGMLQEAEGVCLEAIDFFAMDLNAYHLLAAIRFKAEDFQKCKDASLRYLDILQKFEEDPSEMRGVYFNSYGKKHEIYYGLAFINFAERQFDRAEEYFDLAFQLQGRSMEKALEISRFYLDGKMERKAFQWIEKACERGFRDIVVMESFIARCATRMGWIETRKILEQTTGAFSEWPEYWALVASLCREGNDPETAIRYYKKSIDLNPSEHKVFMKSSDCYERRVDLANAVETFEEYLNGSWRDERNLLRMAGLQLRRQDFKTAAQWLKQIEGHDLDGQQEYEKKMMDLTVNWGVGDFDEFLRRLEEMMQALNMATAVTIDSAVQLGRILYEMTEVFCEKGFWQTAELGLRLALLIAPDAFPAERLESLLSSLPRSCGSDRDFLQRSP

SEQ ID NO: 1474 - protein, 360 aa, Ruminiclostridium sp.
MVTISLCMIVKNEEETLARCLDTVKDIVDEINIVDTGSTDRTVEIAKQYTDRVFYYEWTNNFSAARNESFKYATKDYILYLDADDVVLEADQAKLKELKETLDPSVDSVSMYYDAGTDEFGNVTLRYRRNRLLKREKNFQWYGDCHNYINVQGKIINSDISITHKKIRHAVGRTVSVFEQKIARGDTFSPRDYFYYGNELRENGRHEEAIKNYDICTSMKEGWVEDKIFACIYRGDCYRALNDTNNELTSLFESFKYAPPRAEACCRIGYNFQRKRDYKTAAFWYEQASQQVPDPDRWSFIYNAYYTWYPHLQLCVCYYRMGDYKKSYEHNEEAAKYRPTDPSVLYNKKLFDKMFNNNES

SEQ ID NO: 1475 - protein, 637 aa, Ruminiclostridium hungatei
MLQLSLCMIVKNEEQVLERCLDSVKDIVDEIIIADTGSTDNTVNIASKYTGHIYDFEWTDSFSDARNFAQSKASGKWILVLDADEYVDGDNLKEVKGQLCETSESIDAFSTTIYNFAGYSGEHIVQHRSLRIYRNDPNIKYVRTIHEQLIREDKEFKSDKSELIIYHSGYMDNVVKGKNKNSRNVKLIQKQTDVAGQAAFDYFNMGNEFLSAREVEKALEAFQKAYMQKADIRFAWVPLTVVQMVLCLIDLKRYNEALKVIYDAELIWNNAPEFKCLKANAFLAQNRRYEAKAELQELIENKENYKHFIRSIDYLEFHPYMLLGDIYNKEGNVSQAVENYAHVLSVNSRSYEAFYKLVSVLSKYCSQEELLKFINDNNLADEKKRMRLIKILLEISQLELAAAFIGSLKGNPGILVGIILKYKMLKDGYESARDYLMGIPEEDIVRILGEGFIDRIDLGLLYLVKREQEVYSKITCAFDDKSMLLFLKKCKVNTDSNKDLYLKLLERSIRYKWFELFEKLLSEKIGDDAGIELGIGHMLNNHDFRELALEFYERVGDIKRLDEKAFENIVSTLKEEGQNENAVQFALKAIDMGYTNFSVFMNAIQLLGEMGRKEIQKEIQQIAIGHYPDSRLLKDLK

SEQ ID NO: 1476 - protein, 1060 aa, Lysinibacillus timonensis
MTKRLSICMIVKDEEKNLRRCLDSLKPLLETDFVELIVVDTGSKDKTVEIAKEYTNRIYYHQWNNNFSDMRNISISYAKGNWILILDADEKISNINNLILLLEQKNLNQYNTVQFQINNILSMNEDIINTTTSERMFKNDGDFCYFGSVHNQPNLKRPILRSDIHIIHYGYINDDKDLMEKKFQRTATLLKEELKEDPKNIYYRFQLSRSFLMHGDTYEAYEEIKHAYNLVKLEQANKLKMYYYVYVELARVSFIIKRYQETVKICKEALMIKPNYIDFYYYLGYAHFNLKEYDEGIIALKKYFSLIQNYQDSLDEITSVELYTVNTRSKNLTALRLSQHLYNEGFYSESLTYAKIIDDKDLQNELFIKNLLKQKEFEKVVKLYNEVIDNNKFYFINKVEEEKKSLGEEDKKLLEVKFSEIQDSYGKLNLIRATKENRKKLILDFMNTEDVMEFSEQIILEYINYLIESSYLNRFFKKIDSLTIKKIVKVLIDKEDKMDYFMNILHNDFRFNDYQNNRIYLAIANVIMLSKIENRESTSEHIGKIFLEYINRGINYIKYVYNINHIRINYNTIINKEEKFLVLMYLAYEYADKGDYRLFFKYVNEATNNYPYLSKLIPEVLKKVYIKKAQNFVDSGEFLQAVETYEDIININVSGKEECISTIKYLEKKYRAQILEQLSNASVNKKIKGNYLFENVHLMIDSPYSENFIRFVNKHYNNSHHKFILVTNDGKCKFIKKNDKNLQLFSFKDKNTIIEILKNSNKIFVHFLLDYFCELISLPEIEGDIYWSIWGSDLYSTIDYQLYGTNTNEFLLSNSIPHISESVSFSVIRRRAIRKLNVILTNLPYEFDLVNKNFLTVARHERFIYPTLISNLYKNDQYKEKSCKKNKDHYTFLIGNSGDPSNNHFEVFNLLKKFSHHSKFKLIVPLSYGEPKYIEKLIEKGKEMFGDNFIPLTDFLPEQSYIEVLNEVDVAIMNHYRQQALGNIIVLLSLGKKIYLNDKSPVFQMLNERDFNIFEINKLENIQFNDLVKYNFDYKHNREKIIKEHIDSNIIKFNLEILFK

SEQ ID NO: 1477 - protein, 367 aa, Brevibacillus porteri
MSPPLLSLCMIVKDEADQIEACLSSVHMVVDEIIVVDTGSTDGTQDICRKYGAKVLEIPWENSFAKARNAGLQVAKGEWILWLDADEIVQEEKTGVLRQAVSASKGDAFFMKMIHYTGSQKVQASYHSAFRSGQIRLFRNKKGFRFVRDIHEVLQWPTTVSRDLAVPLLPVHIHHLGYMEDAVQRKQKALRNLRLLRHERKQSKQDPWCDYHLANEFFRAKQLEHAFTLVNQAMKGFLTTKQPPPSICYKLKFDILFQHGSMRGAWPGIARAIQIYPNYVDLHFYKGVFLLEHGLYAEAIKAFEYCLEIGDNQWEHFSEQGMGSFYAFHFLGRCMERMGKAHESLVYDYTASSLHASHFAQKREVVL

SEQ ID NO: 1478 - protein, 276 aa, Geobacter pickeringii
MSSRSHKPGLSAVMIARNAERYLSMSLRSLQRVCQEIVLVDTGSDDATIAIAEQYRCRIFHYPWGNDFSAAKNYAIEQAEYSWLLSVDADEVLYDKGSATLLASVVAEDAWPACVVWIDNLRDSGRTESHQALRLFRNDSRIRFANPVHESIGESLLKHWPDTVPPALDLRLRHYGYLAANAAGKHHRNLELMERWVAGEPDNIYARYKLGMTLAEMGESDAAYRQLRATYELFARCGDRQTYPFLKTFVGVFGRMLERRESSEEALRVRAVMARW

SEQ ID NO: 1479 - protein, 650 aa, Paenibacillus polymyxa
MKRLSVCMIVKDEEVLLARCLDSIKSIADEIVIVDTGSTDRTKKVAQEYTHLIFDYKWSNDFAAARNESIRHATGKWILVMDADEYLSLDDYNEWNHFLDREIPVENLAYTLPIINFTGEKEFQDEITTSPVTRLFPNYKGIFFERPIHEQLTRGSSKELFHKKLELNIYHTGYQEQRVVEKNKHERNMSIFNEMKKHQNMSEYDWFTLGNQYRYAKNEVEATDCYERALKGTSSKVAWYPHCLIGLISLYYKQDRLHLSWKWTEDKLSLFEDYSEYYAIKGIHYETLGFFEQAISCYLKAISIAEERAANQKEFWLVDPMYSFETPVQQLISLYFRLNDNQQAIYWLSILLNKNNKHPRVLLRLIEWLCQNESENTIIEFLNQHFNVEKKSDITLIYKVSLALGQDQMASYYLSFLKDDDSLTNSDHIRIAVMKQNKESWEEACSAVKKVTEGDKQQLWIQTVLGSLIWSDIRFLNSNYFGEDEDIQSVNVLISQIIKGEQIDDSQMLIEYSGSLFLVAKQLFLIKNYELFDNFVQAVKSAELINMLANYFYGLNLIEMAMNYYSVLLVERQLDATSLENLAFYHLNHGHYDEAKEFLEELVELQPKARHLYYFLIRSAGQHEKKLYIDKFISEFPDFSSISFVREFIN

SEQ ID NO: 1480 - protein, 254 aa, Bacteriovorax sp.
MMISVIVITLNEERNIERCLQSLDGLVDEIVVVDSFSTDRTQEICESFEGVRFIKNAFEGHIQQKNFAISHASHDYILSLDADEAISNKLRDSILAIKDNLGDYDGYNFNRRNWYIDRWIYHCGWYPDRKLRIFHKDKAKWGGVNPHDIIEVSPNSRTKFLDGDLLHYTYFSIEEHIAQQDKFSTIAAKAYFDMGKKSTMFQVITRPVLVFIRDYILRAGFLDGARGFMVCYINGLYAFLKYAKLRELWLKHNL

SEQ ID NO: 1481 - protein, 529 aa, Bacillus sp.
MRWAGKRNGTACKGGERMEKLRKLISLCMIVRNEEQQLPRCLKSVQGIVDEIIIVDTGSSDRTIEVAEQFGAIVVRAEWEQDFAKARNVGLARAQGEWVLFLDADEMLDAATGSQLREEADHEASGLFLQIWNVVGSSDDERGGTVHPVLRLFRNDQHIRFEGRIHEQIAASILRRWPEAVFRLTDAKIFHYGYRHDIVLEKNKLQRNMELLERAVLEEPNNVFHRYNLGVEFLRAGMPEKALEAFRFVKKQEGFGQLSYAHLVLKYEVRSLLSLHRWAESVDAATKGTAQFADYPDMHHYRSLSLAQNGQLRQAVHAAEKALQLGAAPPQYHTEDGIGTYRTSYMLGRLKEAQLDTQGVIRAYIASLRQHSSLMPPLYRLCRYLRIAGEADRLAAILAAQLACHNEEAVLKVADVIAESGCEQAAIEWVNWHAAQHSDEQRRRLEAWFERIGGVGDEEKGQKTERGLLRDQGQEQEQEPVQTPIGTSGLFSEMCLRADWHLERLQRSNKAVTALRLLLPCEEGWGPRR

SEQ ID NO: 1482 - protein, 339 aa, Mobilisporobacter senegalensis
MITISVCMIVRNEEAILARCLDCIKGIADEIIIVDTGSTDQTKEIAKKYTDKIYDFKWIHDFAAARNFSFSKATKDYIYVADADEMIDKENIERFQGLKQVLLPEIEIVQMLYTNQLEFGTTYNYDSEYRPKLYKRIRTFQWVDQIHETVEINPVIYDSDIEIIHKPSENHAGRDFRTFLTLLEKGERLSKKLVNMYAKELFIAGSDKDFIEAKEFFLNVLEDDERTMDEKKDAQCVVCKCCRIQDDIHNLLKNSIKGIADKNPSSEICYELGEYFYEMKDYKEATIWFYNAAYEAGSSLNIHYGGDYPLKRLSDCYRKIGDEEQAKIYEELAKEWSVK

SEQ ID NO: 1483 - protein, 344 aa, Dickeya aquatica
MIIKNEARHLARTLASLMPYFDDIVIVDTGSDDGSQAIARQYTHSVHDFTWVNDFSAARNASLTYARHDWVLVVDADEEIESIDIEALYALIKQHPKAIGRVERINYIDDESGQSTIRECINRLFHKNLYHYTGIIHEQVTPRKNHTQIQSFTTPITLNHVGYKKEILQQTDKITRNITLLKQALETEPEDPYLLFQLGKSYYLKRDYTAAIQAFQHALRFETNFSYEYMEDLVETYGYALINQGSYAEAMNILDYESYFSSTDFTFLKALILMNNGQLQLAVNTFLLCTSSPPGNKEGVNSYKANYNIGVIFECAGMQSQALEFYQKCGDYPPARDGIKRVTH

SEQ ID NO: 1484 - protein, 363 aa, Anaeromassilibacillus senegalensis
MITVSLCMIVKNEEDVLARCLDSVRDVADEIVIVDTGSADRTREIARRYTQKVYDFTWVDDFSAARNFSFSKAEMDYCLWLDADDVLEEPARAAFLRLKQTLPPSVCAVMMRYDTMFDASGTPVFSYYRERLVRNGKGFTWTGAVHEVIQFEGEMRYADIAVAHRKTRPADPDRNLRIYEKQLAVGKTLEPRECFYYARELYDHRRFEEAARRLEAFLDGGEGWRENEIEACRQLAACYYHLENEQKAVASLFRSFLYDTPRAEVCCDLGKYFLDRQKYQQAAYWYELALGCSRRDCAGGFISVDCYGYIPLMQLCVCYDRMGDRERARQYNERAGQLKPNDAAYRYNQALFEKQQGEQCHAK

SEQ ID NO: 1485 - protein, 342 aa, Unknown
  Description of Unknown: bacterium 0.1xD8-82 sequence
MVTVSLCMIVKNEEKILARCLDSIGDLADEIIIVDTGSRDRTKEIAARYTDKIYDFQWIRDFAAARNFAFSKAACDYIYSADADEVLDESNREKFRALKENLVPEVEIVQMYYANQLSFGTVYNFDKELRPKLFKRLRTFCWIEPVHETVRLSPVVFDSDIEITHLPQGSHAGRDLEIFYQIAAEGKALSCRLKNMYAKELMISGTAENFQKAERYFTQIADSEDTEPEQMKEAVCVLVKAARIRGDYLKMYRYAMKDIASEGVSEVCFELGEYYFGQKEYQEAAIWYYNAAYETQSILNIHSGGDFPLMRLADCYEKMGMYEQAKGYRQQAREWSRSVKEM

SEQ ID NO: 1486 - protein, 721 aa, Paenibacillus sp.
MYWCRSVFSNIHVFPTAPALSAHQAPSMCSSMDKAHNPFFCHIGTWGSLWWTSCTFLYWRWLRLQNRLLGIHMIVQNEEQYLPRCLDSLKHAGTEWFITDTGSSDRTAEIARTYGATVLHARWEEDFAQARNISLPLANTDWILVLDADEYVTQGLEELLNDLPKVHKSISSMRITIENLVGEAAEEKVISHPVRLFRAHQGYRYTGRIHEQLVRSSPRKANRDADTDTDIIIMEPHSCEEDLHAETEPLAPLCLVHDGYLASTIAEGNKPRRNLKMIERELADDPAQPFHLYNLGVTYCQLGQLEPAMDAFHESLRRTDVLAPYRPTLVRDYAKVLVGAEQYNAAYVLLAVERQRYPSYADLHLLYGVTLEQQGLEERAYQAYARASDCQKELGNTGHTEYSTSTPGAPYVTEAGSDGYRAYTPMARLAQKRGFFQEAVHLYGLALDSLFTYGPAWTGLADVLQQSGETDKKIAQILLSRARGIEGLDLSECSGHSGHGNGRHGSDRSDYSTADDPNVMTTDEHLTHMVYVLAGCGAYEQALNLLDTDARRARIHAADRMYWMLCAGKVSDALQLAENDWADVCVEQHTNLPLEHRINWGLACWGNELRLSDSFLVAMPPQEKDVWKVMDRLLNKLSNQLGPREPASEEQQLLQWSPQAQMVTEKIVEQAVKTGQLTLAEQLHELRAMIMRDHRGAPRRFGVSLQVCCIVTGTPWQPPIS

SEQ ID NO: 1487 - protein, 349 aa, Sporomusa malonica
MKISLCMIVKNEEELLRKCLEQIIPHVSEFIIVDTGSTDKTKEIARQFTSQIYDFDWCNDFSKARNFSISKASNDWILVLDADELVIEFDQNISASLAQIGELTVGRIKRINSIEDKWGPAWNTEKISRLFNRRFFHYEGMIHEQIVDKNGCNSYETISVGITVDHVGYAKEVVNKKDKLTRNITMLLQAIAEAPHDPYLHYQLGKSYYMAKDYQQAYDSFQTALSLPLNYAYEYVQDLVESFGYTLINIEKYSLALNIEQYSKHYQNSPDFNFLMGLIYMNNALFSKAVESFLNCTGMKEGKMKGVNSYLANYNIAVIYEILGYKKEATAYYRRCGNYELAKRRLATL

SEQ ID NO: 1488 - protein, 637 aa, Bacillus halosaccharovorans
MDKFISLCMIVKNEEKVIDRCLSSIKNLVDEIIVVDTGSTDNTKELVSKYTTNIYDFEWVHDFSAARNYAASKATGKWILVLDADEYVDEENFEVFIKELKKDNGIYDAYYAKILNFTGNLGEVLVQNFHDRIYKNNGEISYYRKIHEQFRNQTGQEIKYNNSNLLIFHSGYLKQTVNEKDKSNRNKKLLENEMKNKNAFDYFNLGNEYSSGGEINKALECYIEAYKLKSDFRLAWVSTTLVQIIICLIQLKRYNDALNVIHDAEKIYGDSPEFPYLKGEIFYLRGQMKDAKLLFSDLINNYEKYNHILFRPDFRDQKPYSRLGDIFLYEESYQESIFNFISVLNINKYNEDAIKKSIYILNRFHTVNEIADFLKSKNLINNKNITSYVRACYDIGNIELALCLLKQLKEEDGLLYKVGILKKIAIEGKGQFEDLHDILKVSVAKDLIKSNWINVVDLFLLRDILTEDEYFKKLMKELDIEDALKSLIDIKNGNTNLELLDKNLFITSFEILLNYKMYSLCTLLLKNVENIDSEVTTRVASVLFAKGFRVEALQLYDTGEWNNFIEQDFINIINSFLETNNKEYAIEVAQYGISIYENDFRFYAYILENVDTHQYIPTLEKAKSIFKVSYYLESIKH

SEQ ID NO: 1489 - protein, 356 aa, Subdoligranulum sp.
MDMNVKISLCMIVKNEEDVIARCLDSVSRCVDEIIIADTGSSDRTKEICRDFTDKIFDFEWTDDFSAARNFSFSKATGDYLMWLDADDVVSSENIGLLKELKKTLAQKNPDVVMCRYVTSFDENGTPLFSFFRERLLKRTANFKWEGFIHECISPRGNIIYSDFTVHHKKERGAGDRNLRIFQKKISQGVKLDARNTFYYGRELCYNKMYAEGAAVLERALDMDLKNNRNEACLFLYDCYNAMDEKQKAFLSLCRSLEKGPPRADILCRIASVFKARRDFETAAFWYDAATKCGDMSARGEFDRAEFRTFIPFVELSCCYFYLGDKKKALMFHEKAKSLRPSHPSVLFNERFFGAQ

SEQ ID NO: 1490 - protein, 642 aa, Paenibacillus polysaccharolyticus
MKRRVDLMDKTISLCMIVKNEQKYLEKCLESVKQIVSEIIIVDTGSTDETLDIAKKYTPNIYSFNWVNDFSVARNYAIEQAKSDYILVMDADEYFDADVNLQEELKKDYDYYVFNINNHMKFNQSFIHTAVRLFRNNIGLKYENRLHEHLNILDDNSKYRGVMSVSTIQHVGYMDEEILEEKKHKRNLPLMKLEVQENPTAYNLYNMGKTYFGMNDFKKAVTYFQKSYSLGKDKVYIPELLTKLSFALHETGQFEDAVGILVDATRIFPSETEMKYIQGIIYARNGYFKDAETCFHECIKLGDQGTMVTEGSGGYMAHLQLADMYEKTNQLDKSYLERINAMRVKGNTAHVLQDYLQFSLKINQSADECKQIIEEHYKLNTIEDLQNLMNTLYSLRHPLLNHYLSKFNITTEPHIHTIAKIYSKDKNLMRTALEDINNLGNRENIQDVLLMAYIFKDKSVMDKIQFAMNFGVKEMKIIKQLFEDEKLTGSITKPLQNVLFTLCKQLIMIEEFELFQELTQKLIDNDSKNVLNICKILSEYRFDELAIDMLVGVYRESPNHPGIVRLLGDLCFRNNYFEDAELFYTKLLNLDSSYETYERNFRLYENNNDQEAMMKMRKEMMEKFPSAAWVQPGYDTRILSSN

SEQ ID NO: 1491 - protein, 351 aa, Clostridium pasteurianum
MLSLCMIVKNEEKNLKSCLSKVAAFVDEIIIVDTGSIDNTKIIASQFTDEIYDFKWCNDFSKARNFSICKASKDWILVLDADEFVTDFFRDNIDKFIKNSLNKNKVGRIQRINIMEDSNGNKKYTERVNRLFNRNYFHYEGIIHEQLIALDGKTYETEIIDITVDHLGYTEEALNRTDKLKRNIGLLKVAVKNDSEDPYLYFQLGKSYYMLKDYKTSALYFEKALSFQLDFKLEYVEDLVETYGYSLINNGRYSESLILENCLEVYSKLPDFHFLLGLIYMNNAKFTQAIKCFLECTKFPYSKVEGITTYISYYNVGVIYDVLGFGEKAMEYYKMCGDYEPARNRIKAQLN

SEQ ID NO: 1492 - protein, 351 aa, Bacillus solisilvae
MIVKNEENVLERCLSSVSTIVDEIVIIDTGSTDQTKEMAKKFTNCVYDFNWINDFSAARNFAFSKATKDYIMWLDADDVITEVNAEKLLELKKTLTEEVDAVAMKYHLSFDEDGNPTFSSVRNRIVKRKRNFKWIGFVHEYLEVYGNIIHSDAAVIHHKDKDSSTRNLKIYEEAIASGKSLNPRDKYYYANECLDHGKYETAIEWYNKFLDEGKGWSEDNIQACGKMADCYLNLGDMDLATRSCLKSFTYDGPRGENCCRLGYIYLQQNDYHRAISWYKIATFVDIPEQKSPFINTACYTWLPHLQLCLSYSRLGDQETAKKHNDIAASFAPNNPSVKYNQAYFNSLFNEK

SEQ ID NO: 1493 - protein, 335 aa, Unknown
  Description of Unknown: Lachnospiraceae bacterium AD3010 sequence
MTFSLCMIVKNEAEILRRCLDPIRDLMDEIIIVDTGSTDDTKKIAAEYTDKVYDFEWNDDFSAARNYAFSFATCDYIYSADADEVIDEKNVEKFRQLKEALLPEVEIVQMYYTNQLEANTTYNYDRELRPKLYKRLRTPLWEDPLHEAVRVKPVIFDSNVEIRHCPVSLHSGRDFSIFRKIIKKDGDISNHLARMYARELFISGSDEDFLEAKDFFRRRMDKDSEEELVLMAACVVIKCARLLDDTSLMLLASSRALASEHTPSEAVFELGEYYRGRRNYKEACMWYYNAAFETEPLLNLKYHDSYPYLGLHISYVIMGDRENAAKFANYAKDLR

SEQ ID NO: 1494 - protein, 661 aa, Paenibacillus tianmuensis
MCLMTYYNSTVFFTGGTMEKLLSLCMIVKNEEKVLRRCLESVKDLVDEIIIIDSGSTDTTKEIALEYTDHIYDYEWTNDFAAARNEGIRRATGKWILILDADEYIQNEQHQELKDILRKHSHSPEAIGITFSILNYLGATEAESTGFMESHSIRIFLNGRGLLYKGAIHEQIVSPTGAFETYSHSFYIYHIGYTDQINQEKDKATRNITIFNELKKRNQLKTPYDDFTLANEYAKLRDLPKALYSYEKAYRRCKDKNNYWIPHCADRLITVYKILKKYKEAFQLTEECLERWSEYPDFHTIKGMLLDVFGFEKACQNKMEQSIRIAENLESQNEQYWKIHLDHGKFLPYQKLAEIYYKQRNLNKTVFALTKVLNIDRNQFQALYKLAHLLSLQEADKDTIAFFEKLYSSSKASNCLLLFQTFLLLGKGTLTQHYYNLCIEHKLLLSEADILRYYLLLNEPTSFQNKVLEMNFGIASDEACKLLLLAALTWQDPAYLIPLADLPEERARLYNLGQAIFGSQNEDILDHEDLLYTILIDLFTVQSYEAYDLLINQYVKPSLLNKLAHYFYNQNYIEMAINYYSILIENHEMEAMGYYNLSLVHLYEGKPQEGLHFLKQAIEIEPGHLPFYATWLEHCTDPELNAKYREKFNNLVPSCRHINFA

SEQ ID NO: 1495 - protein, 350 aa, Unknown
  Description of Unknown: Ruminococcus sequence
MIVRNEEAVLGRCLDSVADLVDEIILVDTGSTDNTKAVAAEYAAKIYDFPWCDDFSAARNYAVSQAVGDYWLWLDADDVIEGENHEKLRKILEAPEADMVFLPYWLSFDAAGTPQMISRRERIFRRSRGYRFTGAVHEAVVPSGSIRYGDAAVSHRKLHAGDPDRNLHIYQKLLLSGKRFSPREQYYYARELCDHGAYRAALPVLEQFLQEGRGWTPDNIGACLLAGRCYARLEQPDEAMQSLFRSFCYGIPQPEICCEIGGLFLERQQYPQAAFWYHLAIETGHQPHEGFWRQECCDYLPAIQLCVCYDRMGDISTAAAYNALAGSFRRGDAAVAYNRQYFAEKAARRK

SEQ ID NO: 1496 - protein, 618 aa, Paenibacillus flagellatus
MKTSIIIVTHNGLDLTKRCLESIRAHTPEEHEIILVDNASTDGTTAYIRTLPDVTAVFHSDNLGFAKGCNAGIGHSTGDNILFLNNDTVVTENWLGNMLRTLYSDEGIGMVGPVSNFCSGPQQVPAAYTDLDGLERFARERAKHHAGLSRRLNRLVGFCLLVKRSVLDDIGPFDERYGIGTCEDDDLCLRAVRQGYALLVALDSFVHHVGHAAFREAGIDMMGLIRENKRKAAEKWGGDIHELLLAEENGRKSITISLCMIVKNEERTLARCLESVREAVDEIVIVDTGSTDRTKEIASRFTHRVVDFEWIDDFAAARNFAFDQAAMDYILWLDADDVLLPQECAKLIGLKRSFDPTVDAVSMAYSCAVDEAGRGILNVRRIRLVRRSKNYRWHGAVHEDLTVCGTVLDSDIVITHRQEHGRTDRNLRIFEKLAERGAPLTKRDLFHYARELHTNRRYDQAVRAYLQFLDCEGISPEDRIFVCGTLADCYHHLGDCDRELDWAFRSFRYGMPRPPICCRIGYHFLNKDELQQAIFWYKLAVEAPPPANRWAIDNVPSRTWLPHMQLAHCYFRAGDYDQAYRHNQLALDFRPNDEHIRGHMKLCRERLGAQTAVDPTLA

SEQ ID NO: 1497 - protein, 386 aa, Rhodothermus marinus
MPHDEARPLLSLCMIVKNEAEYLETCLKLARPHVDEIVVIDTGSTDGTQDIARRYADVFEEIEWPNSFAAARNYSLDRASGRYILILDGDEYIADPQGWSLIRSILSERHIAALRLKLLNLLPLNSLVKAESVYQERIFPNHPILRYERKVHNQIYQNIVRYKNENGGFIIDVPVEITHFGYAHNYDKIIGKYTRRIPLLEEEYDQAANLTMKYYYAFQLGVVYFMLKDFEKAAFFLESIDFNQMGKDNMMNAFYSQVLLIQSYLELGEYNKALVCCNQLLSYRINEPVLYYLTGISLLLNDKVKEGISFLIESLELNMKKDKTRFLLNDRIVLKNLKIVFEKIGWADVANQISFDDKRYCGAGSKINGILKKIQYCILQTLPESQ

SEQ ID NO: 1498 - protein, 626 aa, Clostridium lundense
MYKLSICMMVKDEEKNLERCLNSLKPLLENNIAELIIIDTGSKDNTIEIAKRYTDKIYIHLWNNNFSNMRNISISYAKGEWILIIDADERLDNTDELIKLLINEKLKDFNTISLIVKNLYYEDNENKFSSLLSPRIFRNDGSFKYEGAVHNQPMCKRPNLSANISITHFGYVLTDKVLIRKKFQRTSSLLIEQLQENPNNLYYIYQLAVTYNMYGKDDKALEEFRKLYSKLRNNKKDFLYALAAYAKTAFNMEQYYEAIEVAKDVIKYRKDYIDMYYLLGMINVKIGNKEDGLKYFKEYLELITNYDNLEIAKDTKLISYFIDDQSISNASFELATYYIENGEVEQCKKYLNFIIDKYELCNINVKYLIAEKNYKSLVEYYNNLKDNNLKEYFAFSVEKILQNINKTDAYDIFYNLSNVNDEYGLLNKLRISNENKNTTIDNIIEKVDFKNCFTFYYDVFQYIDDFDKIIHYFKKMDIDDIRKIFKYLVNEHYNFNGKFEQYLINSNIRNNDIEGNKVYIAIAYEFIIDRIENYEKYYNVFQLYIDRGINYIKQIYQTDKARILYKNLSNNEDKLFILSFIANNYIEKGSFDLAVKYFKEALKCNGNLLSYMNLHMKSIFIDISKE

SEQ ID NO: 1499 - protein, 531 aa, Paenibacillus sp.
MAQASRLVSLCMIVKDEEEQLPRCLASARNIADEIIVVDTGSSDRTAAIARQFGANVIHADWEGDFAKARNIGVEQAVGDWILFLDADEELDSSACAGLRQTLRGTDAQGLFLQIWNVLGDDMRGGTVHPVLRLFRRDPDIRFEGKIHEQIAASVLRKWPHAIFRLTEAKIIHYGYKPDQVASKNKLERNMKLLEQAIREEPEVTFHHYNIGVEHLRVGNARQALGAFRTARRQADFAELSYAHLIVKYEVRCLLVLGLAAEAVQAAAEGAAAYPDYSDMCHYEAVALAEAGRLHAAAKRAERTLELGAAPPQYHTEDGIGTYRTAYLLGRIKEALLDGQGVADAYVLALHHYSGFNPPLYRLCHYMRKTGQQAELAQLLTTRLTCPAVEAVEKVAVILLATECEDAALQWLRQHKRLGGEFAALVGRFERQGAQTTRTTDRKERAAEWEGEPAGNGNGATGQIERDAGMAGGSAGAKGLLSEMCERADLHLERLQSMLGKSRRVGNGVSTAALAALRLAMPCKEGWDVPQ

SEQ ID NO: 1500 - protein, 356 aa, Roseburia intestinalis
MATISLCMIVKNEEAVLARCLDSIADLMDEIIIVDTGSTDHTKEIAAKYTSQVYDFKWTSDFSAARNFSFSKANMDYIYTADADEVLDDFNHERFLRLKNALLPEIEIVQMKYVTDADFDTVLNAKKEYRPKLFKRLRTFTWVDPVHETVRLTPVIFDSDVEILHKPQNFHSKRDFSIFIKNFQSGHELSPKIRTMYAKELLKTGDTKDFQDAKPIFQYILEHDLSDDAMKEASCVLAHVYRLEDNKNEFFKLTMKDMLTTPCSEICYELGTYFLAQKDLNEAVIWFYNAAYETESILDVHTSGDLPLYGLVECYELLLAEAKSNIPSDTMLVSSYEEALEKYRRESQSWTMPAEN

SEQ ID NO: 1501 - protein, 634 aa, Clostridium botulinum
MKISICMMVKDEEKNLRRCLNSVKPLIEKGIAELIIVDTGSSDNTVDIVKEYTDKVYFHLWNNDFSSMRNISISYARGEWIFILDADEEVENVEELRKVLFNEKIKDSNTLILEVKNIDTLKDKDNIVYSPSTRIFKNDGQFKYIGAVHNQPVYKEPTYNTKVSLVHYGYILGDKELMDKKFLRTKTILESELKKDPNNVYYLFQLGVSYDMHGDFREGLEEFKKAYNILKTMSNMEIYDRIYVHGAYARCCYANGKYNEVINICKQGIGYRDDYIDLYFMMAMAEKHQGDLKESKKHFLKYFELINNFHKIKISEDLNIILYNINIESKDNAYYNLSEIYMDEGDYEKAHEFLVLIKDKIKKNSLIPRVIVRLNDISKLKKYYNEIKEDKGLTNYFLSNLEVEINKLTEEEQYKIYRELGKLENEYSLYCKIKILKDEEKVIKAKEFLKTFDFRDKPLFYSQIFTIIFNDREFLFKCFKKIGLNDLKEIIKYLLDNYAESKRIFKELLLNCNIKCYDISGNKAYIGISYIILINEYQENKTIYDIDYEVFKKYIDSGINYVLQLYNMEKVRIIYKEVSSSEERFFMLMYLIKEHSLKNDIKSVVRYIKEALNCNKELIKYIGKYKDEILRDIS

SEQ ID NO: 1502 - protein, 245 aa, Sporomusa sphaeroides
MGVSAAIITCNEEANIKRCLESITWVDEIIIVDSGSTDRTLEIARQYTDKIYHQDWLGFAEQRNVSLTKVTGDWILIIDADEEVTPALRNAILHMTQAATNHAAFTITRKNIFMGKVLNSYVEKKLRLFKGGILTFHGQVHEAAIFNGSTGHLSGGTLIHHQYTDLEAQLAKMNTYSTLAARERYAANKKYGVLALVVRPLLDFLKRYILKGGFRDGMPGFISAVLRAFYTFSRFAKLYELHKKS

SEQ ID NO: 1503 - protein, 654 aa, Paenibacillus contaminans
MTRWFCFRVRPSCAKNGGRSRKRSAGSKRLSRFHAGSASKGCDFMHERPLLSACLIVKNEQRVMKRCLSSLKGVADEVIVVDTGSTDATVQICLENGAIVHHAEWEHDFAKARNTAIDLATGQWVLVLDADESILEPQGAKLRNLLNAETQAEGYFVKVINYYGYGHKVLGASVSSSMRLFRNNPQYRYKGKIHEQIVEPILQANPKAALLFTDLEIEHDGYLTEVVRDKGKSRRNIELLEREVEEHGDPFQRYNIAVEYIRAGEYERALKQLRLCKLADRFLLRSYAHIVMKREIDTLDYMGRYEEALVVCDEAARAFADFPDIFLSKGICSYRLGRWEEAETALTRALEIGEAPPQYSSNRGTGSYQATFYMGKLCERTKRYDDAIRWYLFTLRMKPDSLPPFLRIIRLLVRLAERSQWLAKVEELFTIDSARTWWSVALAFYQLGLYEETLKVLGERAMPEEKKAESDWLTIRCLFLLVDEGEKSEFAAQWTAAKGSPVKCVFYASLLSNDASAARASLPLLENAGEDPLTRALYRHLLADDNQLAVDPVLMTHISQQLWSELAFLHHMSRKHGLPMLAARIQTFWQAAIAFAPDPAKKIEGQFAWVRTLHVRIHQLILSAPQSSVSAEMWNETSDYLMPLIDDLFLGETV

SEQ ID NO: 1504 - protein, 656 aa, Desulfotomaculum hydrothermale
MISLCMIVKNEEHNLARCLNSVKNCVDEIIIVDTGSTDGTLTIARQYGAKIYHYQWDEDFAAARNYSLEQAGGEWILYLDADEELEPNSCERLRALAADPLYEAYFFQIINLTDNNAPLKHINVRMFRNKPRYRFTGKLHEQIISAIPPRSGRPPVVNSGLCIIHYGYLAREFLIKNKAVRNHRINQRLVEEEPDNPFYLYSLGGSCVNLNDLTGAITHYRKALQHVNLRAMYAPSIFISLISCLSKTGRLVEAAEYIEQGKTHYPDYVDIHFVEGEFYHRLGHLQRAVACYEKCLQLGEQLAGKYTSRTGVGSFLPCFKLAEIYQQEGRLKEALAYQIAGLKYQPADINQYIALARLLQQAASSRQQLYEILKENIKHKDQVARRLLLARIFYEIGEYEQALELFNELPDDRQETAYYKALTCIKSGRRAAARQSMAYIRQSHLYESVLAELLPACWTAAPPEDVLPYLEHEAWPAPEHRSIILNINHLLLDRPAASEINLHNYYVNQIVNQLLAQKAFSAVDKILNQGGLTAAADKINYLMQDDSNPCRVEMAARLALAAVKMGSVQPDWLFAWGKYFYHNNRLATAQAALQQALRLHPRNGRYQQLLIFIYGRQTLQMVQTALRHYPANPQFTRRLIELHEFLNLDAGLKGVH

SEQ ID NO: 1505 - protein, 650 aa, Paenibacillus sp.
MKRLSVCLIVKDEEELLPRCLDSVRNIADEIIIVDTGSTDRTKEIASEYTNLIFDYHWTNDFAAARNVSLQHATAKWILVMDADEYLAVDEHNQWIQFLNDEKPLSYLAYTLPVVNFTGDKEYQDEISTSPVTRLFPNHMGIHFERPIHEQLTRGAQEELYHKKIDLIIYHTGYQTQRVNEKNKHERNMLIFNKMKRNSQMSEYDWFTLGNQYRYAQDEVQALECYEKAIQGTSTTLAWYPHCLIGLISLYYKQDRLVDSWRWTECKLSEFPDYAEYYSIKGIHYETLGFYSEAAEQYKKAVEVAESRAAKSQEIWLVDPMYSFEMPVQQLVNVSFKINDNQQAIYWLSKLLNKNTKNPRVLLKLVEWLNHNEQPESIIHFLDQIYDRHNKAEANLLYRVSLGLGRKELVDYYESFIDQEDLSLEDHLRLSIVKYNHDMWVKYSMMLIEEGDIEQLWIQIAVGSLLWKDNKILKMAIDLRKTEDKFKRLLSLIASITSEEEVRDLLLTEYADDIFLIAKQLFILEQYECFDQFIQSTQTPELVNQLANYFYGLNQVETAMSYYSILLSQQQLDETSLENLGFYHANHGYSTETVEFLGEAVRLQPKARHLYRTLIQHTSSGCKTTLIERFLKEFPQFSSISFLKGFLNMK

SEQ ID NO: 1506 - protein, 357 aa, Blautia hydrogenotrophica
MFTISLCMIVRDEEGTLRRCLDSVKEVVDEIIIVDTGSRDHTAEIAREFTEKVYEFQWIDDFSAARNYGLERATQDYCMWLDADDVLKPEEAEKIQRLKEEMPVDVDVVMMKYAIAFDEWDRPTFTYYRERLVRNGDRCRFAGRVHEAITPFGTVKYEEIYVEHRKVKASDSNRNLRIYERMVREGEILGPRETYYYGRELYDHGRWRKAGRMLREFLKMPSGWEEDKKEACRLLAVCYYKQGHREKGLHSLLRGLAYGAPRPELCCDLGGWFLEEQMWETAVYWYEQALQAPRPEKGFCRENSRGYLPCLQLCVCWYRLGNYDKALYYHKEAGRWNPRGKEYLRNVPFFENLAYCK

SEQ ID NO: 1507 - protein, 358 aa, Terribacillus halophilus
MHTISLCMIVKNEEEVLAGCLESVRDLVDEIVIVDTGSTDRTKEIAAQYTPRIFDFEWINDFSAARNYSFSKATSDYIMWLDADDVLLPKDQEAFRKLWKELADEVDVVSMFYHTSLDEKGNPLYLYRRNRIVRRSKNFRWHGAVHEYLEFGGNIVASEIAVTHRKNKKTHTISDRNLRIYESYIASGRSLTPRDMFYYANELKDHGKFDLAKSYYTDFLHSEAGWVEDNIRACQYLADCCKAEGDMEGYRMHLFQSFRYDRPRPEFCCLIGDLLTEDRNYEAAAYWYRQALDYEGKELPGFSVPAYTTWYPYLQLTLCYSRIGLMEEAKLAHDKAVSYHPDHPSILHNTAFFEKFKL

SEQ ID NO: 1508 - protein, 600 aa, Clostridium botulinum
MPLSLCMIVKNEEKNLERCLESIKDIVDEIIIVDTGSIDNTLKIAEKYNAKIFFYKWDNSFANARNYSLSKASKDWILIMDADDELKSEYKDNVIKLINNENNKVDVYYGETLSYVGNYSDNNILSSVNIRLIKNGKGYKFSGDIHEQITPGSEAADKQSFMEIVDIKYYHYGYLDKVVNEKNKRKRNMDIIQKNLKENPDDVFMLYNMSTEYIAKHEYAEALKYLEKAYKNFDPSFVFGFKLILKMIVCNEMLQQFDDCLTLIEDGLKYYPNCTDFEFYRTNIFFTQKQYLPAIESAKKCISMGDSPVLLRECLGAGTYRPYYLLGIIYSNIGDYDASYKCFDEVLKLNPKFSDAIFKISGIMAMKNIAIDEMQKKLESYFDNINQETNLLLSKVFYTQNKFDIAYNYADKAESFDENLLEIYFYKGIYLFYLGNYNESLEYLYKIKEGKYYNDVVYCSILCELFIKNYENVDNLLTITQSFNNSEETMVYETFISIIKENKHIQLADTKENSKKFIKPIFNLLEILLRANCFEQFDKAVQLLNLIHDDSLLLLLGKLYYKYGYSNFAYELFIKSIKMYEIIDADALYMMQTTLLSKKD

SEQ ID NO: 1509 - protein, 260 aa, Halapricum salinum
MTDVSAVILTLNEGDFLRDCLESIVDLVDEIIIVDSGSEDDTVEIASEYADTILHETTERGEGFDILRQYGIDAANNKYILDIDADERVPSPLADRLREIVESERYDVVDIPRKNCFFGKWAKGAGWWPAYNPKLYNKECVEITNELHNFIDVVPDARRGKIPDEEQYCLVHINYRTIEDMIDSMNRYSTIEAKERDFSTKMVLWDPIFEFTVRFVYQGGWRLGYFGLILCLLRLYYNLILGMKCFARHRGWYDTSSRNG

SEQ ID NO: 1510 - protein, 369 aa, Bacillus alcalophilus
MVTISLCMIVKNEEEVLARGLDTVKDIVDEINIVDTGSTDRTVEIAKQYTDRVFFYEWTGNFAAARNESFKYATKDYILYLDADDVLLKEDQKKLKELKKTLNLSVDSVSMFYNAGMDQYGNVTLRYRRNRLVKRENNFKWEGDVHNYLNVYGKIINSDVAITHKKLKHSVSRNLSIYKEKLERGDVFSARDYFYYGNELRENGFPKEAIEAYEKNIAKKDGWSEDKFYACLNKADCHRHLGELDKELESLFQSFAFSKTPRPEVCSRIGYHNQQKGEYEHAVYWYEQAIELKPDLNQWSFSYPAYSTWYPHLQLCVCYDKLGNYNKSYYHNEKAGEYRPEDPSVLHNKAYLESKLGSKKKKVKSKKRK

SEQ ID NO: 1511 - protein, 670 aa, Unknown
  Description of Unknown: candidate division KSB1 bacterium sequence
MKKRKPLKLAKTTSRLSVCMIVKNEEKMLPKCLESIREVADEIIIVDTGSTDNTVAIAESFGAKVYFHPWEKDFSKHRNQSLSYATGDWILQIDADETLEPESKNELKRLLRQAPKDVNGFFVQIHDYRSNGQKNVVFNFARLYRNGVGVHYEGIVHNQVIIPGKVLFCNVRLNHYGYDLEPEKMKWKYKRVLTLLKKQLKQDPKNSFTLYNLANTYSMSGKPEKAIFWGEKTLEVLRRQKRASLLYVGVYYPIITSYIHLKNYQKAREYCQEAIKIFPYYLDGYYQLTRVDFIEQKFTDVLRNAEKYHRVREYLLADLSRIEFLNLYTFSLDFRVNYWMGVGKLGLGAPAEADKFFQKAFDSPLFDKSLALEMIHNISIVERGEILYTWLQKVVDRFKNNQSFVFDLLHDLKLNHGAEVLRPFFERDKVKHQFQTTEFLHATWHYFHDELASAEKLFQAVPSDSPYFLDAQIKLVLIKRNLNQIPQAITICRKLLDSDMEKQTKVSINIELVKLLLDNQELEEASRQWQNVWRLNKKSREVLLFGIEIHWKTGQYELAVNFAAKLLEELGLPCPQQLDSLEEFADLLDRIGKRLLQYKEFDLAERAYQIATLVHPDHLPANLYLARANLKQKNYSQTLQHLQQVLMLEPANRDALNLLREINFSVGSPK

SEQ ID NO: 1512 - protein, 359 aa, Anaerotignum lactatifermentans
MATISLCMIVKDEELTLERCLQCAKGFADEIIVVDTGSVDRTKEIAEKYADVVCDFQWCADFAAARNFSFSKATKDYCMWLDADDVVPESEQKKIVALKEKLEKTKADVVMMPYDVAFDASGKPTFSYFRERIVKNTGRPLWEGRVHEVITPYGNILHEDIHVEHRKEKAYDTDRNLLIYEKMRAEGCVFSPREQFYYARELYYHGRYEEAISEFRMFMGREGAWLENKLEACRQMAVCYGQLQKPQEQLEALFYSFTLDLPRAETCCDLGRYYFDRQAWREAAFWYETALRVEKRKNGGGFIREDCYGYLPCIQLCVCYDRLGRREKAVSYNEMAAVFKPEDRAVTYNRAYFANVSKA

SEQ ID NO: 1513 - protein, 357 aa, Brevibacillus centrosporus
MRISLCMIVKNEEEVLRECLESVSGIVSEIVAVDTGSNDRTLDILKEYGAKIKKLAWNHDFSAARNASLSEATGTHILVLDADERLLSSREELEAILQENPHVPLQVLCKNDLDGEISTHRVVRVFPNDPELCFQGAIHESIHRDGKQVSGCPSSLVIWHVGYQKERYEKRNKKEFYLTLYEKELKTRGEDGYLLYQIGKLLYSTGDYSEAIQYFQKCMEHGEEKSLYFPAMLVLHGYTLKHAGRSVEALELLVDFIDTYPDYPDLFFLMGLLSLEAGLLENTELAFLQCVEIGETQKYSTVDGVGTYRAYHNLGVFYEVYGQKKNAIDWYSRAADAGYRPSAERLIEYGNILKKNM

SEQ ID NO: 1514 - protein, 639 aa, Geobacillus kaustophilus
MKPFLSLCMIVKNEESVLRRCLDSVRGIVDEIIIVDTGSTDRSREIASEYTNWLFDYEWNNDFAGARNYAASKASGEWILVLDADEYVDRYNLKQAIEEIKRHDNQFDIYAVNIVNFTGQNGEITVQHQHSRIYKNDGTIQFYRSIHEQLRKKDRQANIGLSSLIIYHSGYLVHTVKTKSKYERNLPLVQKELNRLTNIGFDYFNLGNELKRLGKTIEALDAYIKAYQNRQEAVYGWVPFCLCNMVDCLMELHRYRDALDIIYDAEYIYANVADFVFLKGEIYLQQHRYDDAKSVFIEIVSNKQNYNQVVRSVDCREYFPHRRLGRIYELEGNYEQSVVHYIKALNFNRFCLESFIRLVQLLDKFHSEKEIYDFLSKQLLIDNKSFLQKVLIFFVNQGWFELSRSLARDYFQEQQIVYRLIDLKQDIMNGNMRKYENVTGIDSSLFLHGIHLGIVDLADLLIMYKHLNDSFVKRCIQVIIASTNIMPIVECLETGDSSLQIEEGVYLYVLEKSLKLQKQSLVRELLDIRHAVDKGLEIKIARIFYEAGHTEEAMSFYRQVNSDCWSAQDYVHIIERLLSQSKYQEAYIMSQEALKRFQDDFRFYKYVILLGDSTSSYLQEVKLNAFQRFPQSEWLRKHI

SEQ ID NO: 1515 - protein, 359 aa, Bacillus megaterium
MKISLAMIVKNEERFIKRCLDSVKSLVDEIIVVDTGSTDNTLYIIQEYSSVKLFHHTWNNNFSTARNFSLSQCSGDYVLVLDADEYVSVGDRQELEIIMKSNVIGRMKICSPFKKEGQTFTSNSYVSRFFPKELKYKGIIHEQLDSDLSRQKMNFEIEHSGYMDVRKDQRNIPLLLKALEQEPKDSYYMFQLGKEYRIVENYERAFHILNESYSLLTGEEEYYTDLVVEFIYSGKEIQNNSISKRILGVIEDNEEHLKKVADFHFAKGLFFLDYSLKLRNRGFAYLPAIEQSFLKCLQLENSSHVESVVGTGSFLAAYNLGVFYEVIGKIDEAEKYYLLSFERGYIPAQKRLNVLKVSK

SEQ ID NO: 1516 - protein, 251 aa, Unknown
  Description of Unknown: Verrucomicrobia bacterium Tous-C9LFEB sequence
MKISACLITHNERDNLDRCLSSLRPVVDEIIVVDSGSTDGSQDICRSYGAHVTEHKWEGYVAQKNLAISLASNKWVLSIDADEELSPGLSSAIEMLRENPPEEDISGYEISRVVYYRGEWIWHGNWFPDRLVRVFQKDRARFAGGSVHERLEIDGTVKRLPGYLHHYTFVSMEERRGRIQNYANLWAANAIAHGRRAWPWSAPLRATWRFLRGYVIRRGYLDGSLGWEIAVSNAEEVYMKYQSLRRLQQRA

SEQ ID NO: 1517 - protein, 351 aa, Caloramator sp.
MISLCVIVRDEEKNLDRCLSSVNNFVNEIIIVDTGSKDNTKYIAKKYTDKIYDFKWENDFSKARNFSIEKANYEWILILDADEIITKFNRQEIDNFIKFKKDVLGRIDIINLISDKNGVKKSKQRVARLFNKNYFRYKGKIHEQLEKKDSDYLCMEDIDIEVEHVGYDKKINNLRYKLNRNIELLLVEIENNDTDPYLYYQLGKSYYMGEFYDMAEKQFEIAIKYVTDYRYEYIEDLIETYGYTLLSLGKYEKALKIIDYESYLCDSADFYFLKGLICMNNGYIYESIKSFEIASNKEKYKVEGVNSYLTFYNLGVIYECLGDINKAIEYYNKSGDYHLSKSRLDKLMTKV

SEQ ID NO: 1518 - protein, 362 aa, Ruminiclostridium papyrosolvens
MISISLCMIVKNEEETLARCLDTVKDIVDEINIVDTGSTDKTKEIASGYTDRVFDFPWTNSFADARNESYKYATKDYILYLDADDVILEADQVKFKELKETLDPSVDSVSMYYDAGTDEFGNVTLRYRRNRLVKREKNFRWYGDCHNYIEVSGKIINSEVAITHKKVRHSVGRTVSIFETKKQRGDAFSARDYFYYGNELRENGRYQEAIESYDQNLALKQGWAEDKIFACLFKGDCYRYLNDKENELTALFQSFNYAPPRAEACCRIGYNFHRSRLYKTAIFWYELATQQVPDPDRWSFIYMAYYTWYPHLQLCVCYYNIKDMQKAYEHNEKAAGYRPSDPSVLYNKELFAKMIEEGTIKP

SEQ ID NO: 1519 - protein, 604 aa, Paenibacillus rigui
MTKPKISLCMIVKNEAEMLPHCLNSVRSAVEEIILVDTGSTDGTKQIAEQFGATICSVEWTGDFAFARNIGLLQAKGTWILFLDADEELEEQHVQELRNAAEHLEYEGFFLQVHNHQGERKHSRTATINPILRMFRNRPEYRFKGKIHEQIAQTILMAKPEAQFHILNVTIHHYGYSEQQVVRKDKIARNVALLQEALCQEPNDPFHHYNMAVEYMRMQDYPSALEHLREALERCMPETSYRHLLVKYEARCLLALQRYEEAAAVCSQAIELYGDYTDLVHLLGVIQFTTGHKRQAQDTLTRAARMGAAPGHYHTEAGIGTYTTCYALGRLLEDTDEAAAAIHWYAEAVKHNAQMTTPLQRIFRLLASAGSESEIPQLITEKFRMRTPEAWGKVIRLLMEEGCWQAVLALLPEWEVTDQAAEWAAVGGWSVFKLEAAITCLAWSGRVEEAKRLLEREKAVGLAEGDAVAVEHRRLLSRLRELLDAARDPAVTLKEAGSSIDMDVDGANDTDEMDTTVEMEFRIRAAYFSERRALAYKLLTAWLKAGHGEANVAANPMAAAEAAYRKSRTLIALAEARLGTIDVANLCFSVYRKARLGLPPGRWN

SEQ ID NO: 1520 - protein, 353 aa, Clostridium sp.
MISICMIVKDESGVLKKCLESIKDYNYEIIIVDTGSTDNTKEIAQKYTKNVYDFDWCNDFSKARNFSISKASNDFILVLDADEIILNLDEENLEKIIIENREDVGRVVRKNEYLRENNKFIYNEYVNRLFSKNKYKYYGTIHEQIVSKDAKTYTTYNLPIVIKHIGYDNEEIRRKDKINRNIELLKESLKTKGDDPYIYYQLGKSFYMNGNFADAKINFEKSLNFNLDTKFEYVQDLIETYGYSLISLGEYKDSMKFLNLYDEFKDSADFIFLIALIYMNNGLFHEAIIEFKRAKSIKACKMEGVNSYLANYNIGVILECLGNEEKAMEYYNMCNNYENALKRINLIIKSQKL

SEQ ID NO: 1521 - protein, 639 aa, Unknown
  Description of Unknown: Candidatus Scalindua sp. SCAELEC01 sequence
MKTNKTNLKPLPNDEVGDSRNSGSTISLCMIVKNEEKFLPMCLDSVRDYVDEIIIVDTGSADRTVEIAKSYNAKVYHHAWENSFSKARNYSLKYATSEWILILDADEEIDKIYAPRLKEVLNDDRTNVILLPVFSKSYKGKSLGVGNSERIFRNHLGFRYEGIVHNILQCSGPFKKSNIKVHHYGYNLDERQMVKKFQRTSTLLQNQIREKPEDPISHHYLASSYLDRDMNDACIQEALEAARLFDLQQGKAQIRFLNYYIVSVAFLREQDTQNAEKFALKAIDLFPDYLDAYCLLSSVYFLRREYKRCLEVTHKYLYLLRSIEENPSQIPAIPLNTIHHDRLAYTRLAIIYFEQEREVDGLNALRKAKQCAENRWEPYLLIGKHFIEQNSLKMAEKFLKYGLYNCNHNRDLLYCIADMYEKSGSPDKALLYLKEILAYHSSEILAQYRIGLIFVKEGQSKEAINSFKAVLDKDSHHVGALFNLARSYERVKDHDKAKKTYNTILTILPENPETLVKLGTLYLRESDYVKARECFIRTIQLNKYLIESYIAMSKISLALRDLEKCVFYCEKSSQELGLAVNVTIKSTYDLSKLFLTIGANLLIRERDDLAKLSYDLAVKLDTLSSHQDCDRQRVKFAVG

SEQ ID NO: 1522 - protein, 720 aa, Paenibacillus sp.
MYSLFCPPLPDNTPIVHHRTVGKLTLQGGTPVKKPTLGVHLIIRNEAALLPQCLDSLSGAADEIVIVDTGSTDDSLSIAEGYGAKVYRMNWNHNFSEARNTGLSHAQTDWILVLDADEILKTPLGEITDMLQNTPALAYTVNIENWLGSSPEERLTHSIIRLFRNGKGFSFDGIIHEGLDASIIDKHGASVIHSSNIEITHLGYLPGLMAQRNKVSRNEQLLRLALGKEPDNPFYSYNLAVTCCQNGQLEEAAELLSHTIHQAPLQVSYRPSMIRDLGKIYLAMNNTKGIDALLARELQRYRDYPDLHFIQGQSWESQGLIERACQSYERAAAGSEAALSQEAALSGKYVSEKGMNSFRPLTRLGENSLQLGHTEDAARWFHRALQHHSMYGPALQGIASAFQRLNVPDPEISTLLIQLAGTEQPAGRSAVIHALESVHAYEAIAGLPRAGFPLEWETLPAIISAWMITGQLQEAGSALREALPLLKQETDRDRDVTRQLWIIHAICRWQEDRQQTESYGFLDAPEPLRSGLLHIGEKLARQVSAPAAPDNAGEHSLVVTELIRQAVKLRSFGLAAELAGLFPEHRAELAGALYEAGQLEAAGELLITLAAGGQTGGKGSFYLAEMLFDQGHYGEAAEWFRHMLDTAPADNPSRIGLSLSYLHLAKQELEGAAASFPEIYTQGPLQEDIAAIHQAIAVLNRTAWHTQWSANQNIQGGAAR

SEQ ID NO: 1523 - protein, 649 aa, Paenibacillus ehimensis
MEKLITLCMIVKNEEAVLSRCLESVKNIVDEIVIVDTGSTDYTKTIARQYTDLIFDFSWSNDFSAAKNEAISKATAPWILVLDADEYLQHEDLDIRSFLKELDPQKPLGVISSIINYVGHPNSGKMVESSAARIFPRNADIVFVRPIHEQLSYRHGELTYINGPLVIYHTGYTQDTVQLKNKTERNLSIFQAMQHSGSLKPYDYYTLGNEYMMTEQYQLALKQYQKAFVKEEFEKYWFPYCGAQMITAYLKLEQYKEACLLIDSCLQYWPQYSDFYWFKGSVLYDLGLYDAAVAELQMAITRSEKPGIQIADHQPWLISPNYGTSLPYQRLAVIHLEHLRIREAVYCLTKLLYSNPNNETVLFRLLQLMSQSESADSIISFLDKVYDAPKEHHLLMLLRVTLNLGNLPLYHYYKEECSKKSIPLPIHLQLLQALVLDRLDLFSSLIESCSLVPDDLELMTTISSASIVWKERRFAALISKSNEASALKFILDYYWGISPDNVLSQKDIAVLTKLLTQLFQLGFFDTYDRLMERFNAYADELANELGHYFYSIQQIELAIDYYSILINKNKLSGKGYENLAKLYILQGEYEEAFYFIKQALQLIAVPPSLYVTFLQHCQVQNLNNQIRELLQMKHSDLLDIPLLKPYLIN

SEQ ID NO: 1524 - protein, 331 aa, Murimonas intestini
MKISVCIIEKNEENVLERCLQGAALFADEIIVLDTGSSDSSREIALRYTDKVFDYVWKDDFAAARNASFEKASGDYIMWLDADDVVDAENAAKLSGLKETLRGSSALLMPYERPEHGCVFYYLRMVKRRTDKKPYWHGIIHEQLIAYGPVQFADILIRHAKMGTLDYERNIRMMEKLSVEDLKNDFYLCCQCFLDCCLAGKKELSDYYYSFCDDSGDFDVKAAQYLPVCNVLAWHRKDKDVLRWTELAWRDFQRHPVHKDIMCRLLSDGLKAAERQGNFQMSETINSRVLELDPENPAALTNRHSLQRVMAQIGAKNIKIFDSIISAFADK

SEQ ID NO: 1525 - protein, 489 aa, Paraclostridium bifermentans
MKSLSVCMIVKNEEKNIKRCLDSIESIADEIIIVDTGSNDETLNICSNYNAKVINHKWKNDFSEARNVSLEYATKDYILFLDADEEISKEDLGKLKALLSSKKLSEGYFFRLTNIINGTEVGEYVVFRFFKNKRKYRFRGKVHEQIANCIQKHNKDKCIENIDIKIYHYGYDPNKVNIESKYKRNMGILNTYTEEEKDAYYFYVLGNEYARITDFKSAIESYKKSLELMELKYNYVFYPYLILNIVKAYSNEKQFYESIKFIEEIRLSIPNFKDLYFMECLAYIECGKISKALECLNKYINCPVGNTYEYPNNNFEKIYDIKEMKNNLEQAANNNTDNLLFALMIIDQYDNSIINTVKSFNEIVSNFVIATNNKYLELVELKNIGAQIIYLNDEDVNLLIKRCKSKYIFIVDRGEICSTLSQKKIIELLSNTNEKTFTVNIVNIGNSTKYKEIRIIKNDSENFINDYKNMLIKNINAIDSNIYIHKAIN

SEQ ID NO: 1526 - protein, 682 aa, Gracilibacillus dipsosauri
MGKLDRVKKLSICMMVKDEEKNLERCFESIKPLIDREDVELIVVDTGSEDNSVDIIKNYTTKLYFHKWNDNFSEMRNITISYATGEWIFILDADEELVDPFELMDLLNSKKMKEFNAISLLIKNFLTKSGTEQSIFPALRIFRYDEDFRYDGVVHNQPVFKQPTLETEILLNHYGYFNDDKVLMEKKFRRTATLLKSELEKDPNNVYYQYQLAKSYIMHGDYEDGLNQIEVAYNVMQKKQTNRSQSYIYNVYARVALHLKQFDKVIEIAEEGIGYRKDYIDLYFLLGKAKYNKKMNNEALNAYRNYLKLYKQGNDLGCLKDLSLEIKYIDEKSKDSVVQDMVYIMIEQEEFETAKKLLNEVDDSSIRNKALGKIYLAARKLEDLCEHYDSLNESSQQELEYLIEDHKSRLSDDEKTDLEISLSHLSSPYSLLNNARNSSDPEVIKNIANDLINKHNLIELPIFYCEIITLCLKNNISLFRYFKNFDSNSIQKMMNFVLNSAADSKWLIINYLNNIKPIRDNDYNNNRIYYSIVLPLLIAENQEATIEKRNITDEFIDLFERYIKSGKNAVRIIYNKDKLKLYYQTINDAEHKLFCLLLIMDDAIAKQNIKASLKYLKETVTTFKSLSKFYDVLFINTYIEFGDIFKKQNKMDDAIEMYEEALLKSINEKQHQFILEQIENCI

SEQ ID NO: 1527 - protein, 640 aa, Paenibacillus naphthalenovorans
MTKKPTLSICMIVKNEENNLKRCLDSVVPLLEALSAELIIVDTGSTDKTVEIAQAYTSKVYYHEWNHHFSDMRNKSIAYATGEWIFILDADEELEDPEKLVALLQSETVNEYNTIRVLGKNFLTEARDKYVVHISERLFRNTGKFRYEGSIHNQPKYENPAMHADIYIRHYGYNNDDPELMEKKFKRTSSLLLKELEKDPDHIYYRFQLARTYFMHKDYREALLQIRKSYALLKKHGKEIVARNYYVIGEHARMSYVCKIFDETVRIAKEGISLTPQYIDLYFYLADALLAQQEIDQAIETFKTFLKLHQEYNQKGLSKLSILELYTVDETSKSVAAYKLARALMENENDAEAVEYIDLIEESTHKVDLVINVMLKLQRYEELYQFYKSIENNSVAAYFIHQLEIAAAALKDAEEKLLIASVFSKEEGPYGQLNQIRLTDDPRLIKDFLVSNMMSKLPVFPYFEIYRYAIKRGLPVISYFKSLENGYIKLYVKMLLDKFDEAQDYFMQYLKGEKIRPNDYQSNRVYCAVANVILLTAIERSKKEKSVIDREYHDIFNLYTERGIQYITYLYQLTPIRLVYKTIDSAEDKFFILMHLAEEAKAKGSIKYASHYYKEAAEAYPYVAEMLKPFMEQRILTVIE

SEQ ID NO: 1528 - protein, 372 aa, Amycolatopsis xylanica
MPDKISIVVLAKNEERCIARCLASITGHDFEILVVDTGSADETTTIAENHPDARLVHFPWSDSFGAARNFAIDHVSTGWIVFLDADEWLSERAAEELKTRLSAWSGASNLARLVLTPTIFDVDRGVAEEGVPRVFHAESSIRYRGPVHEYPVVEGEDDVRVELARLGVEFQHDGYHPEVARAKDKLHRNLRLLDLARAHDPDNPRWWYYTLRDGLPVFDRDQIVSLCETLRDLPSDSRRTGELLSTAELYRLALGTACQGLAALRDWRTLDRYCAELDRLGSPDGTYFRLMAELHNGVLTTRDLLGAVRLRGDEKLVATSAVDPAGRHLDALIVALLARLRGEPEAERYRALCEPWTDVFFDGGRERSPVAR

SEQ ID NO: 1529 - protein, 370 aa, Pantoea ananatis
MDVTAAVIVKNEERCIKRCIDSVLPLFTEIVVVDTGSTDSTLDIVSSYEPSQVKLFHCTWNDDFSEPRNMAISQANCKYIFFIDADEFVISDKNTVCSEIERVERICDNHTYAWSPGIRDTGDNNITCSVRRFFRNTGFFYFAGYVHEELRNKEHNAVTEQKLNIILSHDGYSPEVMCSKEKKERNRHLNIKNTLLEPDNLRWTYFLYRDNFEDFSSEEICYNLSRLLKKNQDEDLSLNNIIFCDYTFPLVDLMVMAKLELMDDEAGFNTLLSVMNSLIPNNSNAVYYEVVFYLLKWKIFANKTMARLIRLRKENKLLHDDMLHSEGMHIDAALAFYLHEAGFSEQGEKLLTSVRKSGFITPLTEKYICS

SEQ ID NO: 1530 - protein, 592 aa, Unknown
  Description of Unknown: Thermoanaerobacterium sp. RBIITD sequence
MQPLISLCMIVKNEEKNIKRCLDSVKDLVDEIVIVDTGSIDKTVEISRSYGANIYSVEWHDDFSEARNKSLDMAHGKWILFMDADDELDKNDLKKVKEILNDDDEAYFFKTINFVGNSPSYETAINMNLRIMRNRPEYRFIYPIHEQIAVVIQNVNPNAKLINTDIKVYHYGYLNYEVQNKNKRKRNMLIINKVLKNNPQDPFMRFNLGNEYFALEDYSKALDEYMISLKNTFAKTGYLSKLYVRIVLCLNELGRYNESIKMIENGISYYQNLTDLYFLKGYILHIKKRYTIAERMFKKCIEMGDAPDDLGFIAGTGSYRAYYALGKLYLELEDYDVAYKNFVDSYNNNRKFKEPLYDMSYILLITKPLDIAMNEIEKYLDPNIYEDKILLIKIFMRFKRYDVCLKYLNELILNNTINDEVLYLTGNCFFNLKNFNNAYKYWSKVGKDSSFYENIVPDLILLNIIKKDNINEELKYIKKIKPKLYDVMLRLMILSKGEMPTTLSDDEKLSSEYEDIIFEILERLLYLEEFEIFEKGLNLLNLINDNKVLLRLGKLYYKYGFYQFACDEILRSMKLFNIYDKEALAILDEKMD

SEQ ID NO: 1531 - protein, 336 aa, Acetatifactor muris
MITISLCMIVKNEEKILARCLDSVAELADEIIIADTGSTDATKEIAGRYTEHVYDFPWVDDFSAARNFAFSKASMEYIYSADADEVLSPENREKFRLLKETLLPEIEIVQMKYANQLQFGTVYNFDEEYRPKLFKRKRDFVWEAPIHETVRLTPVIYDSDIVITHLPAESHAKRDLENFHRHCINGYRLSKRLHGLYARELMLAGDEEDFAQAADIFLESAADNERDGEEMAQACCVVAKAARLAGDTITFFKYTSKVIAEEACSEICCEMGHFYEGNEDWEEAAVWYYNAVYETSPILNLQAGGRESLEGLTRCYEQLGCPEQVQVYREELRRRG

SEQ ID NO: 1532 - protein, 350 aa, Paenibacillus baekrokdamisoli
MLVSVCMIVRNEEGNLERALSSIPGSFEKVVVDTGSTDNTVEIAKKLGAAIGYFEWVNDFAAARNYSISLATGKYVLIMDADEALPSGIDEHIERFLAAYPNQAVAFNIANEIKGEIHRHTSLRLFPNNPAFAYHGKVHEMVHYNGQLSEFVLSDLTMHHYGYEEEQYSDGKKANRYLELYHKHLEANPNDGYMLYQLGKLHYSIGQMNLALEAFERCLELNERGHLYYPVMLVMLGYVLKEIGQSPIAEELLVSVQPDYPQFPDLPFLLGLLAMETGKMADIEIHFLRALEIGETKKFSSVEGVGSYKAKYNLAVYYEITGSIDRAIQYYKAAAEADYLPAKKRIFKLS

SEQ ID NO: 1533 - protein, 335 aa, Unknown
  Description of Unknown: Lachnospiraceae bacterium NK4A144 sequence
MTFSLCMIVKNEAEILERCLDSISDLMDEIIIVDTGSTDQTKEIAKKYTDKVFDFEWDDDFSAARNFAFSKATMDYIYSADADEVLDEENHEKFRMLKEALLPEIEIVQMYYTNQLEFNTTYNFDEELRPKLYKRIRTPVWVDPLHESVRLDPVVFDSDIKIKHCPTSEHQNRDFAIFQKEIAANGKLSEKLQKMYARELFISGSDNDFLTAEPYFKKRLDKDSSDELIMHDVCVLVKCARLRDDSDAMLYAAGRALAADDTPSEVVFELGEFYRGRHNYHEAVMWYYNAAFETMPILNQKYNTLFPFMGLHVTYVILGDREKAAKYGTLMREYQ

SEQ ID NO: 1534 - protein, 361 aa, Unknown
  Description of Unknown: Bacillus sequence
MVEISLCMIVKNEEEVLARCLDTVKDIVDEINIIDTGSTDRTVEIAKQYTDRVYFFEWIGNFAAARNESFKYATKDYILYLDADDILLEEDQKKLKLLKETLDPSVDSVSMYYDAGTDEFGNVTLRYRRNRLVKREKNFKWKGDCHQYLEVFGKIIESDISVTHKKIRHSVGRALNIYQNRIDRGDKFSARDYFYYGNELRENGHYQKAIEAYEQNIGMTDGWIEDKVYACINKADCHRFLGDVENELKSLLKSIEFSKTPRPEACSRIGYYYQLKRDYKTAIFWYNLATQQIPDSGQWSFSYPAYYTWYPHLQMCVCYYNIGDFESAYFHNESARKYRPEDQRILYNKSLLESKFGQKTV

SEQ ID NO: 1535 - protein, 351 aa, Clostridium amazonitimonense
MISLCMIVKNEEKVLDRCLNSLKDTLDEIIIIDTGSHDGTKEIALKYTDKVFDFTWCNDFSKARNFSISKASNDWVLILDADEVIKEFNIGSLKSFCNENNNKVTGRIKIVNEYEDDYGTKRYIERINRLFNRKFFEYKGSIHEQIVCKNGLDYMTQNVDIVVDHTGYSKEVLNRTNKIQRNIDLLRVAIKENNKDPYLYYQLGKSYFMGKNYKEASIFFEKAVTLVDNFGYEYVEDLIESYGYSLINLNEFKKAKIIEKYNKYYLSSPDYYFLMALVYMNNNEFQKAAETFLRCTEFKEGKVEGITTYLPLYNIGIIFECLGLKEEALSYYNKCGDYNPAKKRASVLLED

SEQ ID NO: 1536 - protein, 284 aa, Porphyrobacter sp.
MSHPDPSELPVTVVVPVKNEEANLARCLERLGRFSEIVVIDSGSTDRTCEIARDYGARVVNFRWDGKFPKKRNWFLMNDPPKENWVLFLDADEFVDKAFCDALQAELPDSDLSGYWISYDNFFLGRPLRHGVAQRKMALLRVGRALFERIDEDGWSQLDMEIHEHPIVEGEVGEIKACIEHRDDRGLAHFVTKHRDYAQWEAKRFAKMQGDEAVWAAMTDRQRFKYRHLPKWWFPWFYFAATYFAKLGFLDGGAGFHYAAYKVWYFQTIRLLILEQSAANKTHG

SEQ ID NO: 1537 - protein, 593 aa, Clostridium acetobutylicum
MSNEISLCMIVKNEEKYLFQCLDSVKDIVDEIIIVDTGSTDKTVEIAKKFGAEIHYFMWNNSFSDARNESLKYATKDWIFIMDGDDEFSKDDKEKFKELVKNNLKEDCLYYFETLSYCGEFVDSSNISVNLNPRLFKNNYGYKYEGIVHNQLINTEKEIKNVIYNIRIYHYGYLEDVSKKKNKRGRNIPLLKKQLKENPDDRFAHFNIGNEYYAIGDLQKALTHYCEAYKDFNPSSGFGFVLITRLIVTNFGIGKHEKAIEFADIGLEYYPNATDIYFLKALIYEATRRPTLAIKALKRCIEMGEPPSNLKLYYGTWSFKALYELVNIYMGLKDYEEAYKYCIETIKAKNDFVNPVYVIGHILKERKTPIEEFKVELEKLFSDYPKAYFFIANILYDEGYFNEALEYTDKCEKEGLNSDAILDLKLKAMIRAQKFNECAEANYFAKESVFYFNASMYKVLSLVLIGKFKEALKDLEIFKDGKLKRQDKKELEVYSQFVKLFMNEETKVLSEDKEDKEYTGFILDICDILLSNKLYDEFEKALNLFNLISDENVLLNLSKLYYKHGIESMAKKEAIRSIKEFEVFDNEILDILR

SEQ ID NO: 1538 - protein, 362 aa, Bacillus sp.
MVSISLCMIVKNEEEVLARCLDTVKDIVDEINIVDTGSTDQTVEIAKQYTDRVFFFEWIGNFAAARNESFKHATKEYILYLDADDVLLEEDRRKFKELKETLDTSVDSVSMYYDAGTDEFGNVTLRYRRNRLVKREKNFVWKGDCHQYLEVFGKIINSDISVTHKKIKHSVGRNLNIYQNKIERGDRFSARDYFYYGNELRENGHYEKAIEAYDENIALKEGWIEDKVYACINKADCYRFIGDLENELKSLFQSFGFSKTPRAETCSRIGYNFQTKQEYNAAIYWYDLATQLHPDSAKWSFSYPAYYTWYPHLQMSVCYYNLGKLQKSYYHNEEAAKYRPQDPRILHNKNLLEGKLGIRVGI

SEQ ID NO: 1539 - protein, 368 aa, Synechococcus sp.
MIVKNEAAHLARCLASAQAWVDEIIVVDTGSTDETLAIAESFQAQIFSFTWCDDFAAARNASLEQAQGEWIFVIDADEELIVTDPAWLSQLREQTDLSYQQYSIRRLEAPQAENSPTMTDFWMNRFGRNQGGIHYAGRLHEQLTHSGSYQTGYLTGAYLYHHGCTTRTEMIQKMKTRNIPILEAMRQEGNIGLMWLITLADHYKACGELELAQECFQAAYERILPNLLSGEIPQETGFVRQLLFVLAWDALEAEDYDQAQFLIHNGIRWFPHYAPLIYLAGLLVFYLGFYLGAVPYLEQCLRMGQRQTYDRNEPFDQAFLKAHPAFSLGYCWLKLGRIDQAETFFELTLTHDPNHQPAQEQLQQLREL

SEQ ID NO: 1540 - protein, 353 aa, Lachnospira pectinoschiza
MISITLCMIVKNEQSILERCLISYAGTYDELIIVDTGSTDSTKDIAHKYTDKVYDYKWCDDFAAARNYAFSLASCDYIFSADADEILDERNNQALKDLKSMLLPEIDIVQMYYVNDNDYNSVYNVHRELRPKLFKRLRPFVWTSPIHETVRLTPVVYDSDIEILHRPVSDHSRRDFSTYIKAFARGTQLEDYVITMLCKELYISGSDKDFMDFKDIFADILINENRSDDIRQEVNCVLVKIYRIAGDMGEFFKLALRCVADNPSSEICYELGNYYYDINDYAEAAMWYYNAIYETSSVLDITSGGNKPLYALSRCYDKLSETSEDIEQIAQFRQMAEDYKYQAEQWKLPDEIV

SEQ ID NO: 1541 - protein, 478 aa, Clostridium sporogenes
MKLSIAMIVKNEEKNLERTLIPLKKLQDYIDAEIIIVDTGSTDNSVDIAKKYTDKIYFHKWNSDFGSMRNLSIRYCTGDWILIVDADEELYDIEELANLINSKILKKYYSAFIKIVDFSQSIQNSVSSGAISPLLRLFKKNTVKYEGIIHEQPICSEPTLDSQIRFIHYGYDNNNYELMEHKFQRNIKLLFKELDEKPNSIYVYFQIATSYLMHKDLQKALKYIEIAYKKASKKGLCNYIYVIDKYCLILYTLKSYDTLIYKAKEGIKYCDKFIDFYFYLGEAYNNLNQYDKAIQPYEMYLDLYKNPNKNDILAEFSISIFTIEYKNAVIYHLGLCYYQNKFYEKALSLILTIDDNNFMHDKITIICKIIEDGGLWNKFYILNNFIDIHNYDEILIFLHNNVFMENLIMINSQEIDGFLKEMLDIVIYFKNNGNINYKHLEKIKRIISRNKKLYSIYVYYVLKFDINEFDFFINYGKL

SEQ ID NO: 1542 - protein, 628 aa, Paenibacillus odorifer
MKKTVSLCMIVKNEEKTLARCLDSVVGKVEEIIIVDTGSEDNTIEIAKRYTSNIYSFQWTGSFAEARNFSIRQSSCDYILVMDADEYLDEDSDIHKVCVTGFDYYVLKIKNYLSFDQTFIHYNVRLFVNNENLYFENQLHEHLNIFDERFKFVGDDVDLLLHHTGYSNETIEEKDKLQRNLPIMIREVEENPNGFNLFNMGKLYLSLGQYHKAVNYFKKAYPLSKSTLYFPDLLTLFASTLGKLNRYEDGLSVINEAVRLYSEDSEMSYTQGQLFMEAGYLKDAELSFRKCLLMGDQGQGAMVYEGSGGYKARFMLAEVYERQRKLAESYELVIKVLEEKKTHIPALTKYFEIVSKANIPADDVYRNLELIYNVENINDLRNLIDTLYELRHPLLNEYIAKYKLQTQPYICAVASQYNKKYELARIQWSNISHLPDEVGGDLLLLAIILQDLSLFHRVRPLLNVSKKESETIVNLINREDNSTIRLTSHVEKLLFEVSRHLVILQEFDVFQVVLEFLYRGSVETKYNLCFFLAEYSFVEVAIDMLIKLYDEQPYNIKTITLLGDLCLHSGYIDDAHLFYSKLMDLKPDYNTYERCYDCYKKQGDIKAMNILKNEIKRKFPLVSWVDAS

SEQ ID NO: 1543 - protein, 247 aa, Paenibacillus rubinfantis
MGVSAAMIIKDSSRCIERCLDSILTAVDEIVIVDTGSTDGTVEIVEAYCQQYKHIQLYHFQWINDFSAARNFSLSKVTQEWTFVVDSDDVLPEQDQSKIREYTNQMDAQGKKCVFDIVYDNTVDGKIVETIPVGYVRLFPSSLRFQDKIHEQIVYHPLERIQSDIHLLHDGYDFNQIDLRVKKKRNIDLLIQSLQEDQENARLWMHLGREMIGLDNDKAIRYLNIAESKAKSPEMLDWIRKSKLEMS

SEQ ID NO: 1544 - protein, 356 aa, Bacillus sp.
MVSISLCMIVKNEEKTLSRCLNSVKNIVDEIILVDTGSNDQTIEIAKKFGAKIYHFQWIDDFSAARNHAFSHAHMDYIFTLDADDVLSKADSEKLEQLKKSISPTIDAVTMKCLAGFDESGNVLVSLRQVRMVKRENQFKWQGAVHEYLEVHGNMLHSEIAITHKREHSNSDRNLRIYEQRQKNGALFSPRDLYYFANELYDHQQYERAIQNYQKFLQSGKCWIEDVIQAHGRIAECYAALGKMDNAIHSALYELKFGPPRAESCCRLGFFFLQLSRPEIAVHWFQFATQLPAIDTGGITNHACSSWIPHLQLSVCYSHLGDYQKALEHIEMAKTFNPEHDLILKNETILKNFIKK

SEQ ID NO: 1545 - protein, 358 aa, Pelosinus propionicus
MITISLCLIVKNEEETLARCLESVKPGLDEIIIVDTGSTDSTKKIALQYTDKVYDFVWIDNFGAARNFAFSHATQDYIMWLDADDVLLENDLQKLLLLKHDLDLAVDSVTMNYNLASDENGNIVSSLRRNRLVKRTRNFQWIGAVHEYLAINGKVINSEITVTHKKERCDTADRNLKIYENRLANGEVFSPRDLFYYGNELVDHQMYEKAAQYYQDFLNTQLGWIEDNISACGKLADCFSHIGDEQQKLKYIYKSFEYDTPRPDFCCRLGYHFLNTQKYSNSIFWYNLALDLKESNDHSSLKNYACSTWLPHLQLCVCYSKLGENSLALEHNKKAESYVPNHPSVLYNKEYFKKLFNS

SEQ ID NO: 1546 - protein, 657 aa, Pelotomaculum thermopropionicum
MDARISLCMIVKDEAQNIRRCLESVTGAVDEIIVVDTGSTDESCQIAGEYGALVHLFPWNENFSDARNASLELATGDWILFLDADEELAGESKEALRRLTADDNVEGYFVKIINYLGNEGWIETCPDLVFRLFRNRPEYRFRGAIHEQIADVILEKNGKAAYRMAEEIVIIHYGYLDRQISEKDKKNRNLKIIQKELGENPENRLLRFHYGVELFRAERYAEAADELTRAANGIDPNTIYLPKLLRYIVMSHQSAGQPEKALDVARLGLQVFPNYADLYYYCGLLYLELRRYTLAREYFLKAVSMPEQPAQYASFGGVRGFRSYYHLGQISEIFLDYEDALRHYISCLRDNPDFTPALENIVRILKPRENPDYAKECLEKVFEFSTPRANQMMGNIYFRQGAYSLALEYFNRYTGSEPASPEIQLWKAICLIQLRRYLEALRIIESFNSNSHLYPLAMLNKLLCFWVQGKKQKVCSILAELRALGLAEDTDKVLTLFLNSQDKRKNVYRVTLGQDGVALLLDIVKRLLDMNEADRAIYLLNKVNPESMAEYRLTIARLFYDFGFKEKAELLLREYLTANQDGEAHFLLAEICRETGNYIEAAQHYQYALEINPDEPRYYLRQINLYDNWRKKILQEAIEKYPNLEVFIKLSEEAPVN

SEQ ID NO: 1547 - protein, 625 aa, Paenibacillus polymyxa
MMKTIALCMIVKNEQEHLRRCLDSVKNKVDQIVIVDTGSTDETVNIAREYTNDVHYMDWNNNFAAARNESIKYATTEYILVLDADEYLEESADLQKEIASGADYYFTKIHNIMSFERALNHLAIRIFSNNKDLYYQNRLHEHLNIMDEKRNLISGQAGLVIMHTGYTDEMMEGREKAKRNLPLMLKEVEENPTVYNLFNMGRTYMWVGKYEKAITFLKRAYPMSKNLTIASDLIITLCRSLGEMKRYNEALQILQEAVVVHPTEVDLLHLQALYYMEIDYYIDAIDTMTKCLDIGDQGITVTEGHGSYIAHFRLAEWYELQNDLTKSYEHILEAFKLKNDFAPIMGKYFKIIEKANVPLEEVFVSTNQLYPISNSGQLEKMLEVMYQLRHPLLQRYLTEYNVTVQDNVMATARQYARDYDGAQALWLGIEGVDEQNGEDILLLSMILKDRTLFGRAKTLLNLSQKEQKNLYKIIIDEPSGDTKLTLHLENILERVLMHLIRLQEFDSFEKLLNYLWQGSVDVKIKVCEYLVSYGFNEIAIDLLVKLFEQHPRNISIIKMLGDVCLSNEYYQDAQLFYARLLEFHPEYSSYERCYLLSEKVGDQTSSFNIKESIKLKFPLSSWVVG

SEQ ID NO: 1548 - protein, 645 aa, Sporolactobacillus terrae
MKPFLTLCMIVKNEEKVLKRCLGSVFKVVDEIIIVDTGSTDNTKAIAKKFTKKVYDYKWIGSFSNARNFAQSKATGEWILVLDADEFCQEDNALEFKKYLMNKQDNVEAYDVLTYHFLGNEGASVIQNKQMRVYRNISDIHYIRSVHEQLINKQRALNSGHSTLLVYHSGYMRQTIKEKKKHTRNKKLIDQELLKNADSGFDYFNLGNEYSSIGEDEKALENYIKAYQLKRHFKYSWVSLTIVSIVNCLINLKRYSDALDVIRDSEEIYSRSPEFRVLKSVIYLRQGRLEDAKNELETIAFHENEFPEVIVNVNYLIYIPYKVLSEIYTKQNQIEKAVQCFIKALDSNLNDTELLYRFFRLVITRVNDQEIITYLTKLNFMSDVKNVKRFIKVLTNLPGSLNLINKILRIEEVDKSLIRGIQPKIALIKDESEKAMKIFDSMNLNTTTQVINEGIFDFLDYIILCFILNKKENLLSLSYGDEENKNFVSFLCNGQPDCQQNDGAYLLLLERTINLNKFDLFEKLLSYRTAFDDTINIKIGHLLYEHDFIKLAMSFYQEVDISLFDENTYINIINEFIKKNELEDAYRFALQAINSEFYSFGIVKQLILLTNHSKDNKVKFATRQFALKCFPDSEELKNAMFNGIG

SEQ ID NO: 1549 - protein, 550 aa, Bacillus sinesaloumensis
MKPFLSICMIVKDEEKVLKRCLESICGIADEIIIADTGSIDKSKEIAAKYTDMVFDYKWEGDFSKARNFAASKASGDWILVIDADEFVDRENFMAFKDDLKLNPPDFNILAVQIVNFVGQNGKDTALNFHERLYINDGKISYYRNIHELLKHRDSKESKGYSKFQIYHSGYMKNVVNEKEKSKRNLKLLINNKVKEPIDYYFMGNEYDQLDELDKAIKCYQKAYKLKDDINRDWVKKLLLRFVNTLHRAKRDNEALEIIDSCENIYPGLVDFKFYRGKIYFDNEQFRKSGEVFEKILAEKHHLIADSSPDFLEFLPNKYLGEIYENENRLHLAVKSYSKALSINDTDDYIWIRLIGLLSKHSTLEELSEFLNNNLLNKSNITVKRVISILLSVPNLDVQKLTRSLLEDENLTELENEGLFLRNLLLDGDTDEILTIINQKSESEIFTLLSTGIFNIIDFIILILKTNNEGYKKIIHSIKFNKPINNLLLLLLEEKKSNLSVFEQELFLLIYKQSYILGASLVIEQLETKVPYLSRENRNKLNKIRSGKII

SEQ ID NO: 1550 - protein, 369 aa, Unknown
  Description of Unknown: bacterium 1xD42-87 sequence
MSRVEVRTITMIPISVCIIGKNEEQHMENCLAPLASLPFEVVYVDTGSTDRTKETAAKYGAKIYDFKWIDDFSAARNFALEKAAHEYVLFIDCDEYLTELDTVPLFTALEAHPQDVGLLLRNNYYEANGTQTNYPDRVERLFSKKHFHYKGIIHEQVVRQGSESPFYERYEIPLIVDHAGYSGGMDAMRQKAERNNALLFREIKRTPNDPYLYFQVGQSYNGIRDYENAYTYYKKAFSLPIIFREPWVQIMATAYINAMNHTGRSAEAQAFFEPIYEHFSGDANFYCSMGNIYLNLDPPQPLRAMAEYVKALHCPDAREKGANSFIPYYNIGLVNEMLGSQDSALTFYQKAADLGFAPALERLSDWNGV

SEQ ID NO: 1551 - protein, 621 aa, Paenibacillus odorifer
MIKTVSLCMIVKNEEKYLSRCLESVRNKVDEIIIVDTGSTDSTLEIAKQYTNNIYHFNWINDFAAARNESIKYATSEFILIMDADEYLHPDADLQKDISSSYDYYFIRIINDMSYGRTLKHTAIRLFANHKRLVYHNRLHEHLNVMDNQTKYKGIAGEFIIYHTGYTNEVLQEKEKKNRNLTLMLQEVAENPTGYNLFNMGKTYMWLGEHEKAIPYLQKAYSLSKDMIIIPEVIVSLCSCLEALHRYEEGLEILKDAIPIYPNETDMRHMQGCLFMEAGYTKDALTTFEKCLELGDQGVTVTEGHGGYLARFKMAEIYEGAYQLSKSYDQVLKVLEEKKTFGAGIEKYFRIVSKANIPNEEAYNNLQQIYSITELEDLKLILEVLYKLRHPLLSKYIDLYKVNIQKNVLIVAKQYSRKYEEAHDLWLSMEEQPKENAEDILLLAIILKDQKLLQLAIKNLNLSSKEVKILKAIISQELVKSITPRMERLLCKLSEQLIILQEFNNFQILLEYLLKGSVDGISSLGKLLSEYSFKEVAIDILVEVFKNNPNNVNIIRILGDICLNQNYLEDALLFYSKLLNLCPEYSTYERVYELYEILGDKEEMSKIKITINSKFPLSSLA

SEQ ID NO: 1552 - protein, 350 aa, Clostridium tyrobutyricum
MISLCMIVKNEEKVLNLCLGSIKNFVDEIIVVDTGSTDNTKYTALRYTDKVFDYDWCDDFSKARNFSIARAENDWILVLDADEIVKQFDRNSIFEFCSCVENQSKVGRLKRINEYEDSYGKRRYIERISRLFNKNNFCYSGSIHEQVVYKNKGNYDTHNIGITIDHVGYSKEVLKRTNKIQRNIIMLKKEIIKNEKDPYINYQLGKSYFLEKDYKNAILYFKKSILLVDNFNYEYVEDLVESYGYSLLNLNKFNEAAIIKTYKRYYLNSPDYNFLLALVYMNNSKFQQAAETFLHCTELEGGRIEGITSYLPLYNIGVIFECLDLKKEAVKYYSMCGNYELAQKRISELK

SEQ ID NO: 1553 - protein, 638 aa, Paenibacillus sp.
MKPLLSLCMIVKNEEKVLERCLLSVKTLVDEIIVVDTGSTDQTKTIAARHTDKIYDLSWSNDFSAARNESIRHASGRWILILDADEFVQPADHDRLRKYLLEYKSDRPCGFVLNIMNFGGSGNDESNVTESTGARLFLNGKSIRYIEPIHEQLTSDYGTPSFTPYPFVIFHTGYTVQVVQEKKKSERNLSILEKMNSGEKRNNPYFCFVLGNEYTSAGREDEALEVYGRSLECSSPSDTWYFHLLESLVTLEMKKGNYARAHTNIKSAIKLIPDRTDFRCMEGILFETYGLWNAAEDVFHQCIQYAEEAEKKGVPYWIIKPSYGKIIPHQSIAEIKRRKDDISGAIHHWVKTLQLQPKNYTVLQLLMDALLQFESYDQVASIIEQLYPLHQPLNKMLLYKMALKIGSIELASKYATEVQKLDLRLDDVDTVQQNLLLRNWSALTTSSLQPASLEDSLAIAAAIVQQEISFTDAAVGDITACATIMQQALLAIDNKTWNNEILTNNEERFTQTLQLLWRYGYTEIYLSLMQNMANETILNWMADWFYIRGLFEQALDLYSVLLENNLLHAKGLKNVGVWYINCGNTNEAFPFLKASFKKEASVDIIGLFKEQASPETYQEFHTIYMERFPDISLCIFPR

SEQ ID NO: 1554 - protein, 379 aa, Thermosynechococcus elongatus
MAPLLSLCMIVKNEAHQLRRCLQSVQPWVDEIIIVDTGSTDETIAIGREFTPHVHSIVWQADFAAARNASLAHASGEWVFYIDADEELVVMDPQWRDQLTAESANTINQWSLLRREQAGERNWSEFWNVRFGRRFPDLHFAGALHEQLSYRERPAVVGQLQGVYLIHHNQQSQERFLAKIRDRNIPILEKMVQQGDRRLQNLVCLGDHYAACGDGDRAQAWYEQALEQIAPAVEQGILPRDTTWLRHLLFWVSYRAFEAKDYETAQYYLSYGLRFFDHYPPLLYVTGLLIFELGLHRGALPYFHRCLDLFEQGTYDRAEPFDRQWMTTQPAYSLGFTYMTLQERDPAIAYFQKTLEFNPDYPPAQMYLQQLLTASANQS

SEQ ID NO: 1555 - protein, 331 aa, Oceanobacillus jeddahense
MIVKNEETFLEKCLTSVQGFADEIIMVDTGSTDNSINIAHTFQVKVYHYEWEHHFAKARNEGIKKAQNEWILWLDADECLDIQDPETFKKRLNQIEANILFLPITNFTGDHLESEDLTSYIHYQPRLFRNHQGIQFIHRIHETLDTDPEKMTTDILDLPILHYGYIHEITKKRDKSARNKQILKLEAAKETHSPWIEYHLASEYYRDKAYNQAFEYINQSIYKFLLEGQKPPSILYKLKYDILIQTNSIDQALPGIEKALLLYPDYVDLHFYKGLILFQQADYQAAKRCFEKCLELGEVHPNYLILKGVGSFRAAHYKSMCMEKLNTSDEN

SEQ ID NO: 1556 - protein, 359 aa, Romboutsia ilealis
MITLSLCMIIKDEELVLDRCLKSIYDVADEIIIVDTGSTDNSKDICKNYTKNIYDYVWNDDFSAARNFSFEKATKDYILWLDADEIIDEKNKEKLLNLKQVLSLDIDVVTMHTYMDIDECNNPQITMVRNRIVKREDNFKWVGFVHEYIEASGNVYDSDICIIHDKIKPVSERNLKIYKKKVEEKQIFSERDLYYYGKELYCNRCYNEAIDVLEEFVSKGTWKDEIIDALCKIGECYLCKGEKEVGRKYFYKTFEYGPPQGEVLYKIAYSFQDEEKYDIAISWYEIILRLPIPDDCYQCRNICCLRFNPHLNLCYCYFKCGDLKQAYYHHKHCVKINPNNPCVKYNENCFKLIMNKNKV

SEQ ID NO: 1557 - protein, 345 aa, Clostridium sp.
MISISICLIVKNEEVVLSRCLDSLKGIGDEIIIVDTGSTDNTKKIATKYTDKIYDFKWIDDFAAARNFAFSKATKDYIYSADADEILNNENHKKFIEIKQVLLEEIEIVQMKYTNQLQYGTTYNFNTEYRPKLFKRLRTFTWIDSIHETIRIEPVIYDSDIEIIHMPETNHAERDFKTFLTVIKRGERLSSRLLSMYAKELFISGKAFDFKSGLEYFKGVLYDEERSNDEIKYAICIISKGYRLNNDVYNFLKNCMKGVADKPCSELCYELGEYYYELKDYDEAIIWYYNAAFETESFLNVHYNGDYPLRRLGECYDAIGNKEEAENYMKMSVNWSIPESEDGRI

SEQ ID NO: 1558 - protein, 654 aa, Desulfotomaculum profundi
MGNRISLCMIVKNEEGNIRRCLQSVAGVVDEIIVVDTGSTDATPEIAREMGAKVYSYDWNENFSDARNASIQRATGEWIFFLDADEELARESRDVLARYTAEKNVEGYFIKIINYIGADGWAETCPDVVFRLFRNRPEYRFRGAIHEQIADVILEKNKQASYGMANEIVIMHYGYLDSQIDQKDKKNRNLKIIEKELESQPGNYLLRYHYGVELFRLEKYAEATQVFVETANHTDPQTIYFPKLLRYIVLAYHSAGQPEKALDTIAQGLRVFPDYADLYYYGGLCLLALKQYMKARDLFLHAVSLPEQPPQYASFGGVRGFRAFYFLGDIAETFLNDEEALDYYLKSLRDNPNFQPALEKIIKILNPRSNPEYTRECLEKVLDLSIPQAKLVLANIFFQEGAYRLALDFLEEAIQTGNGTAEILYRKAFCLIQERRFLEALRILSGYSPDSYLYPLAKLNELFCFWVQGKRKKVLSIIEEMRAMGLSEETDNVLKLLMKIQEKRKTVRKMYLGEEGMALLLDLIKRLLNLGEPEKVNELLNRVNPDCLAERKWDVILLYHEAGCREKSVELLEEYLTVSRSGEAHFLLAEAYRELGNPAAADLHYRHAIELDPHQPRYYLKQIELYENWRERLGKELADGDQRNGEITEEVHLE

SEQ ID NO: 1559 - protein, 280 aa, Prosthecobacter debontii
MTAPISVSICIPVKNEAVNLPACLSALKDFDDIVVVDSGSTDETAKIAERAGATVLQFRWNGQFPKKRNWALNHHSFKYPWILFLDADERMNPTFVEELRRVLPTTSHVGFWISFTNWFMGAPLHHGDVFRKLALFRREAGAYERFPEDYWSHLDMEVHEHPLLHGSVGELKSRLDHQDYRGLKNYLARHNEYSSWEANRYLWLDQADVSAWAELNPRQKFKYRNLHRWWLAWLYWFVAVIVKKGFLDGPPGIALGRFKRHYFQEIRLKIQEARRTGKAA

SEQ ID NO: 1560 - protein, 652 aa, Paenibacillus borealis
MKKTPRKPLISLCMIVKNEADTLARCLQSVRGVADEIIVVDTGSTDSTVSIARSFGARIIPFTWNGDFASARNAGLAVAQGTWILVLDADEELEPGSKKELLVCAEHTEYEAFFVRIHNHKGTDRASQTITVNPILRMFKRRVNYRFSGIIHEQIAAVIVQETPAAAMHMSTVVVHHYGYADGVVEKKDKISRNIGLLKEQLKLNPGDAFHHFNMAVEYMRLGDYGHALEHIQTSLDLVEPDTSYIHLLYKYEIRCRAVTGDLPGALEACERGLALFPDYPDLHHIKGALLLQVSAFAEAKAALGRALDIGVSPPAYHTESGLGTYLTRTLLGQVCQQIGEDNEAIACFTRAAQLHPEPLPLVTRLVRLFKCAGRELELKGWLAEHLPAILAEQRQELVRLLVTDGCYAAAADVLGGGVGEGVAGERSAGERVMREFGVGELGEEEQVVREFRAGELAAEEQVVREFGERKLAAGETVARERGEGELAAGETVARERGEGELAAGETVARERGEGELAAGETVARERGEGELAAGETVARERAANKRSSGAHAENGHDYAGEPEAASSDSLFLLLQRAEAIPAAELKHGDIAALLQHPAIARTTPATESAASAVQPWISLADKLLATLEASSVFSPAAARARLALPLPRPAD

SEQ ID NO: 1561 - protein, 418 aa, Anoxybacillus thermarum
MKPFLSLCMIVKNEEKVLQRCLDSVHGIVDEIVIVDTGSTDATKEIALKYTNKVYDFEWTNSFADARNFAQQHATGEWILVLDADEYVERTNLQEMIQQLKQTDGRVEAYDVGIYNFVGAYGERVLQHRHTRIYRNVPYLRYDRAIHEQLRHVSGKYVEAKPGILTVYHTGYMRHVVAEKKKHDRNAQLIEREMEAGESIAFDYFNLGNEHLSKGEVEQALQAFIQAYQHKKDIRLSWVSYCLVQIILCLKYLQRFDDALRVIADVENIYSETADFQFLRGEIYYLQHRYDDALKQLEYLLENKEKYPYTIKTFEYVEYDPHMLLGQIYKHKGNLQKAIYHFSCALSFNRKSYEALYNVLQLLARVHSETEIIQFIESKQLANDLLAISLVARIASALHLENVMKSLAAKLDDAVIQV

SEQ ID NO: 1562 - protein, 622 aa, Paenibacillus sp.
MIVKDEEQWLPQCLDSVQAAVDEIIIVDTGSSDRSVAIVESYGAMVVHLAWSDDFAAARNAGLARASGDWILFLDADEALDQVAQEQIRSWTAVSGCDGLFLNIHNYTGSGQQGATVNPVLRLFRNAPEHRFEGRIHEQIAASICRKNPEAAFHLTDMVIHHYGYQTAVVEHKDKVNRNLRLLEQAVKEEPDQPFHHYNLGVEYLRLGEAERALKTFGVAKAGIDPTVTSYAHLLCKYEIRCLEYLNRWQEALEHIDAALELFPDYTDLLHHRGVCEDALGHVEKAEFWLREAIRLGAPPPMYHTEEGLGTYQTWYTLGRLLEGKADLEGAVDAYVEAVRAQSSLLPPLYRIFRIMRVSGQEQQIPELIRERFALESEEAIYKVLGVMEQSRCYEAAVEWIAELSSSADPVEKRERLSMAEALLQIQRGKWKAARLKLEPIQRKKGLYAEQASSWLDRLHWAQGRSIEGKDELCNWLYRHSQPDGLGGERHEGKAEDSNTPVTKGESANGGYDGWQAFGLLMEGCVQSGQWQELHTLIQMGRQQLATGVSPGGETRQEQAEEPFAGVANTVAGTSWLVRGLVSAADEQLREWSEGINGQRQQCWPLVQRLRLELPGPDGFGS

SEQ ID NO: 1563 - protein, 350 aa, Bacillus lentus
MSTISLCMIVKNEEDCIERCLDSVHALVDEIIIVDTGSTDMTTTLCKKYKAKIYEYSWNQHFAKARNYGLSQATGDWILWLDADEELDKHGKLKIQEALESTDTKVFTLPTINYYGDTLANENEAFIHYQPRLFRNNHGIRFYNRIHENLRLPSGIEGQPIQAQIKHYGYLQGIVNKKQKAKRNMKLLKEELRDQAHEPSTEYHLASEYYRNKEYERAFIYINQSILKFLRKGEKPPSITYKLKYAILIETGSFDGAWPSIEKAILLYPDYVDLYFYKGWILYNLEKYTEAIQTFEQCIELGEEHKDHLILKGVGSFKAWHHKGLCLEKLGEFVEAEKAFQQAKTIERNV

SEQ ID NO: 1564 - protein, 309 aa, Campylobacter jejuni
MPKLSVIVPTFNRQVLLEKAIKSIQNQDFKDLEIIVSDDNSSDDTKSVVQNLQKDDDRIKYFLNQNYKQGPNGNKNNGLDQASGEFVTFLDDDDELLSGALSTLMQKANEGYAHVFGNCLIEKEGNLSKEFSGKGLEKDSEISKKDFLMAKFSGEFFSVFKKSLLENKRFNEEFYGNEATLWVNLYKEKSFYIHKAFRIYRIFRQDSVTLGASKNAYRVYLGYLELAKILENELRMSKDKDYKKTCASYYKMAAYYAKLAKNYKALYKCLFKSLSIKINAPALILLILSIIPNNMIEKLSKIRVALCKN

SEQ ID NO: 1565 - protein, 371 aa, Halobacillus halophilus
MITVSLCMMVKNEEEVLARCLDSVKDLVDEINIVDTGSDDRTVEIAKEYTDRVFFFEWTGRFTDARNESFRHATKDYIFYLDADDVILDEDREKFKRLKEGLDPAVDSVSMYYNAGTDEFGNVTLKYRRNRLVKRSKNFQWGGDVHNYLNVYGHIINSDVAITHKKIQHAVGRNLSIYKEKIERGDVFSPRDYFYYGNELRENGHHEKAIESYTKNIEHKEGWIEDKVYACINRADCYRFIEETEKELASLFESLRFSKTPRPEMCSRVGYNFQRKKEYKFAIYWYELATTIEDDSDKWSFTYPAYSTWYPHLQLCVCYYNLSNFEKSYEHNELARSFRPQDERVLFNKELLEKKLGLNQTAEQPQDESSS

SEQ ID NO: 1566 - protein, 336 aa, Unknown
  Description of Unknown: Lachnospiraceae bacterium KH1T2 sequence
MTSISLCMIVKNEENVLARCLDGIADLMDEIIIVDTGSTDNTKQIASKYTDKIYDFKWTDDFSAARNFAFSKATCDYIYSADADEVIDAENHEKFRMLKAAMLPEIEIVQMYYTNQLEKNTTYNFDEELRPKLYKRIRNFCWQDQVHETVRIAPIIFDSDIRIKHCPEELHSGRDFAIYQKLIRSGSEISPHMQRMYARELFISGTEDDFRQSFEFFKAHIDIDTDEELIKMDACVLAKCARIMDDASVMLLAASRGLAVDEVPSEIVFELGEFYRARRNYSEAVIWYYNAAFETEALLSNSYNSSFPLIGLHICYVIMGDKENAAKYGAKLRELN

SEQ ID NO: 1567 - protein, 359 aa, Oceanobacillus picturae
MVSISLCMIVKNEEKLLGRCLDTVKDIVDEINIVDTGSTDRTLEIAKKYTDRIYFFEWTGSFKDARNESFKYATKDYILYLDADDVVLEEDRKKLKKLKEELDLSVDSVSMYYNAGMDTYGNVTLKYRTHRLLKTERQYRWEGDAHNYLNVHGKIITSDVGVTHKKEHHAVGRTLSIYKKRIENKETFTARDHFYYGNELRENGHYEQAIESYTKNIETEQGWIEDKVYACINRADCYRYLDKPDKEIASLYESFRFSKTPRPESCSRIGYHYQKKREYNQAVYWYKTAIELEDDPNRWSFTYPVYATWYPHLQLCVCYYNLQQFDKAYEHNEKARYYRPDDEKILFNKELLEKKITNN

SEQ ID NO: 1568 - protein, 364 aa, Paenibacillus sp.
MKLPLSLCMIVNNEQKFIKDCLDSVKEFVSEIVIGDTGSTDMTESIAREYGAEVFRVNWKNDFGDARNAVLERASMPYVLVMDADERLNQSSSDQLIKFFEYETTNPGKVVIKNMVRDNDITFGQATRIFPNLPDYRYTGRVHEQLQYQGRTPKSLQTNIIIDHLGYKDGIVTERNKIQRNLSILTEIEKSSPHDLYVIYQIGKTHFVAKNYPEAVKYLEKVIKSIPSNSLTSSTFASSAWLTLCYSLYYMKSFKLLNKYIEEGIEFFNDYTDLYFIYGLSLTSMNHPDAIKMVPLVFNYCLQLGEADSTKYETTMGVGSYKAHYNLGIYWEIIGEIDKAYSHYLFAVQQGYQNAAVRLKLLSK

SEQ ID NO: 1569 - protein, 650 aa, Cohnella sp.
MIWHQEGYMDKLLSLCMIVKNEERVLSRCLDSVRDFVDEIIIIDTGSTDRTKEIAAQYTNHIFDFEWVKDFAAARNEAIRRATSKWILVLDADEYIERSDGVALRPFLSSLNTRKKFALSVPVLSLTGESGNVLEAEVARIFPANKGIYFHRPIHEQLTCDSGKLPLYKYDLRIYHSGYTPEVLQEKNKSKRNLEIFEKLKESGKMKQYDYYTLGNEYKVIKEYQKAIECYEKAFSNLNPELSYYKRCLIGLIDCYIALNMLQEAYNHIEKHLSRWSRYPEYHTIKALVLNELGFYDKGRIESEKAIRIAENGSNGDEEYWLISPDYGGVFPYQNLVEYYYRKQDIHQSVFYLSKILNERPNHFYTLYRLVTLLSQSESTQSIVSLMNKLYPKQTNQDLFLLLCASLKLADHGLSEHYLSAMVSAGHDIGTHSHLRYAILKRDRSLFDQYRVNSPDIVHVDHVMPELLAALLWNDTEYLPANTEVQAVQFLHSFINTSIQGDKSIITPSAAQEILLYDLLVELYRYQIYEVYDILMKRISSANLINMLANYYYDHHHLELATDYYSILLQEGKLNAQGYENLAHFHFNQGEAEEGIGFLQAAIELESGKVQYYSTLSAKCTDEGTTETYWKQGFEYFPQYRQLISRITSE

SEQ ID NO: 1570 - protein, 272 aa, Siphonobacter curvatus
MLVDITIAIPVKNEEQNLPHCLDALGKDFAKAIVLIDSGSTDRTRAIAAEYGVDFIDFTWDGKFPKKRNWFLQSGYLQTQWVLFLDADEYVTPAFKEELRQALHQTEKVGFWLNYSIYFMGKQLKGGYPLRKLALFRADAGQYERIEEDAWSKMDMEVHEHPVLQGKVGMIKSKIDHRDFKGISHYVRKHDEYSSWEASRFAKAFQTQEVRKHWTWKQWMKYKLLHSPLIGPAYFLGSFILMGGFKDGSRGLAFSILKTAYFTQIYCKIQEQ

SEQ ID NO: 1571 - protein, 360 aa, Unknown
  Description of Unknown: Bacillaceae sequence
MVTISLCMIVKNEEEVLARCLDTVKDIVDEINIVDTGSTDRTVEIAKQYTDRVFYFEWIGNFAAARNESFKYATKDYILYLDADDVLLEADQKKLLELKETLDPSVDSVSMYYDAGTDEYGNVTIRYRRNRLVKREKNFVWKGDCHQYLEVYGKIINSDISVTHKKIKHSVGRNLNIYQTKLDRGDVFSARDYFYYGNELRENGHYEKAIESYNENIAIKEGWIEDKVYACINKADCYRYLGDFENELKSLFQSFEFSKTPRAETCSRLGYYFQRKQDFHSAIYWYNLATELIPPEDKWSFSYPAYYTWYPHLQMCVCYYRLGDFKKSYEHNEKALSYRPKDERIIQNKILLEKKLNITH

SEQ ID NO: 1572 - protein, 483 aa, Sporomusa acidovorans
MEKGWSLTVCLIVKNEEHCLGDCLDSIKDWADQIVVVDTGSTDNTLEVARQYHVQIEYFTWENDFAKARNYSLQFAVGDWILILDADERIEGSLATLPDLVTKDYEGYYVTIKSPLGAGAVEAEDHVVRLFRNGRGYKFNGAIHEQIAGSIKEGKGQAAIGFSGIIVRHRGYEPEEILRKQKTVRNSQIIQSRLAECQDDTFMLYSLGTELIQQEQYGEACDLLKKALQHMTGKEGYFREVIVLALMASLKSAYADNEDLFAKALAMMPTDNDLLFLAGLRQALMGNCTFAAEMLVKGGINTVLAPPQLLFAIAGELFYIQKNWQEAYRYFKLSLKAAPSLYSAVRMIEVISQGETKSFTELADAIGGDFVRLVQEAIRQDDYYAAAIFCLAVIDKDSSKNISQWKSLYQSAIKQAGNIPAVIKDYLGILCQQIEICNVVLGGDKNCRIAQNYRAKAVNRSLRIWLTMWPEHVLSKSIWECCL

SEQ ID NO: 1573 - protein, 338 aa, Acetivibrio ethanolgignens
MITISLCMIVKNEENLLKRCLDSIHDLMDEIIIVDTGSTDRTKEIAGQYTDKIYDFTWVYDFSAARNFSFSKATMEYIYAADADEVLDEENRKKFRQLKEAMLPEIELVQMLYCNQLQYNTTYNYDEEYRPKLYKRLREFVWEEPVHESVRLTPVIYDSDIRILHMPENNHAGRDFDTFLRMWSRGQRMSKKLHNMYARELFIAGENEDFLAAEPVFLETLKASDRGLSEVKEAACVVARAARLRGDIAEFFKNALKDTASEGCAEICCELGQFYYDRKEYQEALIWYYNAAFETKSILNIHSSGDLPLKRLEELSTLLGQTEDAKHYHELCEAWEAE

SEQ ID NO: 1574 - protein, 338 aa, Unknown
  Description of Unknown: bacterium 1xD42-87 sequence
MITISVCMIVKNEERILGRCLDSLKGLADEIIIVDTGSTDATKRIAAGYTDRIYDFAWTGDFSEARNFAFSKAKMEYIYSADADEELDEENRAAFLRMKEVLLPEIEIVQMYYVNQLANGTIYNYDKELRPKLFKRNRTFRWQGAIHEQVGITTVIYDSEICIRHLPEENHKDRDLAAFARLTASGGYLDKRLHNIYAKELFISGEEKDFLAARVFFQESCKDERRGEEELMEAACVAARAARLAGDVADFFKHALKAVASEGCAEICCELGAFYMEREDYDEAVVWLYNAAYETESILDIHSGGDRPLRGLAKCYQELGNEEQAAEYTRLAAEWTTG

SEQ ID NO: 1575 - protein, 357 aa, Cohnella sp.
MVSISLCMIVKNEEAVLARCLDSVSDLVDEINIVDTGSTDQTVAIARRYTDRVFFHQWTGNFAEARGASFSHATKDYILYLDADDVILDEDRAKFKQLKAELDPAVDSVSMFYNAGEDSFGNVTLRYRRNRLIKRSRNFQWRGDCHNYLEVAGRIVNSDIAVTHRKIKHSVSRNLNIYKMKLERGDAFTARDYFYYGNELRDNRHYEEAIESYKKNIALKTGWVEDKIYACINMADCYRNLNDQDNELAALFKSFAFDAPRAEALSRVGDHFKRRKAYKTAAYWYELALAVPENNDQWSFSYPAYRTWYPHLQLCVCYYYMGDMDSSYRHNEEARKYRPQDPHVLHNKKLLDSKHAK

SEQ ID NO: 1576 - protein, 361 aa, Bacillus lacisalsi
MVTISLCMIVKNEEEVLARCLDTIKDIVDEINIVDTGSTDRTVEIAKQYTDRVFFFEWIGDFAAARNESFKHATKDYILYLDADDVIYEEDQKKLIDLKNTLDPAVDSVSMYYDAGTDEFGNVTLRYRRNRLVKRSKNFRWKGDCHQYLDVRGNIINSEISITHKKIRHSVGRNLSIYQKKIDRGDTFTPRDYFYHGNELRENGHHERAIESYDKNIAMKEGWIEDKVYACINKADCYRHLGDSEGELKSLLQSLEFAKTPRAEIASRLGYHFQRNREYKPAIFWYELAARSEPDPNQWSFSYPAYSTWYPHLQMCVCYYQLGDMQKSYDHNEKAREYRPKDERVVQNKALLEKKLGLTES

SEQ ID NO: 1577 - protein, 376 aa, Lactobacillus algidus
MNKNISIAIICKDEERVIERCLSAISKDSSMNDEIIVIDTGSTDNTLKILSTIKNIKIYHFTWDDDFSKARNFAISKATKDWVFFIDSDEVLVEESLDNLRNTIEKCMNTANKKDTIVFSPRVINSDDTVVYNAGRIIPNNNTVEYDGCVHEYPVTRDKNYNLVALKLSNTIVEHDGYEKVILKNKKKAIRNTKLIKKILKKNPDSSRYYYFYFRDAKPLLSEKEYENGMVNFFNKFPNDIYANQVAKDLANFYIGISEFQNAEKYITMLFESADKGNVDDRYLGILLTAINEIQKTKVKQKELLKLLIYSKENILKDKEVIFDKGYSFDDLIGILFFQLEEYKTAYKISKSLDTSKYSSNISEIFSKLIGTIDNT

SEQ ID NO: 1578 - protein, 375 aa, Paenibacillus sp.
MITISLCLIVKNEEDVLARCLDSAKAAVDEIVVVDTGSTDATKSIAARYTEAVHDFAWIDDFAAARNFAFGKATCEYILWLDADDVFLAPDLEKLLALKRALPLRTDAVSMEYHLAKDEYGTVTSSLRRNRLVRRSREYRWIGAVHEYLDVRGVSLESDIAVTHASTRHDGDRNLRIYEQRLAKGERFGPRDLFYYANELYDHARYEDAVDQYERFLGTGEGWSEDNIAACGKLSDCHAALGEADRTLEAALRSFRYGSPRPDFCCRIGYWHLQRGGPGIAAYWYEAALSAPKPERAWSLQNKACATWLPHLQLCVCYDKLGDYERAYAHNEIARAYRPSDAAVLHNKTYLEGVLRRSGGEAAPAEAETREEVAR

SEQ ID NO: 1579 - protein, 649 aa, Paenibacillus odorifer
MTTPDITLCMIVKNEAKHLEKCLSSVQGIVSEIIIVDTGSEDNSIDIATKFGAKIIDMTWENDFSKARNLSLKHATSSWILVLDADEAVDHWRREQLQHLLDASHIHGYWLPIIHYIGDAPKADFVTDHVCRLFRNDERIIFRGIIHEETASSIWELPAGEIAYAELRIYHYGYLEDELQHKNKYQRNLALINSGLQLQPNHLILRYALGVEHYQQEQYHAAADVLLPLLADVPTQSGYASDIYLKTAYALQRCNRQQESEEVFHAGSLLFPDFTDLLEGYAALLLEQGQLRQARHFLQQALKSGDTAHPYPSSSGSGTYRTELLAGRVCEKLFLYPNARKHYEAAIQFKPDYTDTWKQLVPLSLLSGERLSLIALTRCHIHALSPITLGYLVPAALNARDFEWLVTLSFASQLPLAVQTIVQAFLACTQQQEGAHTLAPLEQLLHNPSVLSERSSILGYLWALSCRAGDTESAMKWLISISPYRPGMLTIHHIITSRSDIKPVLPDLSYAMQLLLQVGAWDSVLSLYRQSEGSLFQWCKLPQPLYYGLLEAPTPVKKQWCSIYLSQTPHYNASSDCAEWLLYVAIACSCGETPKIAQSDEMALGRIGGTTAAVGLSYYKLILAAKAYPHGISTGQIPWGLLVRSASQT

SEQ ID NO: 1580 - protein, 585 aa, Desulfosporosinus sp.
MKERISLTMIVRNESAHLANCLESVKDKVDEIIIIDTGSTDDTLNIAQRYTSNVFTYPWHNNFSDARNFAIEHASGDWILALDADEEVQCQASFSFHSLIAKENDKEAFLLPLLNPILDSTEEYNSFYVLRLFRNNGNYKYFGKIHEQVTIQDQQKVGLAVEPILKHKLLPLKLRHQKRNRNLHLLKKALQDDPHNPFLHYYFGVEWLMLGKAGYALPYLQKAYSRLSDDQLLFRAPTLKYLLVCLRALGRLDEALSLCLETSLHYPNFTDIFYLGGLLLEEKEEYHVALKWFNHAINCGKPPALFSHLTGSESFLAYYHLGFCYEKVGETFEAREAYETALELNPRFPYPLYNLFLILLSEEGAAYCYQYLEDRDYFDDALFCLTTADLFFLADHVAQAYLCLENHKDCFQGDERFLFFYGKYCIYSGRANTGFESLNQIPTKSSCYPSAQALSIVALILLGDFPKAKSSAIMLWKNQPTRCEAHIFLCLIRLMQKQTIPPCPLRVRGKETLATNTEMLLDCKRYRSHIMSYDPLVEAWNQALETLIKSSEKGFELLFNDYNQRVQGLNDRLIAKFGNSWMDKL

SEQ ID NO: 1581 - protein, 354 aa, Paenibacillus sp.
MIVKNEEKSLARCLDSVREIADEIVIVDTGSTDRTREIAKEYDCRIVDYEWKDHFADARNFAFSQAEGEYILWLDADDVFEEKDRQQLLDWRERLDSSIDGLSMEYHLAFDGSGNVSHKLRRNRLVRRDKGFEWHGAVHEYLAVSGNIVHTNIAVTHKKDKEYTDRNLRIYKRLEEQGEVFTARDQYYYANELRDHGLNEEAVQWYTRFLDSGHGWIEDNLSASLKLAECMGRLGMKEQELAALFRSFTYASPRAEACCKVGTWFAERAEWNTAIHWFETAVALKRPEDPLANIDEPSWTWIPHLQLCVCYDRLGNHKQANYHNELALSYHPTHPSMLYNQQYLKEKLQNGVLR

SEQ ID NO: 1582 - protein, 317 aa, Unknown
  Description of Unknown: Lachnospiraceae bacterium G11 sequence
MVTISVCMIVKNEENTLRKCLDSLKGLYDELIIVDTGSSDKTKDIAAEYTDKVFDFTWVDDFAEARNFAFAQATMDYIYSADADETLDEANRKQFAILKEVLMPEVEVVQMRYGNQLENGSVYNYDEELRPKLFKRLRTWTWIEPVHETVRIDPVVFDSDIVITHKQEEMHAERDLRILRKELEKRGALSVRLTDMYARELYMAGTKEDFEGAAAYFEAIAKNNEVISEMILDACAVMVRYHNILGQPISSCTYVGIAEDLGGCSEVYLELAKYYKEAGEYDKAREFCEKAKESEPVLDIRAWKEIPDELLTSMVKM

SEQ ID NO: 1583 - protein, 363 aa, Bacillus sp.
MITISLCMIVKNEEEVLARCLDSIKDLVDEINIVDTGSTDKTVEIAKKYTDRVFFFEWTGRFKDARNESFKYATKDYILYLDADDVLMEEDRKKFKLLKETLEPEVDSVSMYYNAGVDEYGNVTLRYRRNRLLKRSRHFQWQGDVHNYIAVSGNIVNSDIAITHLKNKHAVGRNLSIYKEKIANGDPFTPRDYFYYGNELRENQFYKEAIESYSKVIEMDKGWVEDKVYACMFRADCHRFLGNAKEELSSLLLSIAFSKTPRPEVCSRIGYHFQQQRDYQSAIFWYELATSLHDDPNKWSFTYPAYSTWYPHLQLCVCYYHLNEIEKSYEHNEKAREYRPKDERILFNKKMLESKLRTVSQER

SEQ ID NO: 1584 - protein, 256 aa, Unknown
  Description of Unknown: Nitrospirales bacterium sequence
MEKFSTPCKISAVVIAYNDAPNMRRCLDSLHWVDEIVVIDSHSTDGTTEICLDYTDNVFHYPFQGFGALRNQAITHAAHDWIFSLDTDEWATPEIQQEIQTLLTQDPPARAYFVPRRNYFLGRWIKHCGWYPDYRQPQLFHKAHMRYREDLVHEGYDVLGQTGILQSHVEQIPFRTLDQYLGKMDRYSSLRAQVMHSEGRRFRAHQLFSHPLFTFLKMFVFRGGMLDRKPGLILSILYAYYTFVKYAKLWEFQKHG

SEQ ID NO: 1585 - protein, 340 aa, Roseburia sp.
MIVKNEERVLARCLDSVADLVDEIIIVDTGSTDATKEIAARYTEQIYDFVWQDDFAAARNFSFSKASMDYIYAPDADEVLDEENRQAFLKLKAALLPEVEIVQMKYHTVTDYNTVLNAKMEYRPKLFKRLRTFTWIDPVHETVRLDPVIFDSDIVISHMPENLHSKRDFSIFTKAIAGDGGLSDKLQRMYAMELYKTGDILDLMDACPYFLRIYETESQTDKRSRAAAILLRTYRRLGGERDFFKIAIKEMTDKPSSEICAELGDYYSDAGDAKEAALWYYNAAYESEAILDVHAGSDRALEGLVASYEEVLAQELSEEERDYFMESLLQAKRALEEIEE

SEQ ID NO: 1586 - protein, 338 aa, Unknown
  Description of Unknown: Firmicutes bacterium CAG:534 sequence
MISISLCMIVKNEERVLERCLKSICDLVDEIVIVDTGSTDQTREIAARFTQRIYDYKWKDDFADARNFAFSKAGCEYIYTADADEVLDEENRRKFKILKETLMPEIEIVQMYYGNQLSCGTVYNYNRELRPKLFRRSRSFVWVDPVHETVRLLPLVFDSEIEITHLPEENHASRDLAIFEKEVRTGRRLSDRLMTMYAKELLLSGSREELLRAEDYFTEAADHKAAAPEQMQEALCVVVRAARLRGDDLKMYRYAMKGITDEGIGEVCFELGEYYFGKQEYEEASIWYYNGVYETRSILNVHCSGDTALMRLADCYQALGQEEMAAQYRQAAESWSAE

SEQ ID NO: 1587 - protein, 623 aa, Chlamydia abortus
MSRPSISLCMIVKNEESCLESCLESVQGHVDEIIIVDTGSTDRTVEIAESFNARVIYHDWKQDFASARNESIKYATKEYILQLDADEYLDDRTDFVKALASELDFYYVNIRNYKTDGLSVAHKSVRLFKRRPDFIFVGRIHEQIDVNQPNVRGGSADVLIHHTGYTEDVYKEKNKHKRNMDILIQEVQQNRTGFNLYNLGNQYAQEGSYGKALSAFQEAFGLGKDRTYIPDLLSQMVICLTHLKRYAEGIRLANDAIAVYPSHADLYAVQGNLYKQMEHYEDALICYKHFLEIDESQPSAYTKRVESFLVEYLAAQVHMELGEEEEAYQAILRSLSLNRNYLPSKMMLVKWLQCRHKSGIEIISTINSSNSSDYNTVFSLLYNTRHPDLLQIIKSGSFNLEPYVKAVACLYAGEYEEARKLWNQIGEVNKDNGKDVLLLGVLTQDLRLLQMSRDVINLSDKEFKAVKSIMYKEPLQGLVPSSSLQAYLLELGRGFILVQEYDWFEYLSTQLSGISIRYRYLFSKLMHEYGFSEAAVDLILPGLRTEPHNPDLLQLLGDICRKYGNDEDALDCYKDLVRARPDMGSYTRLIRLLKRRGDKENVHKYKREMKMMYPLSNWAAMGD

SEQ ID NO: 1588 - protein, 454 aa, Yersinia mollaretii
MNDIICYDSNYLGLVKEEGVTFNLGHKEFDLLNNWIENISFILEIDKRLTKLIKNNDLSTDDILSYISVLSEKIEQTLNPTLSAIILVKNEERCIKRCIDSIVNSVDEIIIVDTGSTDNTLDIIKEIDNEKIIIHCICWIDDFSHARNFAKSKASKDWLMFIDADEYLEAIDNNEIKRKLRILQAMSIKDEIVACPFIANHNGYNIKTVRRIFLNHTDINYFGLVHEEPRIDGLLPYYISIDIKFFHDGYMDEVVKSKGKTERNLSLLRRMILLEPSNLRWKFFYYRDGIDNMNLLDAEVGIKSAVLLNQKDGFVLSNIIIDEFSFALLDVLANNLFRQGKFDDAYVIAEIMNDLNPENSNSFYYKCLIEIVRLKWGIKKLLTETIMYREKNISPQYGMIHSEGYHIDLLISILLFENDYIKQAVKYFDFFDELNFNSNILNNYKEKIMLIKLI

SEQ ID NO: 1589 - protein, 625 aa, Unknown
  Description of Unknown: unclassified Paenibacillus sequence
MNKTISLCMIVKNEEKVLDRCLSSVENKVDEIIIIDTGSTDSTMEIARKYTEKVYSYHWADDFAAARNRSLEYAESDYILVLDADEYLESNADLKTVVGSGKDYYLIRIRNLLSFGWAHTHTAIRLFVNKPQLKYKNRLHEHLDTMNENYEYSNEMADFVILHTGYMNETLAEKDKLSRNLPIMLKEVAENPNGYNLFNTGNVYYSLGNYKKAIEYYQRSYPLSKDKSYTPELLTRIATCLSYLDKHEEGLRVLEDAVEIFPNTVDLRYAQGKIYFEAGYFKDAELTFRKCIVMGDKGITVTEGAGGYGAHYYLSLLYYKKGELAKSYDEIIKVIQEKKLFVPGLNHYFEIILKGNIPFEDVKQNINNIYNISNVEELRWLMESMYSLRHPLLNEYLNSYNLTVEDKIRAVALLFDKKYEESKHCWEQISVGEENALDVLVLATIQNDQKLFQLIQPLLNLSSKEQKTLCTFLMDGENGKKPVITTRIEDIIMKVITHLISLQEFDVFERVSTMILKSDIDINIRLGEVLVNYGFNEVAIDVLSKCFERQPRNSLLVRLLGDVCLKSGYLQDAQLFYSRLLELKPEYSSYERCFNLYEALNDSEGMGVIKAEIKKKFRFSDWVNP

SEQ ID NO: 1590 - protein, 693 aa, Paenibacillus polysaccharolyticus
MQKKGGIIMQAHQHQRQRSQAERISLCMIVKDEEEMLPRCLESVRDVVDEIIVVDTGSSDRSVAIAREYGASVVEFAWCDDFAAARNAGLEQASGDWILFLDADEALEATAREQIRSWTEVSGCDGLFLNIHNYTGSGQQGATVNPVLRLFRSHPEHRFKGRIHEQIAAAICERNPEAAFHITDMVIHHYGYQTVVVERKDKVNRNVRLLQQAVEEEPDQPFHHYNLGVEYLRVGEAEQALESFGKARKMIDPAVTSYAHLLLKYEVRCLEHLERWQEALECVDAALELFPEYTDLMHHRAICADAVGDTDAAEMWLRKAVQQGPPPAIFHTEEGMGTYQTWYTLGRLLEGKADLEGAVDAYVETVRAKSSLVPPLYRLFRIMRVSGQEGQIPAVMESRFAMSSEEALSKVLGILEQCHCYDAALELLGELPSASSGEQREKRSIAEAVLHVQRGDWSSARLKLETVKRKKGSFAPMAARWLERLQWLSGKEGKEMKFQDAFTRWLMNGSQVGEGRESASEEESGSTGWGKLAVEMGNRSNLENAATLEGVADADHAELYDGWQALGLMLEGCVQSGRWQALHGLIQRGRQLLDEVHDATEKRLAKERSQGEQVKREIIDAGKLIREPFTGASDTLSGTSWLVKGLIRAADHHLAQLTSDKEQVEPGKRQRLAYWPVIQHIRLELPGADGFEG

SEQ ID NO: 1591 - protein, 351 aa, Unknown
  Description of Unknown: Anaerolineaceae bacterium sequence
MLSICMIVKNEENILENCLEKLSHLGYEIVIADTGSTDKSKEIALRYTDKVYDYAWDQDFAAARNYVISKASNEYIMMIDADEIVVSCDKDKLEDMIHKYPDGLGRLLIINDYSRKDESYRTNSRISRLFSKELYHYEGRIHEQLIPRKGIAPGEIYDLPVHIYHGGYEGDLDTRTKKTERNINLLLKELADKGDDPYILYQLGKSFYMREEYSTSCEWFGKALNFDLDPRLEYVQDMVESYGYALLNSKQYETAMGLLGVYDEFAVSADFVYLMGLIYMNNARFKEAIAEFIKATKMIRYKMDGVNSYRAYYNIGVIYECLGQTEKANTYYSKCGDYKPALQRLKNVSIE

SEQ ID NO: 1592 - protein, 599 aa, Paenibacillus riograndensis
MKPRNRISLCMIVKNEADNLPQCLKSVRGVADEIVVVDTGSTDSSVQIARSYGARIVNFPWSGDFAAARNAGLKAARGQWILVLDADEELDQGSAGELLLCAEHMEYEAFFLRIHNHRGTSRSSETITVNPILRMFRNRPAYRFSGIIHEQIASVIVREKPAAAMHLSTVVIHHYGYADGVVAKKDKIRRNVDLLKEQLKRSPGDAFHHFNMAVEYMRLGEYDHALEHIHVSLEHVEPDTSYVHLLHKYEIRCLAVKGDVQGALAACERGITLFPDYPDLHHIKGVLLLQTAAWKEAKEALRQALDIGVSPPGYHTEAGCGTYATLSLLGQLCQETGEDYEAAAFYTKAARLHPEPWPLIARLVRTMKCSGRESELNGWLELHLPPAAAEHRKLAVLLLNEGCYGAAAELLEKSGFNDALGPMGQRGASAAETGSVGAEQCKLPSVGCGESLVQQGAGRMADSEGAGNCDGAETRDGADSSDSAGKGEPVTGSDAPAAQGSAGSPGTVIEDSGSFVMALQKTAAAPAASLRQEDIAVLLEHSCSIPGQGTGLISTPAYQHSRSWMLLADFVLASLPASAASSPAAGKARQLLPLPRMTD

SEQ ID NO: 1593 - protein, 625 aa, Paenibacillus sp.
MDTTITLCMIVKDEERHLKRCLDSVKDKVTEIVIVDTGSKDKTLAIAEEYTTKIHYFKWVDDFAAARNESLKYATSDYILVLDADEYLESDADLQKDIKSDCDYVLLKIYNDVSYGRAFTHTAVRLFANHRGLHYHNRLHEHLNVLGENTNYKSQHGKVIIHHTGYTDEIMQEKDKTNRNLPLMLQEVEENPDAYNLYNMGKTYLSINEHAKAIEYFQRAYPLSAGRMFLPELITKMCYCLGELKQYEDSLRILNDAVKVYPNETDMHYMQGRIFMDAGYIKDAEMVLKGCLDLGGDLGITVTEGTGGYMTRFVLAELYESRNQLDESYKYIVEVLQEKKTFAPGLSKYFEIVTKSNIPIDDVYRNIEQLYNISNINDLQLLLDVLYGLRHPLLNKFLTVYSITAQPNVAAAAMQYDKKYAEAKDIWMNMECVTEENGKDLLLLSFLLNDDELFNLAKPLLNLSRKEEKIIRKIIKKEIISSNKMTSYVEKILGDIVSHLLKLQEYECLQIILEYLAYTSLKSKVYSYSLLISYGFTEVAIDLLVKLFEEHPNNVEVIRLLGDVCLSCNYTQDAQLLYSKLLELIPDYGSYERCYKLYEKIDDRAGMSRIVESIKNKFPRSLLAI

SEQ ID NO: 1594 - protein, 358 aa, Paenibacillus sp.
MIMISLCMIVKDEEDSLGRCLDSVQTLVDEIIIVDTGSTDKTKEIAAQYNAKIYDFVWINDFAAARNYSFSLATMDYIWWLDADDVLLEGDQQKLLQLKSTFDTSIDSLAMNYHLNSGPDGQATFSMKRNRIVRRSCGFQWHGFVHEYLVVHGKVVPTDIAITHKKNKVHTTRNLDIYEEHRAKQTAFSPRETYYYANELKDHGQFDNAVTYYQAFLDTKQGWIEDILAASCKIADCYEGLGKIDEAMTAAMKSLEYAVPRPDSVYRIGRYFMLKNAIEQAIFWLSLAAKLEAPENWGMQHKDYSTWLPHLQLCVCYYRQGDMEKSYFHNEIALSYRPDDQSMLNNRKLLLPLQPGNQ

SEQ ID NO: 1595 - protein, 623 aa, Paenibacillus odorifer
MIKTVSLCMIVKNEEKYLSRCLESVRNKVDEIIIIDTGSTDSTLEIAKQYTNKIYHFTWVNDFAAARNESLKYATSQYVLILDADEYLDPAADLQKDISSNFDYYYVKIINDMSYGTILKHTAIRLFANHKKLIYHNRLHEHLNVMDNQGDYKGSAGELIIHHSGYTNEVIQDKDKQRRNLSLMLQEVKESPTGYNFFNMGKTYMWLGEHEKAIPYLQKAYSLSKEMIIIPEIIVSLCSCLKDLHRYEEGLMILKDAIPIYPNETDMKYMQGCLFMEAGYTKDAMKAFEKCIELGDQGITVTEGNGGYWARYKLAEIHEGAYQLFEGYDQITQVLKEKKTLGVGLEKYFQIVSKANIPHDEVYENFKQIYTISDEEDLKLILEVLYKLRHPLLYKYVDLYNVSLQDNIIAVAKQYNKMYEEARANWMVMDEIPKQNVEDVLLLALIFKDMKLLLLVRDELNLSIKESKVLNAIINQDALVSMKITTPIEGLLYRMLEHLIILKEFDHFQLLSEYFLQGSVENSYKLGELLSGYSFKELAIDILIQSFRKSPNNVNVVRLLGDICFDLNYLEDSQLFYTKLLDICPEYSSYERIYNLYEKLDDKNGMSETKKTMRNKFKLSISG

SEQ ID NO: 1596 - protein, 641 aa, Paenibacillus sp.
MENLISLCMIVKDEEEVISRCLDSVQGLVDEIIIIDTGSVDNTKTVARRYTNHVYDFEWINDFSAARNESLRNATGKWILVLDADEYMNSSDIEGLITDLRATPTDKDSLKSFMLPIHNFTGQTVDPSRVMISQGARIFENQKGIYYSNPIHEQLTSDHRKITFNNLPYPIFHDGYTEIRVENHNKTERNLSILESMKTEEKLRDPYFCFILGNACTSDNQLERAIQLYRTSIASSAPSHSWYVHLLDSLISTEIKLNNYVEAYHLILQAMTEYPEISDYYCHLGILYEQFGMFQQAIHNFEQALTLAEMAVRQNRPYWNVQPSYGSSVPLQMLFNLHVQLGNKTDAVRYGVQLLQIQPKNYTILQQIWELLIQAEQDEEAIIRLFQMVYPNPTAIEYAALFLVALRTGSRSLSSYYHKKLVIDVSPNDALAYHLLQHEEKPFKLTIEMKLDASIALMAAVLYNDPQYLTAITEYRESALELWSHHNALLASPDIPPQLTDAASELLAKTLFILLRYSYNDIYFHWLQSMATADTINILANLMYEYGYYEPAVELYAILLDNEALSNKSMVNIGQWHFISNNSDDGYLFVNTAFDHEEDLSIIGWVFNYCSKNQYEQFLKRYLETFPNFNLPFLIQPAKNL

SEQ ID NO: 1597 - protein, 661 aa, Paenibacillus sp.
MGKEWVGKKMKLLSVCMIVRDEEALLPRCLDSVRNIADEIIIVDTGSSDRTKEIAQEYTDLIFDYEWSNDFAAARNESIRFATGKWVLVLDADEYLSADDGPKWLNFITQQTPKPGVGYTLTVVNYSGSSERMDQISTAPVTRLFPNFMGIQFYRPIHEQLCVGEQNGKVYTQMTELCIYHTGYQEETIVKKNKHNRNMEIFERMQHQKDMSAYDWFTLGNQYRFTNDIVNAMEAYEKSFEGADETSAWYPYCLIALISLYIENDKLKDSWFLTEEKLSNFRSYPEYFTIKGAHYESFGFYEKAIECYKKAIEKADRKARFAATAWLVNPAYGYDVPVNQLIKLSFRLCRNEEAVYWLGKKLLRDKKNVNVLFSLLEWLSLNDNEQSIKRFLDANYDTQEMSHCLILFKVFLALGNHRMVNYYYDLLSDEVTLTDRDQLRYALINKNKKLWAESVRKLSSEIKKDSFLQRQLIIGCMIFNQKDKLLELFKSSDCSGDNELLNALYNFMEKKEIVSDDVAENYSTELFLLAKDLFLLGYYEEFDNLVNYTNHPKLINDVGNYFFSVNQMQDAMNYYSLLLSRQQLDDRSYENLAFYHEAQGYREDALEFFAESLKLSPEKKHLYYPIICISEPEGKKSYFNKLVDNYPYVSDISFLMEMCNN

SEQ ID NO: 1598 - protein, 1158 aa, Desulfocucumis palustris
MKLSIAMMVKNESKYLKKCLEALKPLMKKVDSELIIVDTGSEDNTVEIAREYTDNVYFHPWNNNFSEMRNITIGYSRGEWLFIVDGDEILQEHEQLVNFLNGKESNKFNTAVIQIKNITNETNEEEGFSIITAPRLFRNDEDFHYEGAVHNQAIYKAPVRKLQALLVHYGYLHTDKELMERKFQRTSSILKSELEKNPDNVYYLFQLSTTYSMHQEYQTALECILKAVDVVSKHNLDLKQNYYVFNECAIVYNNLGMYKEAEEACLKCFNIKKGHLDVHYIAGIAQFNLNKYSEAIENFKNYLKIIESMHMGEEEADLTTTLYTVGKVEDAYVLLFKLFILVDKLEDALSYAIKITKIDYIRNNLENIVKVFVYLARFDELRKYFVDNVENQLPDSIPGFYLALENNRKNMTPEQFIAFCRAFENTPGNYGLLCEARLEYKRDASADADIIDRIKCFDFYGQYDYYADIILLWMKNQHPLSKLIGILWEQDIDIYFEYLRKHYPGLTKIVYRYLIDVPHEATLDDMRIGKIMARYIILIGGIEENEYIGAFKFYLEIGFKYVRNVYSDQVVLEEHIFSMKNKEEAFLLFVMKAFEAKEVKSRAKYLDKAKKTYNDMVKPLEKYIEKLKNIEFEKQCAELRQKRDYILNSVRKLIQEDNFINAEELLNHYIASLPDDPAAVALLSLVYILMDSEKDIEQFLPLKDYEEYKSEFKKDIKTLINEGSFYKAQKVINKYEHINGDDLDIYSMKAVIAIMNNNLHEAEEIIRKGLLIDKNNYDLLFNLAYLYEQKKDYTFAIDIYEKLINNTMKSEDKLELIQIISNIEQEQYRNSSIVQVSKSFLCSDNDCYNNFALIIPTYNRPRYLSRLLYYINNQYSRVAPRILVLDSSCQENKIINQKIIDNFQGLDLDCLSFNSDISVFEKIFQGIEDIDTDYICLCADDDFIKEEGLFRSLIALERDSSLFSVKGRNLFYVKDISNLKEYDFFAGLYDSDPIKRLELINHGFFPSLFYQVFRTKELKEIYRFLVRNKELLPYNNTFQEYLFYYMVVLTGKIGKIDVDFNIRDKGVAREQAFTNFPHAVLDKTFNEDYIRFKRSFLQYCKIVGVFGEKLDKKIDTIFSNFLVFFLGIPKEYVIQTNSQFDLKELEKGMKKSSLWPKS

SEQ ID NO: 1599 - protein, 301 aa, Unknown
  Description of Unknown: Candidatus Andersenbacteria bacterium CG10_big_fil_rev_8_21_ 14_0_10_54_11 sequence
MPGNISRIRRLHAIDNTNILILYITMQGIMLTAIVTTYNNEATIRPCLESLSFADEIVLVDSGSTDNTLAIATEYSARIVSQPWLGYGAQKNVGAAAARGTWVLFVDSDEEIPPLLGKRMKAICNGDPEKAAFNIYWLRTLNIFFHRPLRHLYGHNARLFKRGAAQWNNATVHEQVSRCINSRVIKLGDPDTGIILPPLFHHSYNTVGAYLKKMHRYTTLDAKQMAAHNRHRSGRLVRPVWHTPYRLAARQLVKMVVYRHGILDGWRGMLWCVLSSYYEFELGQKYLRNAQGEHVHNRLPK

SEQ ID NO: 1600 - protein, 346 aa, Unknown
  Description of Unknown: bacterium 1XD42-8 sequence
MIQISLCMIVKNEEKILKRCLDSIVDLMDEIIIVDTGSLDRTKEIAKKYTNNVYDYQWKDDFADARNFSFSKATKDYIYCADADEVLDEENKRRFAVLKEAMIPEIDIVQMYYCNQLNNNTIYNFDRELRPKLYKRNRSFVWHSPIHEIVRLDPVIYDSDIEIMHMSQGNHGKRDLKAFASFLKRGEKLDKRLHNMYAKELLIAGDEDDLKEALPFFLKSQTEEERSVEEIREACCIGARAGRIVSDKEVFFKSVIKSLAQGGSAEICYELGEYYFEAGDYKEASLWFYNAAFETEPFLDISLGNEKALDKLADCYGRLGRREAEEELRKAAKERKDTRLRERMGD

SEQ ID NO: 1601 - protein, 1052 aa, Syntrophus aciditrophicus
MPEKIMGISICMIVKNEEKNIERCLKSIRGVADEIIIVDTGSTDRTVLLANKYTDKIFHHPWENDFSKARNQSLKYAGGDWIFYIDADEELVRQDTQVLLEGVRNEEIDAIQVQIISEFQKKHSESINSQTRIFRNNGSIGFEGRVHNRVIGFKNAKIYPVRIKHKGYDLSPDQLKAKFDRTVPLLKKDIQDSPSNPLPYHYLSCSYLSMEMYQDALDASLTAVRLADKDRNPDLIFLWSRFNAARSYYELNELKKAEKLALRTLELYHGHIDSHFILIRIYYDQSQWSSLIYHGGKYQNLITLYKEHPENFSTVVVNTMNEIWNIHILLGIAYYELGSREQARCCFKKAADTAPKPYMAWKAAGIYCHEKKYFQDALFFLEKARRHNPHDQTTKSLLNKINKTDEKERALPTICCCMIVKNEEIFLEKCLNSVKDFVDEIVIVDTGSTDNTVEIANKFTDKIFFHPWENSFSKARNQALSYVSCDWVFSIDADEELLDGCGSLLRQTVREAGGADAFFVNIISTYDKGRKKARHNLERLYKNNGIIHYEGIVHNRLVGASNPKPSKIELMHYGYDLEEKKANEKFLRTTNLLKKDIAENPDDPRPHHYLGTSYLSRGMHEEALKESILAIKLADQQNNQHPLYLWTHHNAAISSYLFGNLESAEFYSRKSIKKYPDHLDSHYTLTLVYGEKNQWDKVERHGNKFLKLADYFENNPDKTDVVIHTTLKNIPDMHLLLGHAAHRNQNFTKMDKHYQAALKISDFKWQVLWNIATFHIDHTGDIQRAEHYLKMAVAEAPNESSIWYAFAKLNHKTGNYTEEKNCLEKLYRLGRKDVVALNRLAELSLTAGDFSLALSASSVALEADSENYQAFCYLGIACKEESLFEKAVEAFMKSIEINDRFALSWFHLAETCLSMNRFDEARTFFNQVLSLSSSLSVETLICQCEIELRCNRIDSFLAVCSRLLNILKLDIQREIGCFEDIAIILTDIAYSVRENRKAVNRLTEMISLLSIDSQKLIENLLLIESEPDTEKIEFVSKMFQINPEQRPATRSS

SEQ ID NO: 1602 - protein, 367 aa, Thermobacillus sp.
MIAISLCMIVRDEEAVLGRCLDSVAPHVDEIVIVDTGSTDRTKAIAREYGAAVYDFVWIDDFAAARNFAFSKATRDYILWLDADDMLLPEDGRRLAELKRTLDPVYNTVTMPYILAVDESGKPTFSLRRNRLVKRACNFKWIGPVHEYLEVSGPVFHSDVCVTHAKQKAYTDRNLRIYRARQAKGEAFSPRDLYYFANELRDHGHYEEACEYYERFLDTGRGWVEDNIQACLKLADCYRQRKDDRKEFQALCRSFLHDRPRGECCYRLGEYFLDRGKVDQAIFWFQMATRLPVPEDAMGMRNPAMTTWMPHLQLAVCYSRLGKHELGLLHNEKAASYVPNHPSVLHNRKFYARVLRENTNGRAGQPS

SEQ ID NO: 1603 - protein, 356 aa, Unknown
  Description of Unknown: Firmicutes bacterium HGW-Firmicutes-7 sequence
MISISLCMIVKNEEDLLARCLDTVKDIVDEINIVDTGSTDRTKEIAIQYTNRIFDFEWINSFGAARNESFKYATKDYILYLDADDVLLEKDRIKLKELKETLDPSVDSVSMYYDAGTDEYGNVTLRYRRNRLLKREKNFTWQGDCHQYINVSGKIINSDIAVTHKKLRHAVGRTISIYAKKIERGDTFSARDYFYYGNELRENSHYQKAIESYDNNISLKEGWIEDKIFACIFKGDCYRYLGDLKNELCSLLQSFQFSSPRAEACSRIGYNFQLQKDYKTAVFWYEFATQQVPDPDRWSFIYLSCYTWYPHLQLCVCYYNLGDYQKAYEHNNEAEKYRPEDKSVLHNKKLLEGLLK

SEQ ID NO: 1604 - protein, 700 aa, Clostridium autoethanogenum
MLLSICMMVKNEEKNLDRSLKSMLPILDGIDSELIIVDTGSSDNTVQIAKNYTDKVYFHEWNNDFSGMRNKSISYAKGEWIFIIDADESVEDAKEILVFLKSKYTKGYNCCNLTVKNITNKDEYVLLSSPRIFKNDGYFHYEGKIHNDPIFKGPVLTLDTVLVHTGYISTDKELMERKFKRTSSILKEELRKDPENVYYGFQLSVSYSMHKDHKKALEQIEKTYDIFSRKKLDKAQHIYLYYQLAVCNLRFDDIKNYKKVEKYCIEGIEVESEHIDLYFCLAKAYMLMDKYEEAVEYYSKYFELIDNYSNLNIRYNILIQVYSENKKDEAYYDCAGACFELHDYKNCMDYIEKISSEKYIKKIAKIAVAVFVSETKFDRLKKFYDKVTQTSDEDFIRSFLNILEGNVIKLKKEKYINYLEHFSKDNDTYCYLNKIRKMYEDGNNDYGIMITQFVNEFPLSNQPGYFGDLVYFKMKLEEDIYDMLSKVSASKIEDFIKYIANKYDDFNDTICNYVSENVNSNFYTERVKIILERFILVLDKIDEKTYKNVFNDYVQCGTDYINTIYNREVLDERIIYDVKNDEEVFFIFMNKANEVKDYDEKEYIRYLRKALAVYPFMKKGIEMLLNELKNEMNATSDEFEDDKVKVKNTIKALIENNKLNEANKVIQEYENIVKDDMEIVFLKSQISLKKLKNPSTVYKM

SEQ ID NO: 1605 - protein, 253 aa, Winogradskyella sp.
MLKLSGVVITYNEERKIRACLSSLVNVVDEIVIVDSFSTDNTKAICKEFNVKFIEQEFLGYIEQKNFALKQASNDYIISLDGDESLSETLQKSIKYLKNNWTFDGYYCNRFNNFCGQWIKYSDWYPNRKLRVFDRRKGHWAGINPHDNFQLVPNTKTSRLKGDILHNTYQSYSEFNQKTEYFSTIAAKAYYDKGQTASFLKVIWNPTWAFFKAYFLRLGFLDGFNGFVICAQTANITFLKYAKLRELYRNNKN

SEQ ID NO: 1606 - protein, 322 aa, Unknown
  Description of Unknown: Clostridiales bacterium sequence
MITISLCMIVKNEEKVLARCLDSIADLMDEIIIVDTGSSDNTKEIAKKYTDKIYDFAWIDDFSAARNYSFSKATKEYIYVADADEVIDADNHRKLAELKEVLIPEIEIVQMRYCNQLTNGTAYNFDEEYRPKLYKRQREFTWIEPVHEMVRLDPVVYDSEIDILHMPESVHSSRDFAVFQKQIQKGQRLSKRLHHMYAMELYISGSDEDVIQAEPYFAATACEPERSLDEVKEAACIVVRAARLRGDSGVILKMCLKDLLSEGSSEMCYELGEYFYEKKDYEEAAMWYYNAMNETNSILNIHTSTDWPKVRYAEIEKIIAGK

SEQ ID NO: 1607 - protein, 647 aa, Cohnella phaseoli
MNKLMSLCMIVKNEEQFLERCLKSVQEWVDEIIIVDTGSTDRTKEIAQAFTNNIFDFKWINDFAAARNEALKHATGKWILILDADEYMEEKDIRGLRDFLDGEKPSTEFVYRVTVRNFMDSSNHTGISESPILRIFPNRVGFEYYRPIHEQIRLTTGAPYQIIALPFQILHSGYLDHVVASQNKHDRNMSIFEQMMNHTKLNAYDHSMIGQQLSMMRKSEEALHHLEIAFAHGDKSSPWFLNNLWTMLDVYLQSQQYIKAWDLIDQHMAEYIDYPDIRCVRGLILISLGMREQAKQELMLAHQEAENRARLQKDITLVSPNLGMRMPLWLLAIMFENENNFQPCIHYLTLLLRADDQDIEAWVKMVEILSLNESSENIAVFLNRLLHVDAYPKKVVAMAKISISLGNQQLAKYYVDRLPSIDRLSLNEQLRYTLLSKDPITFEQFLKNRAVEELTESAAVKMIILGSIVWSRPEWIELCNQGLTDESVGIQFAKDLLQPALTKELDSSFEPVAIDILSQLYFLKAWDTFDSLIDQFSSAAVINQLANVFLSKHFVQPAMQFYQHLLDHNELDATSCENLALLHIIDGKTEEALEFWEQAILLQPKAPIRLFIQYCFFCKDASAKAKMKAKLTEQYPDDAKSLLIKGL

SEQ ID NO: 1608 - protein, 593 aa, Clostridium sp.
MADQISLCMIVKNEEKDLPRCLESIKNLVDEIIIVDTGSTDSTIDIAKNYGAKVYYFKWCDDFSRARNESLKYATKDWILIMDADDEFAQDDKQKFNELKDKLDVSKTYFFETVCYFGMAKGNNISINLNPRLFKNNYGYSYKGVIHNQLINSDHPINGICESIRIYHYGYLDNEILNKKKNERNIKILKKEIEKDPQNKFNYFNIGTEYSSINDEKKALENYYKAYDKFNPSTGFAPKLIEKIVISNYNLKRFDTSIEFIETGIKYYPEFTDLYYLKGLVLEMQHKPTMAIEVFEKCLKLGEAPFMLKCMYGTGTFKASYELSKIYLYLKDYDMAYKYSVDTLRFKSDYLVPLYNITHILKKKNTPIDKFKQIIENFFHDIKNQYQIIADLFYMEGYYDIALEYIDRYSSENTPEDLAFFKIKCLIRSKKFEECIKYTEGVSEENLYYFQISMYRIICFLVLGKYDFAHGTIRQFYLERNDHNKKIINVYNELISIFEGKETSILSEDENEKEYTSAIFEVFEILLANMEFDKFEKSLELLNLISDKSVLLQLGKLYYKYGYRDMAKKEILRSIKMFDLIDSESLDILKSCI

SEQ ID NO: 1609 - protein, 596 aa, Paenibacillus sp.
MTTKPQQPLISLCMIVKNEADNLARCLRSVRGTVDEIIIVDTGSTDATRSIARSFGARIIGFPWNGDFAAARNAGLALARGTWILVLDADEELEQGSREELLVCAKHTEYEAFFVRIHNHQGTERASQTLTVNPILRMFRNRPGYRFSGIIHEQIAAVIVQETPAAAMHMSTVVVHHYGYAAGVVERKDKISRNLGLLKQQLEESPGDAFQHFNLAVEYMRLGDYRQALKHIGTSLNLAEPGTSYIHLLYKYKVRCLAVTGDYPGALEACGQGSLLFPDYPDLHHLKGALLLQVSALAEAKTALCRALEIGASPPLYHTESGLGTFLTHTLLGQVCQQIGEAQEAAACFTRAAQLQPDPWPLIPRLTRLFKCTGREPELHGWLAGQLPGILAEQRQKLLRLLVRDGCYTAAVDMLGDGAGAGVAAGKMGGTAQSAGVMEAAVRDAGEMDGMAQSAGVMEAAARDAGEIDGKAQSAGVMEAVVRDAGEIDGKARDAGAVDDVGPEVPPTADLLELLQRAKAASAAELSYDDITEMLSHPAVVPADRNTSLPIPAIVAAVQPWILLADKVLAALVTSAMYSPAAAAARLTLPLPRSAD

SEQ ID NO: 1610 - protein, 623 aa, Bacillus timonensis
MVKKTLSVCMIVKNEEKFLPKCLESLRNEVNEIIIVDTGSSDKTIKIAEEYGAKVYNYEWKNDFADARNFSINKASSEYILVLDADEFLDHNTKIEEVILSGKDYYVLKIKNNMSNGYVSYHQAIRLFKNNIGLSYYGKIHEHLNIEEFTNLTSEFGDVLIHHDGYTQEMYKERDKYNRNLEILLKETKEFPTGYNLFNLGVQLKVGGKPKEALEAFKKSYFLSKEKVYVPYLLYLMGDSLLTMGKLEDGISLIKDATKIYPKYTGFYFMLGNLYSQNNFLLDAEFAYKKCLELGEVEYFQTIEGVGSYLASIKLSEVLQRQGKLLGALNHAISAITEKKNFAPAISQYINVLTQSGIDKNAINENIKKVFPMNNSKEMLLLLGVLLAKRSNLLLELITEFNLKVDEQLLFIALLYGNKYDEAYLYLKDISVFKGEYLTDILSLAILRNDRKLRDEIVLQLDLVEEEKEILLEILDDGNVDYTKLTDNVSKIIVKSISNFINMNEKEIFIKMANGLSRYGKVTFELSKQAYLLGLSEYMINILNSIESKVVNDNLFSLQGDIYLASGNLSKAIQVYNELYNKTPNYQHLNNLYNFYEKINDTDGMNIILKEMSLNDLSMLQGF

SEQ ID NO: 1611 - protein, 655 aa, Cohnella panacarvi
MKYPLSGGSMNNLVSLCMIVKNEEAFLDRCLKSMEKYVDEIVIVDTGSTDRTKEIARRFTDKIYDFAWINDFSAARNESLKHATGKWILVMDADEYMEENDIRGLRDSLATIEPTTRTLYQLPVRNFMGDQSNAAIVEAPVLRVFGNRMNIRFHRPIHEQPVPANGKAPDIVALPYRILHSGYLDTVIDAKDKHERNLSIFNEMKKTAALNAYDHCMIGQQLALMKKDDEAIQHLQIALDSGNNKAEWFRIVLFALLEIYMRQGKLLEAWHLIERYLQSYVQYPDIRCIRGIILQNLGFHELGKQEFIAAHMEAEKRAANNQVLSIANPEFGTRMPLWQLALTYERDQDLNQCMTYLTRLLMANNKDMSAWIKMVEILSLKEAASNIVRFLDKLLSVSESDAKMKTMGKIAISLGNKELAQHYFNRSPLSYSIADRLKYALLTDNLADFESIINTNTQEELEDTTVAKSVIWGAIAWARPDWLVRYRNRDSTDDIHRYLTFVDCVLFDQAVPSANEDFDRTVFETLTQLYLLKRWDVFDRLIERYATPSVINQLADFFLTKHYKEPALQFYQHLLDNGQLTEASCDRLAQLQHIEGDPEDALGFWAHAIELNPANPKLYIQYLAHCPDSERRAPIKTKLIERFPEYAELSLLKTL

SEQ ID NO: 1612 - protein, 361 aa, Bacillus sp.
MVTISLCMIVKNEEAVLARGLDTVKDIVDEINIVDTGSTDKTVEIAKQYTDRIFYYEWTGNFAAARNESFKYATKDYILYLDADDVLLEEDQRKLKELKESLDPSVDSVSMFYNAGMDSFGNVTLRYRRNRLVKREKNFKWGGDVHNYLNVYGKIINSDVAVTHKKIKHAVSRNLSIYKKKIERGDSFSARDYFYYGNELRENGHPEEAIKAYDQNIELKEGWIEDKFYACINKADCYRNLENPEKELESLFQSFLFSKTPRPEACSRIGYHFQQKSEYHHAIYWYEAAIELKPDTNQWSFSYPAYSTWYPHLQLCVCYDRIKKYVKAYEHNEKAREYRPEDPSVLHNKSYLEKTYGFGEE

SEQ ID NO: 1613 - protein, 691 aa, Clostridium ljungdahlii
MQISICMMVKDEEKNIRRCLNSIRPILESIDSELIIVDTGSTDNTVKIAGEYTNKIYFHKWENDFSGMRNKSISYAKGKWILIIDADEEMTDCKNMIELLKSPQFKMFNTGFMDVKNMQNLHDDCGYAMLKSPRLFRNDGYFYYEGIVHNNPVFKEPTIDLKTTIVHYGYIEENKDVLDKKFIRTSSLLKKALEDKPDDIYYIFQLSVTYSSHKDYLKAYEIVKKAYNLLTQCKDKKKYKYVYYQVALCCLYLEYDQEAKKACKEGLEIDNEYVDLVFYLAKAQGLTSEYEEALENYKRYMYLCDNYNNMSINFDVSLGMYTLGQKDEALQDIVKICYRLGKFDDIFDFAPKLKKYKYIKNVLELVIDGAIKSQKIKYIKTFYEDKFIGDKLREKDFFNTLEKYCNNDICRLFSNYDNDYSRLYLFRYKYNMKDSSFKNVVDELSFENDFNNLEDYFGDIIYCKIKYLSSISHLLFNVWDKNIDRYLSYISKKYDDFSDAAAGYIVHFKDSTSHGDLRINKILCRYILLIDKISSFKYEKMFNYYVDIGVKWIKYVYSNDLISDDYIDIFKNSEEKFLVYMIIANKNQSNTKMYLRYLEKALEAYPYMKKGIEILLQDVKSKINQSNSEFEKYKVQVKNTIKTLIENNKLDEADKIIQEYEEIVKNDMEIVFLKSEMALRKLKNPSTIYKM

SEQ ID NO: 1614 - protein, 626 aa, Paenibacillus ihbetae
MGKQSISLCMIVKNEERCLERCLNSVQGIVDEIIIVDTGSTDKTLEIAKRYTDKIYFFEWINDFAQARNFALEHATGDYILHLDADEYLYKGSELLKHDLDKAYYFLRIRNDLGFGQAEIHQFVRLFQNSPTLKYEGALHEQINLEKNAHLPFGFLNCLIYHDGYLEQIVKDKNKDQRNMDIAKAALKANPTPFNYYNLGMQYAFEGEHVKAIENFKQSYSLANNQTYTPRLLILLMKSLFELKQYKEALDIGFDSVLIFPGNTDIWYLMGSIYDNLDYFEDAKYCYNKCLEIGEGASINEFNHNEGSGSYLAYGKLSRLYLQQGNKEKAQEYFILAAKEAPDLLYLVKLFTDLHPSLSGKEFLAAMLKVWPFTDGKWIQNMMTLLYEFRHPAAYEIIKCYHVELPLEVEAWVDIIEGNYDLAIEKWNQMDKLQDYFKRDPLLLAFITQNFNVLSPFKHDFGFREREWKWWRDLIQNRTDSGLELSKESEECWINLCADLMKLQKYENLEELINSTRSPKLRLFIAEELKRNGFTELALQIVVESNSHKVNERIYSLVSDILKEENEMDDAIYYANMARSLNKNFINSYRLYNLLKLSGLVREADQLIKEMKIDSIRSPWLDSFNV

SEQ ID NO: 1615 - protein, 756 aa, Alicyclobacillus sacchari
MLLSACLITKDEEFTLSRCLESLTGVVDEIIVVDTGSKDKTVDIARDHGAKVYFHEWDGDFATARNAALERASGEYVLVIDADEFLDPMDKRHIRSKLLESRADGYLVGVVNYTGTSARYQTSSPVQVLRVFKNGYRYSGSIHEQVLPAVIDSGGRIETLNLRIHHLGYLYEFVVYKAKPARNMELLQRELDKDPDSLFHISNMMAEYMRVQRYDEVVKLGKHGFEVFQKNPNHATHLLARLLRMLVVALSMTGETAEAIKYAERGENIFPYLPDIRMDHAHALIQVGRVADAIPLLLQCRQLGDVKDPLIDTVPGLGSFLAAAELGRAWLLLGDTACAAEWYLTSFRENTRQENIVWFLANLLPLEHASIRAQLYNVCKQDPLCFAYFVQACAVRGGKDWQRWISEISRGPLTDTLIERLHWIEALRASEQSMDVYTKSNPCAEIQILLGLYYLEHGDIQAAQEWLVDADSRGQMILEWISDGHTEVQIADVLMELMLLHATKLLTAWLPRATDKHTVLPTILASPLRDVLVEVEWVGENGWECEFRANRAFRRGDMRESISWLEKAMQYPPSVRRVVIEADIALAHGNVELARHVVEQGGMIFSSSELLKRIASELDVRQRRVKQIDELLQWNEGDEGMNPHRAYQSSALTMPLQVKLVKLHERAVECVEQIRILNEQGEIMEARKYIQYVQDIITFLRSSTDSSTEAGKAADASYAFYYSMLVKWFLQPSLIAEQYQNMKEFWESWTETWKRL

SEQ ID NO: 1616 - protein, 359 aa, Mordavella sp.
MAAISLCMIVKDEEAVLERCLGCFGELAEEIVIVDTGSSDRTTEIAGKYTSRVYEFPWCGDFSAARNYGFERATKEYCMWVDADDVMRREDRRRFLEMKKTLPADTDVVLLPYETGFDSEGRPVFSYYRERIVRNSPEFRFMGRVHETIPLKGTLRYEEIPVVHRKEGPGDPDRNLRIYEEMERAGESFDSRALYYYGRELLTHGRYEKGAQILQAFLARPDGWVENRIDASRQLAHCFRGLGQEEKELDALLGALRYDVPRGETCCQLGRYFLERSRYAQAAFWYEQALRARKDPASGAFIEEDCYGFLPAISLCVCHDRMGDLEQARRYNELAGRYKPESEYVIRNREYFEKIGVRG

SEQ ID NO: 1617 - protein, 247 aa, Paenibacillus massiliensis
MSVSAAMIVRDSERCIARCLDSIVDAVDEIVIVDTGSTDRTLDIIEQYIKNYHHIKLYHFKWIDDFAAARNYSLGKVTHDWVFVVDSDDVLPATEQAKVRSYVQRQLETAQEAVFDIVYDNTVAGDIVEVIEVGYVRLFPAHLRYEDRIHEQISFGDLPRLRSDIHLLHDGYDVNIVDLKAKKKRNVDLLIASLQANQDNARLWLHLAREMSVLDQAKARRYLDIAESKTSNVDLLRLINNERSAIS

SEQ ID NO: 1618 - protein, 640 aa, Acidibacillus sulfuroxidans
MLLSACMIVKNEELTIRRCLESLQGIADEIIVVDTGSTDKTMEIVQSFGCTIIQHEWQNDFSSARNAGITQAKGDWILVIDADEFVERLDREKFFQFLKATDAEGVFITVNSLMGPLAHPSNIFAIRVMRLFRKGHLYSGAIHEQVADSVFRTKRPIAKYDLILTHLGYTNEFVAMRAKTKRNTQLIEQMIEENPNDLFQITNLMAEYSISGQHTQCATLSEKTWNRVKKMPTSEWPNFAPRMVSILVASLWELGKREEALSYMQEGIRLFPWFTDFKKRYADMLILNSQFRAAIETLMECRKQGDTQLGLIEFLEGAGTYLAAYSLGVAWAHVGDEMNARKWFLQSFFENPAQDNTLLPIIGLLPKDPKLLREFIEPRLYDPTAFATYVEIYSGWNYEDADRLIDQLEKKYGESEASHRAHMSLLRLEGTEALHKRAQTVNYDIDWLLLGIHYLELGDKEQANYALSRAKVRGEYLLKVMTSLENSPDSTWGLHGVIRDLIAMNPTTLLQKWLPRAMDIETFWITLKCSPLKSMLETITWPGKTAHECEQNALNHFNQKNYREASKWLTRAQQFEKTVTQFLLECDLALAENDLPKARKTIFDGKKLYPDSEMLKIASDQIHPKLNPLEITQKLGSGMQ

SEQ ID NO: 1619 - protein, 341 aa, Unknown
  Description of Unknown: bacterium 0.1xD8-71 sequence
MITVSLCMIVKNEEQILQRCLDSLAGLMDEIIIVDTGSTDATKEISARYTDQVYDFVWVNDFSAARNFAFSKAKMEYIYSADADEVLDEKNRAAFAQLKQTLLPEIEIVQMYYANQLSHGTIYNYDRELRPKLFKRNRTFQWQGAIHEQVGITPVIYDSEIEICHMPQTNHKDRDLAAFARLAAAGESLDKRLHNIYAKELFISGEDKDFLAARAFFQASCMDSVRGDEELKEAACVAARAARIAGDIEDFFKYAMKVIASDGCAEICCELGEFYRQKKDYDEAVVWYYNAAYETESIVDIRSGREIPLRALADCYRALGNEEQAAEYERLARESVQEQDV

SEQ ID NO: 1620 - protein, 648 aa, Paenibacillus sp.
MLLSLCMIVKNEERTLARCLDSVKGLVDEIIIVDTGSTDTTKEIALSYTSNLYDYTWTKDFSAARNESLRKATGKWILVLDADEFVEQGNHDKLRSHIEQADPSLPQGYLLTIMNMTGQNEENMSGMLQSSAARLFPNTPDLYYTRPIHEQLTYKYGEVECTPMEFTIFHSGYTDETVIRKDKSKRNMEIFDAIQSRGDKLDPYYDFTLGNEYANAGQVSKALECYERAYKHSDHSLNWIPHCSDFMVTNYLLIHEYSKAYQMIQTGLKRWGGYSDYHYYSGFLYDALGFDDLAKTSFMKAIEIEEKANKSGRSATIIRSQFANVFPSRSLAQIYYNEQNLGRSVYYLSKVLNHTPDDAATLFKLIKILAQSESESEIVPFLEKLYPAGKPANLLLLFRVSIMAAAAGLAQHYFARLTELQIEPGKAELLDYSLLINDLSLFNHVNATIEQTEASKPLFVKLRLLALLIWRDPVHIAQFQLDENHALNNVWSSIIAVLRGEEPAPIAEQDDTFFNELVMQLFNLQAYDSYDLMINQLSGPNTINYIGDYFYSIHQIELSLDYYSLLLKENTLQATGYVNLGKLYLEQGELDQGLEWLAQAISLNPDKPALYLLYCKHTRNHSDKKRYKKAFFEKFPKLQGLSFVNAIL

SEQ ID NO: 1621 - protein, 587 aa, Pelotomaculum propionicicum
MRGAISLAMIVRNEAENLKSCLDSVSGQVDEIIIVDTGSTDGTVEIARLYTDKVYSYHWADDFSAARNYAIEKAKGEWILCLDADETLDLATGDLKSLLAGENQLEAYLLPLNNPTTESTGEYNRFLVLRLFKNNGRYRFQGKIHEQICISENGVVGIADKPVIRHKLITARERNRKRGRNLALLKNVFSEDPQNYFIQYYIGVEWLMLGKPGKALPYFQQAYENLTDEHLLFRSPALRYLIICLKDLGRTNEAIDLCREAVLRYPAFTDVYYLCGVLHEEKKDYRTAIEWLNQAVGRGTPPALYSHMNGAGGFLAYSHLGFCHGMLGQSEEARKSYERALEANPSYIFPVYNYFLIVMAKHGPYSAWERFKAKGYLNRIDLALAAANLFFVSGYPELACRCLGNCAISRARDEEYRYYWGKYNIYAGRLRQGLKCLRTISGESGFYIPAQIHQAIALLLLGSCQEVKALALMLWKNHAARCHAFVLLVLTGLMERRGDVKYPQKVHGIELPKIAAEILEECGHYHPVNKRIKDNTRFHRLIGSLESIIKNTSPGGCLILMDYYRGKALGTKRFYEYKFEPAGVSYE

SEQ ID NO: 1622 - protein, 313 aa, Paenibacillus gorillae
MIVKNEEQVLARCLDSVKTLVDEVIIVDTGSTDRTKEIAAKYTSRIFSFVWTEDFSAARNYSFQHATQDYILWLDADDWVQEEDLHKLVALKADLAADIDAICMNYVLAFHTLGQPTAVAKRNRIVKRSRQFQWHDPVHEYLDVSGHIVFADITITHDRRHSHSQRNLRIFEKAIKEGAVLNHRQLLHYAMELTANGHYEKAIAIYQCQLDDPSGYFEEKLDACDRMAHCYHELGCKDEQLLALLKTFHYDVPRADYVCRIAYYFQENEDFEKAVNWYELALKLEKPDNRLYGVNHAAWTWLPHEQLAVCYGS

SEQ ID NO: 1623 - protein, 634 aa, Bacillus coahuilensis
MIVKNEEALLERALSSIIEHVDETIIVDTGSEDNTKDIAKRYTEQVYDYEWNNNFSDARNFAASFAKSDWILVLDADEYVEQENINKALTELEYLEEKYSVLAVNIINFSGHYGESIAQHRHARLYKNNGFIKFYRSVHEQLMHVEDETISIGISSLILYHSGYITKEIQDKDKSNRNRSLIENELEIEQSKGFDYFNFGNEYRIKGETQKALDCYVKAYKYKVSFQQDWIPFCLCNMVECLIMLERFDAALQIVQDAEKIYSETVDFLYLRGHIYLVQNQFNDAKNIFLEIADNQDRFKSVIKSKDFLEYLPNKKLGYIYAEKEDYQRAVHFFVTAYNYNNFSLESIYQLVMILKKFHTESEIYEFITSKILQETNNKLIHELLQLSANEGLFEFCRKIVNHYFINHKNIQEGLNYKLGVAESTIDLRDKSTSELLEIVSTKLLDILDLFIINYDLKNPKHDNVERVLKGSELSDMYSLIHSPLDIKLTQLVSSKKVTLLIERIIAFNRLDLVDQFTDFILKNREHFEENVLAKIGNTLYNKNFKGAAFSFYTEAEMKELDAESYLNIIHGLLEIQEYADAKKYLLSAIKYGVKDYRIFEIALKYRNELGIKEKLIKKALDLYPYSQNLNSIL

SEQ ID NO: 1624 - protein, 632 aa, Paenibacillus lautus
MNSRTISLCMIVKNEESCLERCLQSVQGSVDEIIIVDTGSSDKTKEIAKRYTNQLYDFKWIDDFAAARNFALSFASSDYILQLDADEILADHQKELQQYLDKDFYYIQIKNDLGSGQYLSHQFIRLFKNSPDIRYRGALHEQVPSDFEIERYGSLSSVKIFHEGYKTHVVKSKQKIQRNFNILLKEIKEKPTAFGYYNLGMQYVLEKKYHDALKALKKSFSLGNQYAFTPKVVLDIMKCLQALGQYQEAIEIGDDAVVLYEGVPDFWYQMGLVYMEWGLIKDAQQCFEQCLEIGEENTSKLVQHYDGTGSYLAQGKLAEIQLIMGHHEEALQCILKAVRDSPDTLALFDIFLSIYPSANNEELFQTISSIWPFSSQRYIELIGYLYQRRNPLLGEFIKYFEMEVVYPVSVFNFIIAGNYERALSEVISNKDRSIEKDPHFTSNLLFLAMVNNNSALLDQFGSDTSLSSKELKWLKKLVVNQAVEEISISRAIQTVWKQLVKDIIQMQRYEYIDILINATNQPELRLLVAECLQSFGFDDLAIQVLVETSNRQLNRKIYMTAAKSLRKLGAVDDALFYLEKAEQIKKDFDVMFEQWRIYHESDKNFEHEVLKKMNSLYPDSKWAKQTLKTTYH

SEQ ID NO: 1625 - protein, 351 aa, Clostridium beijerinckii
MLSLCMIVKDEEKNLKNCLSKAANFVDEIIIVDTGSNDDTKVIAKEFTDKIYDFQWCDDFSKARNFSISKASGDWILVLDADEFISEVPKCSIGKFIMDSLNKDKVGRIRRVNVIEDSTGIRKYGERVNRLFNRKYFKYEGIIHEQIVSIDGRDYKAESVDISIEHVGYTKEVLRRTNKIRRNIDLLKKALKNNSEDPYIYFQLGKSYYMLKDYEISNLYFEKALTFELNFNLEYVEDLVETYGYSLINSGRYSEALVLENCFEVYEKFSDFHFLMGLIYMNNAMFERAINCFLKCTEFLDSNVEGVTTYSSYYNIGVIYEMLGFSEKSIEYYNMCGDYEPAINRIKARSN

SEQ ID NO: 1626 - protein, 381 aa, Unknown
  Description of Unknown: Clostridiales sequence
MATISLCMIVKNEEEVLGRCLDSAVSFADEIIIVDTGSTDRTKEIASEYTDQVYDFKWTDDFSAARNESFAHATMDYCMWLDADDIVTEEQQEKLIKLKDTISSDTAVVMMKYVMGFGSDGRPTFSYYRERLLRNGCGFRWQGRVHEAIAPAGKVVYSEIEIEHRKKRTGEGHSRRNLDIYRKMKAEQAPFTPRDLFYYGRELYYFAAQDPQCLQEARAVLSSFLDRTDGWVENKIEACRFLSLCWRLEGNEEEALKALLFSFFYDRPRAEICCDVGDWFFRREEYRTAAFWYSAALNTEKDEKSGGFVSGECYDYIPALQLTVCFYRLGETDKAEACNELAGRVKPDSEAYLYNCRFFREERDKAQKQPKADKNNEEHEK

SEQ ID NO: 1627 - protein, 372 aa, Clostridium sp.
MEKNILISLCMIVKDEENFIDSCLKSAKDLADEIIIVDTGSTDKTRKICEKYKAKIFYLPWKDNFAEARNYGISKANGKWILWLDADEEIIIKNKNKFYQTLMDEKGYIYLVPIINYYGDFPIDINRSYLFSSYRLFRNHRDIKFTGKIHEHLTMNYSGEIYSEKALPYIEINHYGYLDSIIRKKEKITRNLKILENEKTEPNYSPWIDYHIASEYYSLKKYTKALYEINLSIIGFLKNYKLPPSLLYKLKYDILINTENYNEAKFGIEKAIKLYPDYVDLYFYKGIILFKENSFKEAILVFNQCIKLGEGNSKYLILSGAGSYLSWYFIGCCYKEINDYKKADDAFKNVLAIYPNCIKAQRELSRITKKSN

SEQ ID NO: 1628 - protein, 662 aa, Desulfosporosinus sp.
MAEKISLCMIVKNEEQNLPRCLNSVSGIVDEIIIIDTGSTDSTCQIAQQYGATLNHFLWNNSFSAARNASLEIAQGDWILFLDADEELAPDSQQILKRLVKDEAVEGYFVKIINYLGKEGWIEAVPDLVFRLFRNKKEYRFRGSIHEQIADVILENNSRARYQLAEDLTIIHYGYLDTVIQDKDKKNRNLALIEQELKLYPNNRLLQYHYGVELFRAERYSEAAAVLIQSATDIDPNTIFLPKLIRYIVIAQQSSGQLQAALDTAILGLKLFPNYADLYFYRGLILFEMKQFAQAQKVFTQALSMPEQPPQYASFGGVRGFRAYYYLAQIAESFLDYEEALKYYLYSLRDNPHFTHALEHLVLILRPTIEPLYTKECLEKVCDFCTPAANRLMADIYFRHGAYGLALHYFDQVEEGFPTSSDIKLRKAICLIQERRFFEALRLLDDFSEDSPEYPIAAVNKLFCVWIQEKPQKVRTLWRDLHALGLEIDTENVISLFPAFLERTKPSSQFLLGSDGLLLLLDIVQRLVAMGEIDRAFYFLNSLHPECLIENSDKIAKIFLNYGEDIKAIPFFITAIERDSLPDAHFQLAEIYAHLGKVSEAEQHYKQALQQNPEDPRCYVRLIGLYSAWRQAILKEALERFPENELLKKLVEEVPSSYEAAD

SEQ ID NO: 1629 - protein, 236 aa, Campylobacter jejuni
MNISIVILTFNSQKYLQEVLQSVNFANEIILIDSGSTDDSLIIAKAFKNVKIFHQDWLGFGKQKQFGVEKANNDWIFVLDSDEVFTEELKEEVLQIIKNPSFKAYKVARLNFFFGEAITKMGLYPDYNIRLFHKKYAKFDEREVHESIICQEKIGKLKHHFLHYAYENIEQFIDKQNKYSSLNPKKNNLLKALINPYWTFFKLYFIKLGFLEGKRGFIIAKLYAQYTFWKYIKSEF

SEQ ID NO: 1630 - protein, 247 aa, Unknown
  Description of Unknown: Bacteroidetes bacterium sequence
MLSVVIITKNEERNIGRCLESLQKIADEIIVIDGFSIDQTQKICEKYGVKFVQNTWLGYSETKNFGNSLAKHDYILSLDADEALSEELQKSLILLKKNGFSADSYQMNRLTSYCGQWIKHCGWHPDRKLRLWNKNKGFWQGIIHEKVEMQSPKIEFLQGNILHWSYYNISEHIQKANVYSSLGAENNFKNGKKGSIFKILFSPLIKFLKSYVLQTGFLDGFYGFVICSIASYETFLKYLKTRELEKK

SEQ ID NO: 1631 - protein, 357 aa, Paucisalibacillus globulus
MVSISLCMIVKNEEEVLARCLDTVKDIVDEINIVDTGSSDTTVDIAKKYTDRVFYFEWIGDFAAARNESFRHATKDYILYLDADDVLLEEEQEKIKRLKESLDPSVDSVSMYYNAGLDEFGNVTLQYRRNRLVKRSRNFIWKGDCHQYLEVYGKIINSDIAVTHKKIRHSVGRNLAIYQKKVERGDVFTPRDYFYYGNELRENERYEEAIESYNKNIQMKEGWIEDKVYACINKADCFRFLGKEEEELYSLFESFQFSKTPRPETCSRIGYYFQRKRDFHSAIFWYKLATELDHDFNKWSFTYPAYSTWYPHLQMCVCYYNLQDFEKSYYHNEKAREHRPDDERILFNKELLEVKVG

SEQ ID NO: 1632 - protein, 648 aa, Paenibacillus sp.
MDKLISLCMIVKDEERVLARCLDSVKGLVDEIIIVDTGSTDRTKEIASKYTDHVYDYTWSNDFAAARNESIRRATSEWILVLDADEYVQQAGIESLRTYLINKTPSPYTVLMVPIINYLGSANVDDSIVEATVARVFKAGLGTHYTKPIHEQITNHDHRLQFVQYPLRLYHTGYTEQTRKAKNKSERNLQILERLTETSASKPVDYFSLGNEYASILNHTKAIEYYRRAFKGAQRTIAWYDTCLVNFINSLIYVQEYHEAWELIENYLIEWDNSPDYLSAKGTVLYCLGFYDVSKDYFHAAVQAAETAAKSKDRFWLVSPDYAYKIPYQMLEHYYDHKQDTQQIVLMLIKILQGNPYQYQSLSKLISLLIQREDTQSIINLLERIYSNDVPKDILYLFQATFRSGDTQLSTYYMNKLEATKLVLPVQNNLLYAVLLQDQQRFDRYRELLPEHTMGDLNQSDVMPYLLAALLWKQPMYIPMLSQDHSLFFIRELIIQTLEGESVVITPSKAEVTLLFDLLTSLFTYKLYDAYDQLLQRISSAWLINLLADYYYQSNRLELALDYYSLLLDAGELRAQGYVNLAFLHYNQGAMDEGLAFMQQAIELQPNEIALYTVLCTNTQDHNVIETYKQKLFDQFPGYKDMELFRSL

SEQ ID NO: 1633 - protein, 361 aa, Bacillus sporothermodurans
MVTISLCMIVKNEEDVLARGLDTVKDIVDEINIVDTGSTDRTVEIAKEYTDRVYFFEWTGNFADARNESFKYATKEYILYLDADDVLLEEDQKKLKELKQSLDPSVDSVSMFYNAGTDEYGNVTLRYRRNRLIKTEKNFIWKGDCHNYLEVYGKVINSDISVTHKKISHSTGRNLNIYQTKIDRGDIFSARDYFYYGNELRENGHYEKAIESYNKNIALKSGWIEDKVYACINKADCYRFLGDLDNELKSLFQSFEYSKTPRPETCSRIGYNFQRKKEYIPAVFWYDIATKSEPDSNQWSFSYPAYYTWYPHLQMCVCYYNLGDFQKSYEHNEKAYDFRPKDERILHNKKLLEKKLGINQK

SEQ ID NO: 1634 - protein, 360 aa, Unknown
  Description of Unknown: bacterium 0.1xD8-71 sequence
MIPLSVCIIGKNEEKNIERCLAPLVPYGFEIIYVDTGSTDRTKELAAKYTDNIYDFEWVNDFSAARNFSLQKASHNYVLVIDCDEFLTDIDLDGIEHAVNEHPRGIGMVLRINQCESNGKMTTSPDRVERLFHKRYYHYNYTIHEQVCDINTNSTYCERYDIPLTLDHVGYVGGEEDKRRKAERNNELLFKEIEKHPDDPYFYFQVGQSYNLINDYENSYIYYKKAFELPLNTEELWVQFMAVTFINSMTHTGRSDEALELFEPVYSCFANTADFYCSMGNIYLNLTNPQPLKAMMEYVKASQCPEAREEGSNTFIPYYNMGIINEMLGNVPAAINFYQKSAAYHYPLAEERLSVLNRQC

SEQ ID NO: 1635 - protein, 234 aa, Clostridioides difficile
MITISLCMIVKNEEEVIGRCLECVKDIVDEIIIVDTGSTDSTKEIVSKYTDMVYDFEWIDDFSAARNFSFSKASKDYTMWLDADDIILEADREKLLKIKESLDTSIDIVMAKYNVSFDENGNPTLSYYRERLFKRSSNHKWVDPIHEVVPLFGEVFYSDIAISHKKLHRQDPLRNLRIFEKMISEGKTLEPRHQFYYSRELYYNARYKEAIEGFTKFLDSSRGWIEDCIVLAEI

SEQ ID NO: 1636 - protein, 371 aa, Paenibacillus sp.
MTGQPTTISLCMIVKNEEQTLARCLDSVADLMDEIIIVDTGSTDQTKTIAARYTDRLYTFDWDDDFAAARNASFDQATCSYIMWLDADDVLLGPDRKRLRSLKQRLSADIDAVVMPLHLAEGEQGELLFTSRRIRLVKRERQYRWEGRLHEDLVIPEGRIIHADVAVTHRRMDDHTLRNQRILARWISESGKLEGRLLYFHANECFDRKEYAEAAEAFSRLLEEPSGYREDRITACARLAECYLHLGKPEQQLDSLLRSFRYGVPQADLCCMIGDWFFTRNEWSTAVYWYEKALEQQHHATDLRPVPRPCYSWLPHVRLSHCYAHLGQLDASYEHNRAALRYLPDDPHLLANEGKLREAIPDLSSAAPPSK

SEQ ID NO: 1637 - protein, 629 aa, Paenibacillus polymyxa
MMKTIALCMIVKNEQEHLRRCLDSVKNKVDQIVIVDTGSTDETIKIAKEYTDDVHHMEWNNNFAAARNESIKYATTDYILVLDADEYLEESADLQKEIASGADYYFTKIHNIMSFDRALNHLAIRIFLNNKDLYYQNRLHEHLNIMDEGLNFKSGQAELVIMHTGYTDEMMEGREKAKRNLPLMLKEVEENPTVYNLFNMGRTYMWVGKYEKAITFLKRAYPMSKNLTIASDLIITLCRSLGEMKRYNEALQILQEAVVVHPKEVDLLHLQALYYMEIEYYRDAIATMTKCLDIGDQGITVTEGHGSYIAHFRLADWYELRNDLVKGYEHILEAFKLKNDFAPIMGKYFKILEKANVPLEEVFVSTNQLYPISNSGQLEKLLEVMYQLRHPLLQRYLTEYNVNVQDNVMAAARQYARDYDGAQALWLEMEDIEEQNREDLLVLSMILKDEALFGRTKTLLNLSHKDQKNLYKIIMGDPSGDVKLTQHLENILEKALMHLIRLQEFETFEKILNYLWQGSISVKIKVCEHLVSYGFSEIAIDLLVKLFEQYPKDVGVIRMLGGVCLDLNYLQDAQLFYTKLLEVSGDYVAYEKSYELYEKVDDEVAMNSVLSQINRKFPLCAWSKQNFNR

SEQ ID NO: 1638 - protein, 318 aa, Unknown
  Description of Unknown: Bacteria sequence
MITVSLCMIVKNEEKILDRCLSSLAPMVDEIIIADTGSTDRTKEIASRYTDQIYDYVWDNDFSKARNFVFSKASMEYIYSADADEVLDLENQQRFLYLKEAMLPEIDIVQMYYVNQLSFNTVYNYDKEYRPKLFRRIRTFQWMDPIHETVRTEPVIFDSDIEILHCPTGNHAGRDLDALFSLWEKGVTLSRRLREMYARELMIAGKKEDFFKAAPAFREFLKNSSISLEETKEACCILAFDAFYRNDIHTFFTNALKIIAADGCSEICCLLGDYYYNRKEWADAVLWYQNAAYETSPILNLQYKESFPVKKLTELTKS

SEQ ID NO: 1639 - protein, 367 aa, Ruminococcus sp.
MPLVSLCMIVRNEEAVLERCLDSVAELVDEIILVDTGSTDDTKKIASKFSAKIYDFPWRDDFSAARNYAVAQAVGDYWFWLDADDVVEGENQEKLRRILAHPDADVVFLPYQLSFDEDGKPQMISCRERIFRRSVKFQWEGAVHEAIVPRGKVRYGDAAISHRKIGAGSPDRNLHIYQQKLMCGENFSPREQYYYARELYDHRAYRAALPVLEQFLQDGKGWAPDCMGACLLCGNCYRKLKQPAQALKSLLRALEYGAPTPELCCELGAVFLDQEQYPTAIFWYQLAMEVGEDSREGFRVQACCDYIPAMQLCVCYDRMGDTFSAAAYNELAGSVRPKDAAVAFNRRYFAEKGIQFHDAENHKRKEL

SEQ ID NO: 1640 - protein, 361 aa, Clostridium drakei
MITISLCMIVKNESINLKNCLDSIKNLADEIIIVDTGSTDNTVEIAKDYSDKVFFFEWIDNFAAARNFSFSKASMDYILWLDADDILLPESSEKLYHLKHSLSPSIDAVSMQYNCDFDDYGNVALTVRRTRLVKRSKNYQWDGVVHEDLLIKSSVFYDSDIVVTHRKIKGTTNPDRNLKIYEKLLLSGKEFTLRDALHYAIELHHHKSYQKATEYYLKFLEMNDITADDCVYVCSKLADCYYQLGDRKKEREYIFRSFDYDSPRPEFCCRLGYAFLEKSQFSQAAFWYNLAIQLPKLNNNWVIQNQISSTWLPHIQLGLCYYEMGEYEKSYYHNKTALSYRPNDQDIINNMKLLEELLAKK

SEQ ID NO: 1641 - protein, 256 aa, Prevotella sp.
MDANKISVVINTYNAEKFLKRVLDSVKDFDEIVVCDMESTDNTVAIAKEYGCKVVVFPKGDCVSAEPARTFAIQSATMKWVLVLDADELVTLELKEYLYEHISHKDAAEGLWIPRKNYFMGRFMHSTYPDYLLRFFIKEDTTWPPYVHTFPIVKGRQEKIPAKRKELAFIHLANENVRTMVGKTNQYTESEVEKKKNKNYGIAALIYRPMFRFFKSYILKGGIRDGKAGFICACYDGFYQFIAVCKILEKKYRKEI

SEQ ID NO: 1642 - protein, 361 aa, Romboutsia hominis
MITISLCMIVKNEENILKRCLDSIYDIVDEIIIVDTGSVDKTKEVCRNYTNNIYDFKWIDDFSKARNFSFDKATKDYILWLDADEYLDEKNRKRLINLKENLNESISVISTETHMCIDENNNPKIVARRNRIIKRNEGFKWVGYVHEYISIEGINESNVYDSNICIIHDKVKNIDDRNLKIYEKKLKDGKILSNRDLYYYGRELYCNLKYEKSIEILKEFIKVSKFKEETVDALCKIGECYIKQKEYKLARIYLYKAFEEDIPRADIMYNIAYSFEEEEKYLQAISWYKIILNTDISCDTNQCINMSYLRFKPHLNLCCCYYELKDLPRAYYHHQKCMELNPNDECVKCNEKYFNSIIKER

SEQ ID NO: 1643 - protein, 341 aa, Lachnoclostridium phytofermentans
MITVSACLIVKNEEEVLARCLDCVQRVADEIIIVDTGSTDRTKEIASRYTDLIYDFKWVDDFSAARNFSFSKASMEYLYVADADEIIEEEQIHNFLRLKETLFPEIEIVQMYYCNQLEFNTTYNFDKEYRPKLYKRVREFRFYDPLHEAVRLEPVIYDSEIEIVHKPLSNHAPRDFTTYQKIIARGENLSDKLRSMYARELFIAGEDSDFIDAYSYFYETVLHTTLGLTELKQCQCVLARGARLQQKDQDFFKVCLKNVACSVTSSEICFELGEYYLQNGDELEAILWYYNAAFETEAELNLHYQGDYPLNKLALCYQALGNDEEALKYVNLRDEWKAEER

SEQ ID NO: 1644 - protein, 381 aa, Unknown
  Description of Unknown: Anaerolineae bacterium sequence
MLEEPLLSLCMIVKNEEVYLPQCLESVKDVVDEMIIVDTGSTDNTPKIAASYGASIHEYQWQDDFAAARNFGLEKASGKYILFLDADEELSPQARSQLRSFLLNSDAEGIYLIVRSLSSANALAPYYDSEQVRLFRNRPQYRFENAIHEMIYPAILAHGGRLYKSRFVIHHYGYLKNVVQGTETRIERDRRLLERMYRENPDSLYTKAKLGFIYLLERQYPNALQLLQEVAQGIDPKIVEPDFLHTVLVALAQTAQATGNFKLSKECAKAGILLNTQPSLTRSSMFYYATSSAAWVIDQIEQFAHDGNLRLSRAKLSKAFESLKDELRESQSILEQLRSDCSENPQANENLAIWQQKIARAEQLIENISSLFSHQRENEGS

SEQ ID NO: 1645 - protein, 362 aa, Aneurinibacillus migulanus
MITISLCMIVKNEEETLERCLNSVKDIVDEINIVDTGSTDRTVEIAKRFTDRVFHYTWTGDFAAARNHSFTFATMDYILYLDADDVLLEEDRIKLMELKENLDPSVDSVSMYYNAGMDEYGNVTLRYRRNRLLKRTKNFQWRGDCHNYLEVHGHIINSDIAVTHKKIKHSVRRNLGIYEQKIARGDTFTARDYFYYGNELRENGHYEKAIESYQNNLSLKEGWVEDKIHACIFMGDCYRSLGDYPNELTSLLKSFQYAKPKAEAVCRIGYHFLRKKDYKTAAPWFEFATQLTNDSEQWSFSYPAYHTWYPHLQLCICYYYLGDYQKAYEHNEEARKYRPEDNSVLHNKHLLESKHGILATNK

SEQ ID NO: 1646 - protein, 361 aa, Paenibacillus amylolyticus
MIVKNEERTLARCLDSVADLMDEIIILDTGSSDRTMDIAAKYTDRVYTYTWNEDFAAARNESFARATQEYILWLDADDVLLPGERAKLAMLKEQLPSGGKTAGVIMGYTLAEGPEGSPLVADRRLRLVKRDAGCRWHGRLHEQLRFPQGEVITADIAVTHRREAGNHSARNVRILRKWIAEEGIAQGRLLFYYAGECYDRQRYAAAARGYAKLLEQPSGYREDRLIACARLAECYERLGEPGRKLGALLQSFQYDLPHADFCCAIAACFHERQEIVTAIYWYMQAVDVSSRDPGLRPVPAACRTWLPHARLSLCYAHLGNWEQALLHNTKARKYLPDDPGLVGNREKLEAVIRKQRKEREG

SEQ ID NO: 1647 - protein, 635 aa, Paenibacillus taichungensis
MSKTVSLCMIVKNEEQVLNRCLDSVKDLVDEIIIVDTGSTDNTLKIARNYTEKIYFFEWIDDFSAARNESLKYATSDYILVLDADEYLEVKGDLQKELKTNYDYYLLKIRNEISLGRNFTFTAIRLFKNDISLKYENRLHEHLNILNGARDYTMGESEFSINHDGYTDDKMLEKDKQKRNLPLMELEVEENPTAYNLYNMGKTYFGMQKYDRAVDFFKRAYPLSRDRLFLPELLTKLAYALAENNNKEDSLSILTDAVVLFPKETEMRFILGMIYHKFQYYREAESCFIKCIELGDQGSLVTEGSGGYMAHMRLSELYAEIGQIDNSFREVGMVLELKKNFTPAIQQYLNLMARLNKSLEETEKGVHQYYTIKSVDDLQRLLDIMYGSRSPLLHYYLTTYNIQVQPNVLGTSKIYAKNYMEADLIWGEIVNIENENAQDLLLLSFLMKNTKYLTVIKKLLNLSNKEQRTLERLINVDNDRYVLTSSLEELLVEVCRQMIVLQEFEHFQILVEKLIKTTSNFQPKICKVLSDYGFDELAIDMLIETMKQKPNSIEVLCLLGDLCLRNNYLEDAQLLYSKLLNLGSEYSYYERNRRYFEKVNDFVGLETLEREISQRFPFADVLKINKPNIQEGVKG

SEQ ID NO: 1648 - protein, 337 aa, Unknown
  Description of Unknown: Lachnospiraceae bacterium MA2020 sequence
MATISLCMIVKNEEDILSRCLNSIADLMDEIIIVDTGSTDNTKEIARKYTDKIYDFEWKDDFAAARNYAFSKATMEYIYSADADEVIDEENHERFRLLKEAMLPEIEIVQMYYTNQLEYNTTYNFDEELRPKLYKRIREFTWTDAVHENVRLDPIVFDSDIRIKHCPTGEHQSRDFSIYQKLIEEKKPISRHMQQMYARELFISGSDNDFLAAEEYFKKCMANDEDLDLLYMDTCVVAKAARLRDEPEGLLFASSRALAAGDAPSELLFELAEYYRNHKNYKEAAKWYYSSAFESEAILNASYNSSYPLVGLHICYVIMGDTEKAAKYAAMLRETRI

SEQ ID NO: 1649 - protein, 255 aa, Rhodanobacter sp.
MSQREPLSVVVTTMNNAGTLDACLRSVAWADEIVVLDSGSTDATLAIAAHYGAHIHSQPFAGYSAQKQAAIDLASQRWVLLLDSDESLTPAGAAILQQALQAPVHAGYQLWRREWQFWRWQSLHSRLNHYVRLFDRQRARMSDHQVHESVLVDGPIGVLDVVIDHAGEPDIAGRVAKANRYSTMQLADLAPRKLSWLRLRMVLYPAVAFLRYYVLRGHYRSGWAGFIAARIHAFYAFLKYAKLYELRRSAQRVDR

SEQ ID NO: 1650 - protein, 339 aa, Clostridium oryzae
MISISICLIVKNEEAVLARCLDSLKGIGEEIIIVDTGSTDNTKKIAEKYTDKIFDFKWIDDFSAARNFAFSKATKDYIYSADADEIIDKENYRKFMNIKKVLLNEVEIVQMKYTNQLVYGTTYNFNTEYRPKLFKRLRDFKWIEPIHETIRLEPVIYDSDIEIIHLPECNHSGRDFNTFLSVIKKGDRLSERLVSMYAKELFISGNSTDFKAALDYFKEVIEDAERSADEIKYALCVLAKGFRLNHDIHNFFKNCIKGVADKPCSEICYELGEYYYELNDFYEAAIWYYNAAFESEPYLNIHYKGDYPLKRLMQCYDALGNKEQAEIYRKALSEWSMPE

SEQ ID NO: 1651 - protein, 260 aa, Unknown
  Description of Unknown: Photobacterium sanguinicancri sequence
MTTKRATISVVLIAKNSSMTLAKCLQSVQWADEIVLLDSGSDDNTTEIAREYGAKIHTHLDWQGYGKQRQFAQQYASCEYTFMIDTDEEVTDELRANIEAVLASPQQPNIIYSCARRNWFLGRYMYHCGWYPDRVMRLYRTQERTYNDNLVHESINTIGATIAPLDGDLLHQTCTDFSSFQQKQLTYAKNWAQERFQSGKKVGFSSAFSHSIGAFLKTYLLRKGFLDGAHGLLLSIIIAQYTFNKYITLWSLHQSSTNKS

SEQ ID NO: 1652 - protein, 625 aa, Paenibacillus terrae
MSKTIALCMIVKNEEQFLRRCLDSVKDIVNQIVIVDTGSTDNTIYIAREYTSEVYSFEWINDFSAARNESIKYATTDYILIMDADEYLDTNSNLQKDIATERDWYFLKIHNVLSQGRQIAHIAVRLFANGKGLSFQNRLHEHLNILAEGKTYSNGLGESVLHHTGYTDEIMEGRDKKNRNLPLMLQEVEENPNAYNLFNMGRTYKWIEEYEKAIQYLQRAYPLSKNLTIMPDLLTNLAHCLSSLKREPEALKILNDAIILFPNETDLWHMQALLFLELGYFKDAINSFETCLKIGDQGITITEGNGGYMAHYRLAEVYEKTYRASESYEQIIETVRAKKSFMAGVSKYFQIVTMANIPLEEVYENFNQIYGISTVEELERLLEVLYVLRHPLLNRYLNEYEIKVEEKVSVIAVQYAKQYEKAKLLWIKMGYYAEENSEDILLLSLILKDMKLFGFAQPFLNLSIKEAKLLQNIILSEEIKNQKFSSHLESILMKMIEHLLVLQEYEIFQHVLNYVWVGSLDFKYDVIQKMVNFGFDEVAIDLLVELFETNPNNLKVIQLLGDVCFKLNYFEDTQLFYTKLLDLCPEYSSYERCYILSEKIDDHISASNIKQSIKQKFPLALWVLE

SEQ ID NO: 1653 - protein, 320 aa, Alkaliphilus metalliredigens
MITISLCMIVKNEEELLSRCLDTIKDIVDEINIVDTGSTDRTKEIAAQYTDRIFYFEWIDNFAAARNESFKYATKDYILYLDADDVISEENRVKLKKLKETLDPSVDSVSMYYDAGTDAYGNVTLRYRRNRLVKREKNYKWKGDCHQYLDVHGKIINSDVAITHKKIRHAVGRTVSIYEKKIERGDTFTPRDYFYYGNELRENKHYQKAIESYSKNISLKEGWIEDKIFACIFRADCYRYLGDMNNELSSLFDSFKFAPPRAEACARIGYHFHRQKSYKTAAFWYELVPNKFQILIGGALFIWHIIPGTLICNYAFVTII

SEQ ID NO: 1654 - protein, 342 aa, Amphibacillus xylanus
MTSPNLSVCLIVKDEEIFLDNCLKSISNLADEIIIIDTGSSDQTLSICEKYNANVHFYKWHNDFSAARNYAISKATGDWILWIDADEEFEKSKSLLIKDTISNSSSPMIYLPIINYYGEKFPVNKEQAYLYHQPRIFRNHLGIKFKNKVHEIPLLPHQDDIGYPTEFVDAPIYHYGYIKEVLNKKDKSDRNFNILTEEAKVPGHSPWIEYHLANELYRKQDYLLAFAYVNESIKGFLLHGKIPPSILYRLKYAILLDTNNIKEAWPGINYALYLYPDYVDLNFIKGLILYDQQDYSSALECFNYCLELRENNHKYLILKGVGSFKALHYKNLCLEKLRNEND

SEQ ID NO: 1655 - protein, 364 aa, Paenibacillus sp.
MPTISLCMIVKNEEDHIGRCLASVADLADEIVIVDTGSTDRTVSIVREYTDRIYHFRWIDDFAAARNYSFSLAEKEYILWLDADDVFEEPDRIKFAALKRTLDSSVDAVNMNYNLAFDEFGQVSASIRRNRLVKKSRGFLWHGPVHEYLEVRGNVRTADIAVTHRALHHDSGRNLRIYENRLAQGETFSPRDLFYFANELKDHRLYNRAIHYYEEFLGTGNGWIEDNISACGRLADCFHALGDEKQELDSVFRSFLYASPRAEFCCRLGYVFLRKRDYRTAAYWYEAALQAGKHTDSWALTHVACSTWLPHLQLCVCYDRLGEHELAHRHNETVLEYRPGDRQALANKAYLEGVLAENTETPAD

SEQ ID NO: 1656 - protein, 501 aa, Melioribacter roseus
MIVKNEEKYLKDCLESVKNLVNEIVIVDTGSTDNTVSIAKEYNAKVYNFEWINDFSAARNYALSKSTGDWILYLDADERLEPGSIHELKKILNTVTKAGYFCTVKSIDSENERDHSIRYVRLFKNSPDIKFRGKVHEQITDSLVENGYQIQHSKIVINHIGYDVSKEEKEKKAKRNLELLLEDYNQSKSSYSLFQLGQTYYILENNDKAKEIFSELIKKDDLDNALKAEAYAYLAQIEHSKFNSSDAEKLIDKAIELNPKQTYYYLFMSKVYLRQQNLYKAKIYAKKAMEANKSINNNELLNKQTIYVDNREIIYFGLFLSFRSQDSDSTEYFIKELYRIIKDEEANHKLQLIKLMECVLNGREINEEIADIIEKHLNKYNLDLLITVLEAQKNTDIKLRLFNYIHELYPKNTDAIKNIAQIYDQKGATAEAIQLMEANKDIMLNDPAALFYLASFYIKGGRFNEAIDIFEYMEKSFAQMGEIIQKVKLIKEKLKGFAVAN

SEQ ID NO: 1657 - protein, 349 aa, Unknown
  Description of Unknown: Lachnospiraceae bacterium MD2004 sequence
MITISLCMIVKNEEAVLQRCLDSVADLMDEIIIVDTGSTDRTKEIASNYTDKIYDFTWCDDFAAARNAALSHATMDYIYSCDADEVLDEENRERFKQLKEVLLPEIDIVQMQYLEDGIQTVLNTNRELRPKLFKRLRQFYYVDPIHETLRLDPIVFDSEIEIQHKPVGLHSRRDFRIFERAYERDRKFSRNVLSMYIKELYKWGRPDDLERAAKILEDVEYRGTLPDDLVQESFTILVRNARLHQDLVNMMRYAVRSASIEKMCSELCYEVGAYYYDIEDYPEAIIWLHNVLFETECYIDVNVQGEKTFQMLIHACEEAAKVTIDPPAKAYYERCVTQYSEKLQEYLQK

SEQ ID NO: 1658 - protein, 778 aa, Paenibacillus sp.
MEFLWWTSCTFLHWRWLHLKNRLLGIHMIVQNEEHHLPRCLDSLKHIGTECFITDTGSSDRTPEIGRTYGATVLHARWQDDFAHARNISLPLASTEWVLSLDADEYVAQGLEELLNYLPKVHKSISRLRITIENRYGEGVEERVISQPVRLFRAHQGYRYAGRVHEQLVRHSPCKLAQDEVADTNKSESNTDEESVLIETEPLAPLCLIHDGYLASTIAQEHKPRRNLKLIERELADEPAQPFHLYNLGVTYCQLGQIEQAIEVFRESLHLTELLAPYRPTLVRDYAKTLVGSARYDEAHAILAVERQRYPSYADLHLLYGETLEQQGLEERAYQSYARATDCRKGMDRVGQSDGGGKFDAQYVTEAGSDSYRAYTAMARLAQKRGFLNESAHLYGLALDSMFTYAPAWVGLADVMQQSGETDENIAEALLARCRGFEESGHGDSIRGEMPHSYAVMNEDHLVHVIYVLAGCGAYEQALKMLDADVRTARIHVADRIHWMLCANKVSEALQLAEEHWNVGGAHEVNLLGEHRMDWALACWANGLRLSEAFLATTLPQEKNVWKVMDRLLDQLTKEPRSRKSASQEQKLMQWGPQAEMVAEKVVQQAIKTGQLILAEQLHELRAMMMRDHWDTAVTLRREFASLLYRQGYTMVAANILIQCMTESELDAEGLFWLGETLYAKGHNDQALSLFEQALEQKPDMRQARAGAAVCYMRLAMEAIRQEMVRSSSSGVLDAQYTALEQRLRTTEGIPWRTLFQAKERRNQLASGTNFPMHDREG

SEQ ID NO: 1659 - protein, 256 aa, Helicobacter typhlonius
MKNAQDTIKECLESLKNFDEIILLDNGSTDKTLEIARNFSNVRIFESEFIGFGALKNLAISYAKHDWILSIDSDEVLELSTLALIESLELNSHTIYALPRKNLYNGEWIKACGWYPDYVWRLFNKTFTRFNDNFVHESVIIPKNAHTLKLSSGIKHYAYDNIAHLLEKLQRYSSLWAEQNKHKKSSPLKAITHGIWTFFRDYFFKKGIFYGYKGFVIATCNGLGTFFKYMKLYELQNTTPPEYVRLSSLLIIKKKD

SEQ ID NO: 1660 - protein, 644 aa, Bacillus onubensis
MRPFISLCMIVKNEEKVIERCLSSIVNLVDEIIVVDTGSTDNTIELVAQYTKSIYEFEWINDFSAARNYAASKASGEWILVLDADEYIDEENFKEFILELKKDNGQYESYYAKILNFTGDYGEHLVQNFHDRIYKNNGDIEYHRKIHEQFRSATGGPLRNNKSNLLIFHSGYLKHTVSEKDKNQRNRELLDQEMKSGNNNAFDFFNLGNEYSSLGDYGKALDSYLEAYKLKRDFRLAWVSTTLVQIVLCLINLKRYTDAINVAKDAENIYINSPEFPYLKGEVFFQRGQLEDAKVIFQGIINDKEEYSHIIFRPDLKDQRPHLRLGEIYLFQEEYNSAIYHYTSVLNINKYNNEAISKVVEILSEVHTIEEIASFLISKELINEKNITSYVKACFEIGNPSLAIEILEDYSDEYQLLKKVAQLKNLIIYEQGEIKQFHEVFKPEIIKKLIESNWINIIDILLLRNYATSYENILQVFDSLKQNEQLNKLIDLVDGNESVINVDEGLVIYALQAFFAYKQYDLCNVILDEIETTDNNTVLKIARVLFNNGFKGEALQLYNLCDWNKFDEQDFVNIINCLMKSNSLNNALDVSNYAIMNKNNFRFYQFAIEILNALGDDENKEKYITNALMEYPDSLWLRNQYLQS

SEQ ID NO: 1661 - protein, 734 aa, Anaerotruncus sp.
MKAQVKKPAQKPLISIGMIVKNEEKTLEDCLKAMSPIREAVPSELIVVDTGSTDRTVEIAERYADKVLHFEWCNDFAAARNVSLEAASGKWYLYLDGDEVLEENCTPLIEFLKTPNNPYKSASLLCRNYGDEARTVYSDFRMIRLHRRTPQTRFEGAIHERIAAYNVPTKDLPIIVHHTGYIEGIHESKRRRNRKLLLLDLEKDPDDLRTLRHLLDTYGMETLPDIVEQNRIARKIIRISEESDGINTEWLYAYYALVLSAVNRREYAAAQQLLQEYYDKKGEEEFAADINMSFFKGMVSFDNHDYSAAKKAYLDYQRLCALYWDGKLNTPDVYSMTLPQLHPYPHALSCYATAICWQNEGNYPEMKGSLERAGALTEKTLERADASLMTEFLYAYEAEDFSRLAGLLGEASFLQNGEGWKVFAEWFEKRFEQFEERKKDACLTIAQTDLQNPFAQLCRLRTAQTREQAQELLEQLLDDPDAVKTPLFADLLYATVFYQFDLQHTLSALDSSLVERYWETLAKQRPDWPELLDTYLMEHPLQESDPPVCWFWQTRLMLSLLLSPEPDTKVLFQQPWLDEERFASLAQRYLDAMTHYCRMVYQPAMLLPENRVALPAEYRFVIGWQEAEALQKEQGDSACLQRLGEMLQEFPLMNRLIGLFTARTRQRLEAQKQQREEFEALAENVKQQFYRLASDGQIAHAAQILESYRALCPDDPELLLMQSQLDGPRYTLES

SEQ ID NO: 1662 - protein, 425 aa, Unknown
  Description of Unknown: Candidatus Kuenenia stuttgartiensis sequence
MDQSERLIHPGVRQRRYVHIMVKLSACLIVKNESGILPRCLESIQSFADEIIIVDTGSTDNTVEIALRYKAKVHHFQWRNDFSAARNESLQHANGDWILYIDADEIIDKANALKIRSLINSKDIMALTVRQCIPQQCDNIATSFYSEYCRVFRRHPEIRFEGTIHEQILPSIKRLGGKILRTDIIIHHWAYAFSKEKKRQRAERNLNYLLKEFEKNPDDSFTLFNLGMTYQELGNNDSAIQAYLHMLEKPTDIKNELTGQSHINLSKIYLENDNTTKAAYHAQQALLLDTNNPLSAYMLATIAVTKKQFQKAIEHLETAIKISEGETGIAPSVELNMAQIYLELGSCRYSLHDFVGAENDFLRSLAYDASATNPYILIGNSRLIRGDKRGAKDMFEQALTINPQLTEAKSGLTLCSNEKSALANE

SEQ ID NO: 1663 - protein, 637 aa, Paenibacillus sp.
MKPLLSLCMIVKNEEKVLERCLLSVKTLVDEIIIVDTGSTDQTKAIAARHTDKIYDFSWMNDFSAARNESIRHASGRWILILDADEYIQPADHDKLRKYLLEYKSDRPCGFVLNIMNFGGSGNDEANVTESMGARLFLNGKSIRYSEPIHEQLTSDFGTPSFTPYPFVIFHTGYTVQVVQEKNKSERNLSILEKMNVGEKRYNPYFCFVLGNEYVGVNREDEALKVYRRSLERSSPSDTWYFYLLESLALLEMKKGNYSNAHVNIRNGIKLLPDRTDFLCMEGILLETLGLWNAAENVFQQCIQIAEEAEKKGSPYWVIKPLYGKIVPHQSIAEIKRRKGDITGAIHHWVKTLQVQPKNYTVLQLLMDALLQSESYDQVASIIEQLYPLHQPMNKMLLHKMALKIGSIELASKYAAEVQQLDLRLDDADTVRQNLLLRNWSRSTSSSLQPASLEDSLAMAAAIVHQEISIADSATGDTAACAALVQGALLAINNKTWNNEVLTNQENKLTQTLQLLWRYGYTEIYLSLMQNMASEIVLNNMADWFYTRGLHEQALDLYSVLLENNLLHANGLKNVGVWYINCANTVEAFPFLEASFKMEASYNIIGLFKEHASPEAYRNFKSFYMKKFPVISQCIFL

SEQ ID NO: 1664 - protein, 635 aa, Sediminibacillus massiliensis
MINPGLSVCMIIYNEEVNLKRCLSSIKNIADEIVIVDTGSTDNSIEVAKSFQALVISHEWGEDFSAARNLALEKATKEWILVMDADEVLQDDQITTYMENNDVDGYFVRFINFYGQYEENSFFIDYACRLFRNHPSIRFQGLIHEEVTTSLKAYGWQIGNSDITLHHYGYLHTNEEKQKKHERNLSIIKKALTENTKDSRLNYALGVEYMQAEKYEDAYRIFTKLLTTLPPSTDFAPDIVLKTAHLLRFFQKSEEALTLVKQGLLHYPDFADLHDAKAEILLELHQYLAAIQSLQQSCSCPVRSTYSSQAGAGSFRTLYHLGQAHEKLLDIESAVHYYQESLNKAPTYKPAWKKYTLWSTSPYVSPQFSNDLKRWKESLKVDQWLLLMRTLLASRKWDRWDLAKQQMPERVHAELSLLTCPLAEALTLSTKGQKQMAVRHLLNQKKAFNLEQILFIWCVYYEENLNHKQWLKSHMNNFSLLADLYKCLMEGYQEKYKEAVTLATWMFLESRMIKGYIRFAKSLDMCCPLPMTHLYLFSSIPIQSLQEITEHLKVDTQKLSVEECLAITLLQIKSGTNINTQETLRYLIKKSPSSPLPRLVTLLNYQSKTDPSIIKEIDKVLVHLTYPNSEILLLD

SEQ ID NO: 1665 - protein, 346 aa, Campylobacter jejuni
MNLKQISVIIIVKNAKQTLLECLNSLKDFDEIILLNNESSDNTLNIANEFKKDFANLHIYHSAFIGFGALKNLALSYAKNDWILSIDADEVLENECIKELKNLELQEDNIIALSRKNLYKGEWIKACGWWPDYVLRIFNKNFTRFNDNLVHESLVLPSNVKKIHLKNGLKHHAFRDISHLINKMQHYSSLWAKQNIHKKSGVLKANLRAFWTFFRNFFLKNGFLYSYKGFIISVCNALGTFFKYMKLYELQKQKPKTCALIITTYNQKERLKLVLDSVKNLTFLPNEVLIADDGSKEDTARLIEEYQKNFPCPLKHIWQEDEGFRLSKSRNKTIKNADSEYIITVS

SEQ ID NO: 1666 - protein, 645 aa, Paenibacillus sp.
MNNLLSVCMIVKDEEDTLDRCLKSIKDFADEIIIVDTGSTDATKDIAKKYTEHIYDFKWVNNFSTARNESIKYASGKWILVLDADEYISTEDIRQFRLFLEEEDARASIIYTISVISYVGESIRQANITEAPIPRLFPNHMGIQYHRPIHEQPIGGNGELLTSIPSPITVFHTGYTRDVIEKKDKLKRNELIFTELKKKNGFTAYDHFTIGNECAAKNDQKRALYYYERAFQKATESNPWRFTCAYEMWNIYLKLDRIQDAWDLNERFFGKYKNHPEYYCFQGVMFEQFSFINKAKQSFLTAFQLAEELSAKQERFFLVNPSFGSTIPLSRLAHLASLEHNNQDMIYYYTMILKGNPLEQATLIKLIERLSQHETTEQIISFLSKLYPEPTQRDLILLVNICTSLGVKELAVHYYNQLTDPEALRLESRLKFSILTHQPEVFMKLLNLVEQPVSASTLRLIAVGAIAWNSSEIMNYQDQLESDDPRLASVLQHVVQQNLTVDETKNHAFDFFHLLTDLFLLQQYEQFDQYVSTLKSPLLLNLLANFFYSKQLIDLSVGYYQTLLEEQELHAGSLLNLAYMHINDHLYDDGISFLEEAIRIEPGTKQSYLLLLLNCPDDIKKHRYRKQFFEQFSHYGKLPFLQELQ

SEQ ID NO: 1667 - protein, 634 aa, Cohnella sp.
MKPLLSLCMIVKNEEAVLDRCLQSVSRFVDEIVIVDTGSTDSSKEIAKKYTNKIYDFEWINDFAAARNESLKHATGQFILVMDADEFVDEPNISDLRNFLTKQKPSNDTLYRVTVVSYKEANKPATEEPILRVFANHMNIQYVRPIHEQPTPQAGRSVKIVPIPIKIFHSGYTEETIQSKNKHERNLHIFSEMEKRQQLSPYDQCMLGRQLLFMGKHAEALTHLQAAHISGDKSEEWYKHNLVSILELHLNTNDLFQAYTFAQDNLVPYFHYADVRSLYASILYKLGFWKTAKREFEEAHRIVEIASSGQKSSLVSSDLGFRGPLWHLVQINENEQNYIQAIPYLAKLLMNNKHDIEAINKFIQLSSLNHSFEDVVKILEELLQTDTNRKTYAIVGKVAIRSCHKDFSLHYCRNNITSGLYNLSEKLQYAMLHNDEPLFGACLEILHEDQLPYRIAQQIAMGILIWNRTDWLQYIEQHSQVANFVQDLLNGNVQDFAAEDLPFESLVELYNLQQWNAYEFVLSHYETPQIVNRLASYFLEIHHIPTALQYYNFLTEQDALTASSMAKLAWYYSHQGSLTEAYSLWERALAMEPSQHSHYIHYYEMCEDPLTKQTLKNRLIALNPEYNRLDLLFR

SEQ ID NO: 1668 - protein, 394 aa, Unknown
  Description of Unknown: Bacteroidetes bacterium sequence
MDTSPKPSAAAPSRRPRLSLCMIVRNEARTLERCLRLARPHVDEIVVIDTGSTDGTQAIARPYADVFEEIEWPNSFAVARNYSFDRASGDFIMVLDGDEYLPEPLHWSRIRAALTRPHLAAILLPIKNLMRSTQIVAADRFWQERIFVNDPSVRYEGRVHNQIREAVVAYARRTGAQILKLDAEVVHTGYALDPGDMKKKYAARIELLRAEFEHPRSPQYQAYYGYQLGLVYFVLERYPEAAAIFNQLDYGQLSPENAFYTRLLATQTALKLEEASMALFHANAMLSIDRTEPIGFFTTGLALLLARQIGDGMLMLLEAYNMNEAHQHAARFALNPEVLLGLLARLCERLNLPRHAAAFHNLKAQPACEARTIKALIASLQTSIVSAELEGARA

SEQ ID NO: 1669 - protein, 356 aa, Paenibacillus polysaccharolyticus
MIVKNEETSLARCLDSVKGIADEIVIVDTGSTDRTRQIAAQYTDCIFDFEWVDDFAAARNFAFDQASCEYIMWLDADDVFEPQDRAKLIALKQSLDPAVDSVTMDYNLSFTPEGKVSYSLRRNRLVRRDRQFRWIGAVHEYLAVAGNLLHSDVAVTHKKDKVYTDRNLRIYRKREQAGEDFSPRDLYYFGNELKDHAFHEEAITYYEKFLDTGLGWVEDRIAACQKIADCEAVLKRPERESAALFRSFAYDLPRAEVCCRLGGYFADREDYRQAIFWYEQAVQANRPGDPMVVLNEAAWTWMPHLQLCVCYDRMGNRAKAKEHNDIALTYHPTHPSMLYNDRYFKDLAKESVMENA

SEQ ID NO: 1670 - protein, 357 aa, Anaerotruncus colihominis
MITISLCMIVKNESEVLARCLDSVRDAVDEIIIIDTGSDDNTREIARRYTDHVYDFEWIDDFSAARNYSFSKASMDYCMWLDADDMLAPEARAALCALKATLDPSVAVVMMKYDTAFDASGRAALSYYRERLIRRGAGMFWTGAIHEAIAPAGKVLHTDIAVSHCKLRAGDPDRNLRIFEKLIARGQPLCPREQFYYARELFWHGQYEKAAQVLRAFLDGGQGWIENNIEACRQLAACLHQLGDKSGALRALLRSLEYDAPRAELCCDIGAHFLERQAYHQAIFWYRTAASCKRCDATGAFVCADCYDYIPFLQLCVCFDHLGDHSRAKGYNNLAAVVRPDSEAVLHNRSYFARIGV

SEQ ID NO: 1671 - protein, 260 aa, Methylobacter luteus
MLTVAILTKNEEANLPRCLEAIPDRYPIVIVDSGSTDNTLAIAESRGCRIYTNPWPGFAEQRNFAINQCGIDTPWILFVDADEIYPEKFYDWFESGMSGIDSIDVLMVPSILYLREKRLNHAPGYPIYHPRLVRRETVRFVRNHTGHGEAVIDTCRIGYSDIPYEHYFYHGEIIEWMHKHVGKAAQEVRLKPTAGAVMTTRGRLSVLLGRSWLRVVARFLYHFVLRGGFLDGFAGLEFALMFTWYEATIYVQAKAATQSR

SEQ ID NO: 1672 - protein, 625 aa, Paenibacillus sp.
MNKTICLCMIVKNEEKYLRRCLDSVKDKVDQIVIVDTGSIDATLDIAAEYTKNIFHFTWIDDFAAARNESIKHATSDYILVLDADEYLIASGDLQKEISSSSDYYFVKIHNLLSQGRAINHISIRLFANHKGLIYRNRLHEHLNTMDENAGYKGTFGELLIYHTGYTDQMMKDRQKEKRNLPLMLKEVNENPNAYNLFNMGRTYMWTGEHEKAISYFQRAYPLSTNLIIIPELLTTLCYCLGELNRYEDALQVINDAVNIYPNETDLRHMQGILFIESGYTKDAVVALEECLKLGDQGITVTEGNGSYTARFRLAELYESQNRILKSYEQIVKALQDKKSFAPGLKKYFEIVTKANIPLEDVYENIEQLYNVSSVDDLELLLEVLYALRHPLLNKYLTMYKVNVQANVIASAQQYDKQYMEAKSTWLHADEIESENGKDILLLSLLLQDDQLLQLSKPLLNVSEKECKVLQKIICNVDIKATKLTPYLENMLVEMSVHLLVLQEYEVFQRILDYVWLGSLETKYNVSCNLISYGFNEIAIDLLVKLYEKHPNNVKIIRLLGDTCMNCNYLQDAQLFYTKLLQICPEYSSYERCYELYEKLEDNDGGNIIIERIKDKFQLSMWVKG

SEQ ID NO: 1673 - protein, 286 aa, Escherichia coli
MSEKNVSIIIPSYNRAHILKEVIPSYFQDETLEVIVINDGSTDNTNSVLAELKEKYSQLVILENETNKKQMYSKNRGIEIAKGKYIFFGDDDSYLLPGVISRLLATKYETGADVIGARILYMNNNEKTIEDCINRHKKEGRFVSDLNRLDFSYTCDLDHPIECFYAQPFVLAERELISKYRFDISYTGNCYREETDFMLSLFIKNKKFIYDSKALLINLPPRKATGGARTANRLKYHYESCINNYRFLKKYNDNLNLLSGQKHAIFYRQCQFVLLKMKSFIGKFLK

SEQ ID NO: 1674 - protein, 374 aa, Streptococcus pluranimalium
MIQKINTLDYLNHPTTISCVYIVRNEEKHIISSIKSVNSLVDEIIIVDTGSTDDTLTKIQELKNSKIKVFHFTWCDDFSKARNYAISKATSTWLLILDADEIIEENTILKFLLTYLISIDDFNDTVFNLNVIRGEDSYKTGKVVKNSSNLKYKGRVHETFYSENQEVSYANIKLNIFGIKRVSQKKIEYYNSLLLETMKDYPYDSRWGYLFLRDNFKNLSFQQMLSYSKQAIINDENDISESNYIWNYYSVKILLLLMYKTLETDDDETFLYLLKIIESKCYSLEDVIYLKYCYEIKKYLEYGSFKLAQFLNDFVNSDDSDNIFSKNAKHSLLATFLFLGGFPEKSKNIFNELNKKDNDITYFLNKNFIDDWLK

SEQ ID NO: 1675 - protein, 363 aa, Unknown
  Description of Unknown: Eubacterium rectale sequence
MITISLCMIVKNEEEVLERCLNSLKGLMDEIIIVDTGSTDSTKEIAARYTDKIYDFSWCDDFAAARNFSFSKATQEYIYAPDADEVLDDTNRRRFMMLKAALLPEIEIVQMKYITPSKFNTVQNSSSEYRPKLFKRLRTFTWINPVHETVRLEPVVYDSDICIQHLPQGTHGKRDFTIFKRSFEKNGTLPKSIATMYAKELLKCGSPEDFTNALPYFQGEYRNSPDIESTCVLSRYYRMNGDYDKFFSVALKNVAVDGCSEVCCELGAYYFDKADYEEASLWYYNAAFETKPVLDVECGGGKALHALSECYSRWADEKQKKLDSLPPKSRNVFKGDKELIESLRSQAVDYQKQAEEWMLPEGD

SEQ ID NO: 1676 - protein, 255 aa, Prevotella oris
MNGKERITVIINTYNAERHLKVVLESVKGFDEVLVCDMESKDHTIEIARSYGWRVITFPKGTHHIVEPARQFAIDRASNPWVLIVDADEVVSEALRNYLYEAIGEKDCPDAIAIPRKNYFMGKMMHSCYPDYVLRFLKRENCHWPPVIHASPKVNGRVLKIPSARHDLAFEHLANDTVADIIAKNNTYSDYEVPRRRSKNYATVALFYRPAFRFFKSYFLKRGFMDGLPGLIHAMLEADYQFTIVAKLIEERRAK

SEQ ID NO: 1677 - protein, 250 aa, Unknown
  Description of Unknown: Rhodospirillaceae bacterium TMED23 sequence
  MOD_RES (92)..(92): Any amino acid
  MOD_RES (99)..(99): Any amino acid
MTRLSAVISVHNEEHRLRECLKRLNFADEIVVILDRCTDRSEFIAEEFTDRIIKGSWNTEGERRNAAINECKGDWIFEIDADEHVPEVLGKXILRTISXSRFDWHEIPVDNYIGDKLVRYGWGASFGKAAYPGLFKNGVKVWSNQRVHPKLIWTGQKGFMLENRIDHYVDKNISDMMRRLDSYSTARAKDLVEDDNVGTTINNIRRFFSRFIKCYFFRKGYKEGKYGLLIAIFAGLYPLISHIKAKVEIN

SEQ ID NO: 1678 - protein, 352 aa, Lachnospira pectinoschiza
MDISVCIITKNEADKLEKCLLSLKKYNLQIVVVDTGSTDNTSVIIDKYADISGSYKWCDDFSKARNYSISLAGNDWILVLDSDEWIEKMNIDEVAAIISNQSVNCTGKIELINNINYDNELTRGVERITRLFNRKRCHYEGRIHEQVVSIDKNVVTAVDVPITVGHSGYMGSVDNKKKKAERNIRLLELELKENGPDAYIYYQLGKSYYMQGDYKNASGNFEKGLSFDLDPKLEYVQDMIETYGYSLLNEKRIPEMMFLQNIYSEFAVSADYVFLMGLAYMNNGLFDKAIEEFNKAKSYKLCKIDGCNSYKADYNIGVIYECLGDTAKAVLSYKKCQSYEPALKGLKRLGCN

SEQ ID NO: 1679 - protein, 585 aa, Unknown
  Description of Unknown: Clostridiales bacterium PH28_bin88 sequence
MKDTITLAMIVKDEAKNLKACLDSVKGQVDEIVIVDTGSTDNTLEIARNYTGKVFSYPWDGDFSAARNFAIAKAAGEWIFYLDADEKLLAGTGDLKQLIDQDNTADAYLLPLNNPTADATGEYNRFYVLRLFVNNERYRFFGKIHEQVAIPDSKAVRMSEGPVISHQMLPRKERNRKRKRNLALLKQASREDPENPFLRYYLGVEWMMLGKPGLALPYLRETYQKLPANNTLFRSPALRYLIVCLQALKRLDEAICLCLAADLKYPEYTDIYYLGGILFEEKQEYQLAIKWFNQAVRCGTPPMLYSHMHGAGSFLALYHLGYCHERLGQMENAITCYEQALESNPKYVYPVYSLFRALMIKYNPRHLLDYFKKNGYWGNVDAAMVAAQLFYAWGYPGLACQCLDNSEENGQQTEESLFLQGKYRLYSGGLEWGLACLDQIQGGSGFYIPAQILKVMGLFLQGRFSEGQGVARQLWKNREARCDAWVLLILGRYLEQGKLGGGQKRIREKSPLTSAREMYEDLKHYLPGSQAGQKTYYVRMVNGLETIMKSLSPEAYLNLLEHYRQKAGDIQSLAGYRFGNIGVTP

SEQ ID NO: 1680 - protein, 598 aa, Clostridium oryzae
MRNEVSLCMIVKNEEEYLPQCLESVKDVVDEIIIIDTGSTDRTIDIAKSYRAKVYPYKWNNNFSEARNESLKYATKDWILILDADDELKGQYKDNFKALVNMELDEKAVYIFETLNYYGDKADNNCITVNLNPRMFRNNRGIHYEGEIHNQLMYKNNQYDAICNDVKIYHYGYLNKTIKAKDKRNRNISILNEKIKKEPDEGFNYFNLGNEYMALGDTRKALECYYKAYENFNPLTGFGPILLLRIIVANYNIREYNTALKFVDIATNNYDKFSDAYFFKALIYKDLGKITLQIKALEKCIEIGEPPAKLKFFYGSGGYKAYYELANVYMLFKDYDMAYKYYSKAIDDNPDYIDSIYGIGHLLKEKAVPVKEFKETIETFCSTAAKDYSIAAETFYNEGFYKTALDYVESLQQAGNKSEKLIILKAKCLIRSGEYEKCINMSTLDEKSDFYMEFVMYKILSNISLGKYDDLSALLVSVDQKTLSDRDNKIFEVCSELIKLFTNGKSSMLSEDENEKNYIFIILEICEIMLINEDFDELKVAVNLLNLINNKYVLLYLGKLYNAYGYFDFAKKEIIRSIKEFEVYDNESLDILKSYSYI

SEQ ID NO: 1681 - protein, 278 aa, Pedobacter metabolipauper
MLLDLTIAIPVKNEENSLKGCLDAIGPDLAKKIIVIDSGSTDRTRAIAETYGAEVVDFKWDGRYPKKRNWFLQNHAPLTKWILFLDADEHLTLDFKQELRDALTNGSDGIAGYWLKYTIFFMGKNLKGGYPLYKLALFKVGAGEYERIDEDQWSKLDMEIHEHPVLNGETGKFKNKIDHMDFRGISHYVIKHNEYASWEAKRYMTAVNDPVVRESWTWKQKIKYRLMRSVFIGPVYFFGSYILLGGFRDGKRGLSFAIMKMSYFNQVYCMIQELKINK

SEQ ID NO: 1682 - protein, 339 aa, Ureibacillus thermophilus
MSSSSISLCMIVKNEEDFIERCLKSVYGIVQEIIIVDTGSTDRTSEICKKYGADVYSYSWNNQFADARNFGIAKAKGDWILWLDADEKLDRSHEDLLIKAIQNPTATMYYLPVINYYGKSFPVDKEKSFIYYQPRLFQNHKGIQFYNRIHETPLFPDVNDSNYTTDYLEIPIHHYGYIEELIAKRKKADRNLQLIEEEYKNPEHSPWIEYHLAYEYYRRGDYQKAFDYLNESIFRFLLNSIKPPSILYRLKYGILIDTNSLDNALEGIEKAIVLYPDYVDLHFIKGYILFQKKKVEEALDSFEKCLELGEHNPKYLILRGTGSFMAEKYKKLCLENIQK

SEQ ID NO: 1683 - protein, 358 aa, Bacillus aryabhattai
MSASISLCMIVRDEEETLERCLLSVHHLVDEIIIVDTGSVDNTVKIAEKYTSNIFFLEWKDNFSFARNFSFSNATKNYILWLDADDYLTKRDQTELKQLKDQLDDSIDSVTMNYHLAFDENNQPTYSLKRNRLVKRTRQFKWIGAVHEYLEVYGKIIDSNVAITHGKEKNTSNRNLLIYLNKRKNEEVFSTRDLFYFANELKDHHRYSEALTYYEEFLNKQDGWIEDKIQACLNKSFCFEKMGEKEEAIRSCLETFTYNTPRAEACCAIGRLFMEKHNWENAIFWFEVALQQPKPSSMAILHEPSWTWIPHLQLTVCYEKINTMEKAYAHHLKCMELIPQHASTLHNESYFQQRKPLV

SEQ ID NO: 1684 - protein, 583 aa, Unknown
  Description of Unknown: Clostridia bacterium k32 sequence
MKERITLILIVKDEEKKLPKCLQSVQGHVDEIIIVDTGSTDNTVEIASRFTDKIYRYPWEGDFSAARNFALAQASGEWILSLDADEELVSGEGDLQRLINTGQNVEAYLLSLHYPTADSSGAYNIFHVLRLFRNNGRYFFQGKIHEQVVVQERGVVGVADRPSIRHKLLSTKERNRKRERNLALLKKACSREPDNLFLQYYLGVEWLMLGKPQKALPYLKQSYEQLTDEHLLFRAPALRYLIMCLQALGRLEEAICLCLEADIKYPDYTDIYYLGGVLFEEKKEYQLAVKWLKQAVLCGSPPALYSHLHGTESFLAYYHLGYCTEMLGQKEEAKENYEKALQANPHYVYPLYNLFMLFCTAHGPKATLAYLREKGLLADAQMAKEAANLFFISGYANLAYSCLADFKASAEVARELKLDLAKYAVLSGRARQGLELLNTVSEDKVLRAEASIYCLLAHLLLGEFTQARTLALALWKQSDSRCLGHAFLCLIQVLDKGTMPICPLKIREEDVLEQLIKIFDLCSYYLPERSSEADSFYFKLKSGLEALCTNISAEGCLSLAECYGQRAGNWRSFCANKFGLKGK

SEQ ID NO: 1685 - protein, 335 aa, Unknown
  Description of Unknown: Lachnospiraceae bacterium AC2028 sequence
MTISCVMIVKNEEKILARCLDSIRDLMDEIIIVDTGSSDKTKEIAAKYTDKIYDFAWTGDFSDARNFAFSKATMDYIYSADADEVLDEANHIKFMALKTMLPEEVEIVQMRYGNQLMHSTVYNFNEELRPKMFKRLRQFVWQDPVHEMIRLDPVVFDSEIVITHMPEENHGHRDLEIFSKATIGGGQLSKRLFDMYVRELFIVGTEDDFRNSLPYFVSCAADVNLDADSVNKACLVISHTARIHGDIVMFFKYITKLMASDPSSEVCLELGLFYERIQDFEEAAIWFYNAAFETIPAVVLTSSGKDAAEGLKRVYDAMGMPEVGMQFAKDIEAKG

SEQ ID NO: 1686 - protein, 624 aa, Paenibacillus amylolyticus
MSKTIALCMIVKNEEQFLRRCLDSVKDKVDQIVIVDTGSTDNTLSIAKEYTTDIVQMEWTNDFSAARNESIRHANTDYTLVLDADEYLEQTTNLAEVLQSGADYYFTKIFNFMSGDRGMTHLAIRIFKNKIGLCYQNRLHEHLNTREQEDQLVAGYSNLMIMHTGYTDEIMESRGKAQRNLALMLVEVKGNPSVYNLFNMGRTYMWLGEHEKAIQYLQKAYPLSKNLTIAPELIASLCRSLGELKRYDEALTILEQAVDLYPLEVDLFHLQALYYMEIGYHRDAMACMNRCLEIGDQGISFTEGNGTYIAHLRLAEWHSTRNEYNKAYEHITEAIRFKADFLPVIGKYFEIVEKAGLSLEEMFTNANDIFSITNSKILGKILEALYQLRHPLLQRYLTLYEVTVQEHVMAVASQYAKDYSQAREQWLGLSEQEEQNGVDILLLAILLKDEVLFEKAGPLFNLSDKEKKFLTIVVRDESIDKLSLTTYTESILERVLVHLIRLQEFEVMETILGYIWNGRIEIKIKVCEHLADYGFGEIAIDLLVELFKLHPRNKNIIRLLGDVCYRSNYLQDAQLFYTKLLELSDNYSSHERMYNVYLKSKDEKGKNALLNVISEKFKLCLWLR

SEQ ID NO: 1687 - protein, 701 aa, Clostridium botulinum
MKLSIAMIVKNEEKNLERTLIPLKKLKEYIDVEIVIVDTGSTDNTIKIAKKYTDKVYLHIWNNDFAAMRNISIDYCTGDWILVLDADEALYDIKDLGELFNRNIIHKYNSAFIKIVNFNKNIENSINNENIAPLLRIFKRNTVKYEGIVHEQPDFKAPVLNTNIRFIHYGYDNDDYELMECKFKRNIELLFKQLRDNPEDIYVNFQIATSYAMHKDLKEALKYITKAYELCKSELTKYIYVVDKYCYILYSLKKYELLREKAIEGINNYKDFLDFYFYLGEACFNLKQYDQSIDAYCNYLNIYTKLQKNEIEFTNILSESTRGFKDNILYNLAMGYYNLKKYNCAIDAIENINDKNIIKDKIYGVFKIIDKGDLWGKLYIIDGIIDKHNFEDALVYVHEELSLNKLQNIEVEQLKQLKVIINIVSYFKINNNINEEIFNEIKEIILRNKVPYIVFVYYTLKYNINEIKNFICFGKDKIESILIHLCKNYYEFNEVLYKGLNVLKSSTFSDLLMRTTVLKSFILGGKIPKELREKIFLSYIAEKYYTIIKCYDNEIIKHNLWILSSEERFIIQLKETLSYKYNDTLKCIQCMKNLLNLDNGYIGYIKLLVGKFEEVTINKKVKAFLPELVQNIRTLINNKKYQDAYNTIEKGLDLVYFDFDLMVLKYNLLLNFNYTEEAMECLNNIILYGDIDRVNNFIYNH

SEQ ID NO: 1688 - protein, 357 aa, Propionispora vibrioides
MIVKNEEKVLGRCLESVAGIADEIIVVDTGSTDRTQEIAGQFTASVHHFQWIHDFSAARNFAFSLATKDYILWLDADDIFLPEDRSKFLQLKYAPLDPAIDTITMLYNLSHDQYGKVTSQLRRNRLVKRSNNFQWVGAVHEYLAVAGQAFHSDIAVTHSPLEHDADRNLLIYEERQKKGEIFSPRDLYYFANELLDHQLYNRAIEYYQRFLATKQGWVEDNIGACGKLADSFYHLSDPENQLKYIFTSFTYDTPRADFCCRLGFHFLQANQLLQAIFWYKTATQLEQPSETWGLVNYSCRTWLPHLQLCVCYSRIGKYQLAHEHNEQAAKYMPDDPRIAHNRKFLRSFIEPQPETVD

SEQ ID NO: 1689 - protein, 633 aa, Bacillus cytotoxicus
MKPFISACLIVKNEEDMLRKCLESLQGGVDEIVVVDTGSTDTTKEIAKEFTDKVYDFEWTNDFAEARNFAASKASGEWILAIDADECVDPKNLAAAIEEIKSHDNKFDVYAVEINSFSDKYGENLSMNHMQRIYKNNGEFHFSGAIHEQIVEKGEGRQELVFSALKLYHYGYLPNVVKKKNKRKRNMDILKKALKSNNNDGFTYFNYGQELRSLGKTKEALESFIKAYQNKEDVYKEWVSRCLYFIVEMLVELKRYEEAIVIINDAEEVFSTAPDFPFWKGEIYFKQKRFDDAKEVYTHIISNNMIYQNAVFNAGAKTFLPHVRLGEIYTQERQHQQALQHYVEALNENDSSVKIIVNIISLLSKYHTPEEIYDFISTRQIIKSDYIRTEVLKLLLDLGLGKVALLLMNDFINQQQLLIHSLQLKANMIIAEEPLQFTIDNLMYGIQMEVFDIADLIVLYAMTKDAHVQNILENSKFKHVFYNLFNKTKNAKKLKQDEYLPILEKAICFQKAEFVEKLISYTSLFPKQIHAKIADLFYNNAYEEIAMDFYQLSDENHVTKQGYVNIIEYLLMHENQEEAYRIALEALQKFKADFRFYKYSIEIEQGDTEGIISKAIQEFSDSNWLKGKLLMSI

SEQ ID NO: 1690 - protein, 651 aa, Paenibacillus baekrokdamisoli
MTTLISLCMIVKNEERTLARCLESVQGLVDEIIIVDTGSTDTTKEIAKKYEAKLYDFTWVNDFSVARNESLQKATGKWILILDADEYMQKEEHTRLKESLLRADPSVPQGFIFNVLNIVGESESNMSGFLPSPSVRLISNSRDIYYSRPIHEQLITSAGHLACTSLDITVFHSGYTEDAKQDKGKSQRNLEIIAQSQTYINQPLDPYNNYTLGNEYFNLGDYKKAVSYYEQAYNQADAQVAWMPKCVDSLVSSYLLMGGFNHAFNYIQVGLQRWGTYSDHHAYLGFLYQNLGFNDLAKESFLMAIQLGEEASHSDKHGAIVKSNLANVFPSQKLVEIYGGQRDTIQTVHYLSKVLNHAPQDTASLHKLISILAQAESDSSIIAFLDRIYPIAKPGNLLLLFRMSLISAAASLAQYYYQKLKEINVQLGEHELLHFALLNQNQALFQQTVNKHRIATDPTSPPPYKFLLIGTLLWGAPEVPANSIAPEGNPLFRIGQSIHALIIGAAPAVIVEEDMSIYIDFLITLFNLHAFEAFDLLMNHLTGIEALNAIADYFFANNQLELSLNYYSILLEDHSLYASGYENLANLHLNQGEIEQGLLFLEQAVALNPNKAALYISFCRYSEDAAKKEFYKKSLLHKIPHLNDLPFIASM

SEQ ID NO: 1691 - protein, 595 aa, Clostridium sp.
MKNEVSLCMIVKNEEEYLPKCLSSIKDIIDEIIIVDTGSTDKTVEIAKTFGAKIYYFKWNNNFSEARNESLKYATKDWILILDADDELFEEDRKTFKALLNSKLDEKAIYYFETLSYYGSNIEKGDIAININPRLFKNNRGIHYKGEVHNQLVFYQGEYNAICDSIKIHHYGYLDKRITSKDKRNRNISILKEQIKVNPNDGFAYFNLGNEYASLDDMNAALEYYYKSYEDFDSGRGYSFILILRIIVSNYNLGNYDEALKFIDVGVQHYPKCTDLYYYQALIFKATDRPTLQIKALEKCIEIGEAPSELKFLYGTGSFRAYYELGNIYMKYKDYDTAYNLYIESMSSKPDYIEPLYNIANILKEQNVPIEKFKAIIEEFFSKNKESCYAIIADLFYHVEYYKTALEYMKKYEDTGTSAEDTIMLKLRCLIRNGDFEEYLSINEMDKKSSCYMFFSMYRVLSAILLKKYDYASSIVNNFKYDELSIYDKKLLDVYSELIKLFTKESTRILSQDKNNKEYMNIILEILEVLLINNKFDELKIAVNLLNLIDNKYALFYLGKLYFKNGYIDLAKKEILRSIKEFDVYDSESLDILKY

SEQ ID NO: 1692 - protein, 629 aa, Paenibacillus polymyxa
MYKTVALCMIVKNEEQYLRRCLDSVKDKVDQIIIVDTGSTDATVDIAKEYTNEVYNFKWINDFSAARNEAIKYATSDYILIMDADEYLDESSDLKADVSSECDYYFLKVHNFVSQGQKIEHTSIRIFANFRGLFYRNRLHEHLNNLDEDKKAFTSGFGKSYLYHTGYTDEMMQDRDKQKRNLPLMLQEVKENPNAYNLFNMGRTYKWVGEYEKAIQYFKKAYPLSTNLIIVSDLLTNLSHCLVSLKREFEALQILNDATALYSNETDLRHTQALVFSDVHYYKDAIAALKICLQLGDQGITITEGNGGFMAYYRLAELHEKNYRLLLSYEHIIECVRIKKDFIAGIAKYFEIVTMASIPLTEVYQNFNQIYRISSVKELKVLLEVLYALRHPLLNRYLSDYKINPEDNVLVVATQYDKQYDKARLMWLGMENIDAENGEDILLLALILKDSELFELSRSYLNLSVKEAKMLRSIIMNHEIDTPKLTTYLENILEKSVDCLLVLQEYEIFQSILEYIWLGSLELKYNTLEKMMRYGFNEVAIDLLVKLFEVNPTDKKIIRLLGDACLNSGYLEDAQLLYTKLLDLSPEYSSYERCYRLYEQLEDKEMMKNIIDSIKNKFPLCLWVHEIAD

SEQ ID NO: 1693 - protein, 718 aa, Anaerotruncus colihominis
MKAKQTGILLTIGMIVKNEEQYLPRCLEALRPLREALPCELIITDTGSTDRTLEIAAQYADEVRHFQWCDDYAAARNTTLEDISGEWYMYLDADEIFDPDISGVVDFFKGPLCKKFQAAALRFINYDSQNKPAGSFYPTRIIKRAPGLHFEGAVHEHLVSDVKDGYALQTVVRHYGYMGELARVKMLRYRPMMLAELEKNPDDPRMLRQLVDGYDPHYPDEAAQRKKLLERLIAICLADKTVNQRPFAFLSLVRTQWTQSDFEGVLDTIRRYFKEKLIKGDSAADIDMYAMRGFALFNLKQFAPALDALDEYRRLYRAFYERKLDLSDMGTVGLHGINDEYLMRSLYVSTQCCLALNDKERAKTYIGQVDISSLAAAYPDLPFLADEFGYMRASGDFARMGALCTQIMAVNGESVRLRFFQLVEKEFPVFDSQKLEAARALAAVKGEHKFLTLHRMRAALADGDSSQAAALAQALLVKQDAGADPYFADVLYCVMLCGQPLAPALDVFGAALEETLNVLAGQRPDFDTAVCAAFGREPFPQSGTPGELFRRTRVMLLALLRGTGAEQARRDQLADLYTREIISFCEQVYNLAALPEQERFILPAEHRFALGMREVNAVLGQGDAAACLQKLQALLDSCPTMHRLIKRRLDSIARQIQEKSEAVNEFERLAMSVKQQFYGFLKAGQRDACAEVLKAYAAVNPDDPEIDVMRRDFEQSFR

SEQ ID NO: 1694 - protein, 362 aa, Anaerovirgula multivorans
MPTISLCMIVKNEEETLARCLDTVKDIVDEINIVDTGSTDRTVEIAEQYTDRIFYFEWIDNFAAARNESFKYATKDYILYLDADDVILEESRVKLKELKATLDTTVDSVSMYYDAGTDAYDNVTLRYRRNRLVKRAKNYRWKGDCHQYLEVQGKIINSDIAITHRKIRHAVGRTVSIYEKKIARGDIFTPRDYFYYGNELRENSRYEEAIESYNKNISIKEGWIEDKIYACIFKADCYRYLGDLDNELSSLFQSFQFFPPRAEACSRIGYNFQRQKNYKTAAFWYELATQQVPNPEQWSFIYPAYYTWYPHLQLCVCYYNLGDYQKSYEHNEQARKYRPEDNRILSNKNLLEEKLNFTKKVQ

SEQ ID NO: 1695 - protein, 367 aa, Sediminibacillus halophilus
MISISLCMIVKNEEAVLARCLDSIKDIVDEINIVDTGSNDNTVNIARQYTDRVFYFEWIGDFAAARNESFKHATKDYILYLDADDVILEEDRKKLKKLKETLNPEVDSVSMYYNAGMDEYGNVTLQYRRNRLVKRSRNFKWKGDCHQYLEVYGNIINSDVAVTHKKIRHSVGRNLSIYQKKLDRGDTFSPRDYFYYGNELRENGHYEKAIESYEKNIAMEDGWIEDKVYACINKADCHRHLGDTVKELESLFRSFQFSKLPRPETCSRIGFNFQRQQDYKTAVYWYDLATKLETDPNKWSFTYPAYATWYPHLQMCVCYYNLQDFEKSYEHNEKAREYRPKDKKIIFNKELLEKKLGINQHETAELN

SEQ ID NO: 1696 - protein, 362 aa, Paenibacillus sp.
MITISLCMIVKNEEQVLARCLDSVKELVDEIIIVDTGSTDRTRDIAANYTNRIFHFEWIDDFSAARNYSFEHAESDYILWLDADDWVQEKDLEAFKTLKQSLDPAVDAVCMDYYVAFDPLGQPTAVIKRNRLVKRSAHFEWHDPVHEQLAVSGKVVFSDIAVSHGRVHAKSDRNLRIYESRLAKGISLSNHQQLQYAMELTAHGYFDKAIGIYQIIIADPYRYFEDKLLACDRMAHCHHELGYKEQELQSLLQTFNYDIPRADYVCRIAYYFQENLDFEKAVNWYQLALRLEKPKDRLRGINHMAWTWFPHLQLVKCYGKLGQLEKAYEHNEIALSYSPNDQAILDNKQVLVKHLSRRGYFK

SEQ ID NO: 1697 - protein, 373 aa, Clostridium sp.
MLSICIITKNEEQNIKRCLSCLSDTELEIIVVDTGSTDRTKEIAREYTDFVYDFAWKDDFAAAKNYVISKASNEYVMVIDSDEFLEKTDLVQLEELIEAHPDDVGRIRRINVFSRDGVGQENREWLNRIFSKKKFHYEGRIHEQVAPYEGDTYDTYQTPVTILHTGYDLPMEERRKKAERNALLLQKELENWEEKYPGITYEAEKYQISSRQAEQISYILYQLGKSAYMAQDYEKACDYFGRGLSFDLNPRLEYVIDMVETYGYALINSNRAEEALFFEGIYDEFGDSADFQFLMGLIYMNNGRFEEAVAQFEKATEQKDCKMTGVNSYLAYYNIGVIYECLGQKDKALAYYGKCPEYEPAKKRMQEMNASNL

SEQ ID NO: 1698 - protein, 365 aa, Natranaerovirga hydrolytica
MITISLCMIVKNEEALLARCLDTIKDIVDEINIVDTGSTDRTVEIAKQYTDRVFFFEWIGNFAAARNESFKYATKEYILYLDADDVVLEEDRAKLKELKETLDPSVDSVSMYYDAGTDEFGNVTLRYRRNRLVKREKNFLWCGDCHQYLAVNGKIINADIAITHKKIKHAVGRTVSIYEKKIERGDDFSPRDYFYYGNELRENGHYEKAIESYDKNIALKEGWIEDKIFACIFKADCYRFLGDLNNELNSLFQSFQLSAPRAEACSRIGYNFQQKTDYKTAAFWYELAIQQVPDPDRWSFVYTAYHTWYPHLQLCVCYYNLGDYQKAYEHNEEAMQYRPEDQRMRHNKALLKEKLNKPATVKEDN

SEQ ID NO: 1699 - protein, 636 aa, Bacillus cereus
MKNFLSACLIVKNEEDMLRRCLESLQGSVDEIIVVDTGSTDNTKKIAEEFTNKVYDFKWENDFAAARNFATSKASGEWIFAIDADECVEKDNIEEVIKKIKLNGNKYNIYIVEIISFLGRGGQSTTVNKMARIFKNDRTIQFKGPIHEQLVAVSGSQNVAFSTLTLYHYGYLEHVIEKQDKKNRNLEIVKQDLKSGKNKGFSYFNYGQELRRLRKTSEALNNFVKAYAHKESIEEEWVRTCLFFIIECLTELKRYEEALKIIKDTETLWPSAPDFTFAKGDIYLLQKRFDDAKEIYQDILANGDSYNNIVYHHDRKSFLPYERLGRIYQIEKNVEAALQAYIKALNENSTSIHIIIKIVEILSEYNEAQEVYDFLNNHNIIKADAIRLEIIKCLLGIGYADLAVKLAGDLEKGNENLIRVINLKATMIQYPFRDNISLTFEEKDILLGIEIGMFDLADLCILYDLTQNQFIEIMLTGSKFKHVFEGLFTELNHSTKIKSEEYLSILKRAFCYKHIDFVEKLIVLKKLVPKDINAKIADLFYENGYEDIAMSFYEISDDNHVTKQGYANVIEYLLEIGNKEEAHRISVEALNKFKKDFRFYKYSLETSEEDAEDLMSKAVKLFPDSNWLKRILLLTF

SEQ ID NO: 1700 - protein, 363 aa, Paenibacillus sp.
MNTISLCLIVKNEEEVIGRCLKSVHQVVDEIIIVDTGSTDRTKEICLEYTNKIFDFEWINDFAAARNFAFSYATMDYIFWLDSDDVLLLEDCQKLKTLKELLDPAVDSVTMVYCLAQDKHGNMTSSNRRNRLVKRLNKFQWRGFVHEYLDVAGNILNSDIVVFHKPLKHHNSDRNITIYKQRLEKGEEFSPRDLYYFANEWLDHGLYEQAVEYYEKFLDTKQGWIEDKIAACGKLADCFHHLDNTEREMYYTLKAFEYDTPRADSCCRMGYGFMQHSEWEKAVFWYRLATELKIPKDNWGFLNHACWTWLPHLQLCVCFYQLGEYEYAYKHNGIAGRFIPDDEKVLYNQRLLEALLGRNKTVE

SEQ ID NO: 1701 - protein, 350 aa, Herbinix hemicellulosilytica
MISVCIIVKNEEKLIEKCLKHLLPLEYEIVVVDTGSTDNTKAVAAKYTDMVFDYEWQQDFAAARNFAISKATNDYILMIDSDEILLSYDRKELEELIKLYPDRIGRIGIISEYVRGNEKYKVKSQVSRLFSKKLFCYRGSIHEQIVPINNNNGVPVTYNAPLLVNHSGYDGELEVRRKKTERNINLLLKELKDKGDDPYILYQLGKSYYMQEDYPAACEAFWKALYFDLDPKLEYVQDMVESYGYALLNSNQYETALQLLGVYDEFAVNADFVFLIGLIYMNNAMFTEAISEFLKAAKMTEYKMEGVNSYLAFFNIGVIHECLGNTEKAIKYYKKCGNYEKAQERLRNIR

SEQ ID NO: 1702 - protein, 353 aa, Unknown
  Description of Unknown: Eubacterium sp. CAG:38 sequence
MISISLCMIVKNEEKLLKRCLDSYRPVCDEIVIVDTGSTDRTKEIAAGYTDLIYDYPWNNDFAAARNFAFSKANCDYIFSADADEVLDEENRRQFLNLKQVLVPEIDIVQMIYVNSKSHNTVYNFEEEYRPKLFKRLRTFEWISPIHETVRLEPVVFDSDIKILHLPEQSHTKRDFGVFADAVRRGVRLENYVVIMFCKELFISGTDEDFLSVREIFENVLAKEDRPEDCRKNIACVLARIYRLTNAYNEFFKICLKDMAQNPCAEICMELGHYFYGLKDYEEAVLWYLNAASETPSIIDIHSSGDAPLACLSKCYSTLAAQAKQDKNAELSAAFLAQAEDYQAQAEHWQAAI

SEQ ID NO: 1703 - protein, 354 aa, Unknown
  Description of Unknown: Eubacterium sp. CAG:86 sequence
MISISMCMIAKNEESVLKRCLDSYSGLFDEIIIVDTGSTDNTKNIAAGYTDKIYDFEWTGDFSEARNFAFSKASCDYIFSADADEVLDDYNRNLFMRLKSVLLPEIDIVQMKYVNCSHNTVYNSKKELRPKLYKRLRTFTWISPIHETVRLQPVIFDSDIEILHMPQSSHSKRDFSIFKKSIDNGTHLENYVLRMFCKELLISGSDDDFEEFYDIFTRRLIYEYTDNDCLEAISCVLARMYRLKNLSDDFFKIALKNVAVSPCSEICLEIGDYFFNKNDISEAVLWYINASSETESVLDIRTSGDIPLRRLAQCYTTLASEAVAHGDDVLADTYNNNASEYEKQADNWKMPEEL

SEQ ID NO: 1704 - protein, 324 aa, Vibrio sp.
MVSDIKFSAVIITKDEEKNIYDCISSIIESIDELIIYDTGSTDSTISLARNYPSDKVLIYQGSWNNSFSEARNAAIDYCSNEWIIFIDADERLIDDPNNSIRNSIHRYLVNGEDYSLGCPRIISESRITHSLIRILPNNGKHRFHGRVHEYIEARSATVKKLPITFTHSGYDKSTTHFQYKSERNLKLLTMQHREEPSNARWLYYYLLYDNNCTPVSERIQLSKRLASSALTPDIYSHSAYSLLISLLLNNNEIDRVLTESLECLNRHKCHFDAQFFNILQRFEGNLEREFETELEDFLAKNEPEETSFLTKKICKEIARSIEM

SEQ ID NO: 1705 - protein, 702 aa, Clostridium sporogenes
MKLSIAMIVKDEERNLEKTLIPLKKLQDYIDTEIVIVDTGSTDNTVEIAKSYTNKVYFHNWNNNFAAMRNISINYCAGDWILILDADEVLYDIDGLINLLNSNSLNDFNAVLLKRIEFLKSVEYSVSNGYISPILRLFKKNTIYYEGAIHEQPKFNYPVMESSVRFIHYGYDNNDYEVMEYKFKRNLSLLLGELKDDPDSVYINFQIAVSYTMHNQLKEALEYIEIAYEKGEKNINKYLYVIDKYCFILYNMGNYKALIDKAIEGIKYCNDFLDFYFYLGEAYFNLKQYNSAIEIYSKYLKFHEGFNDTLVMPNNTLAVMTRRYKENIIYNLSLSYYKNKCFKESLDTIKTIEDSNLIRQKIVFLIKIIVEGNLYNEINIVEKYIDKYNYENLLLFVYKEISVENLKKLNNIKLYEKLHEIFFLVKYFKENDSMDEKIAEDIKKIIDKAQQPYSIYVYHILKYNIHEIKNLINFGKDKIENILINLCITYFDFNGVILQGLNKIRPNNISNILIRTVMEKSLIVASNLPVNERKNIFLNYIADKYFVILKLYNESSMERYWWILPSEERGIIKLKEGLSYKYKDSLRYIQYMKSIINEERIYIDYVKVLIEEDYDFVLNNELKVFIPELVSNIQLLINNEKYQEAYNTIEEGLSLVKFDFELMLLKYNLLLKFNYEEEALKCLRNIILYGDKEEVSKLIKNI

SEQ ID NO: 1706 - protein, 368 aa, Jeotgalibacillus campisalis
MPTISLCMMVKNEEEVLGRCLESVKDLVDEINIVDTGSTDRTVEIAKEFTDRVFFFEWTGRFTDARNESFKYATKEYTFYLDADDVLLEEDREKFKKLKETLDPAVDSVSMFYNAGTDEFGNVTLQYRRNRLVKTSRNYKWEGDCHNYLNVFGHIINSDIAVTHKKIRHSVGRNLSIYDTKIENGDVFSPRDYFYYGNELRENGHHQKAIESYSKNIELKEGWIEDKVYACINRADCYRFEGDTDKELASLFESLRFSKTPRPEMCSRVGYNFQRKKEYKAAIYWYELATTIENDPNRWSFSYPAYSTWYPHLQLCVCYYNLPDFEKSYKHNELARKYRPDDERVLLNKELLEKKLGLKKETNADTPS

SEQ ID NO: 1707 - protein, 645 aa, Cohnella thermotolerans
MTWPNLEDDMTKLLSLCMIVKNEEKVLDRCLTSVQGLVDEIVIVDTGSTDRTREIARKYTDQVIDYAWKNDFADARNVSLRHASGRWILVLDADEYVQPHGHEELRRLLSERSASSNICYLLKIMNMMGKESSGQVHFMESQGARLFINSLGIHYEEPIHEQLRSRDGPIAFEALSFSIFHSGYTNEVVSEKQKTKRNLDILEKLKTPQRLKQPYYCYVLGNEYANGQNDAEALRYYRMSYARSKPGDAWYVHLLDRFLTVLIKLNMHGEAYRLATEARSRRPDVVDYHCLSGIILEHYGLFREAAACFEECLNIADRCETANKPYWLVQTNYGRIIPHQMLAEIARKRGDLHQMVHHLTKTIQVQRNHYGVLRQLMLYLTLFDSPQSVSAFVEKLFPLNEPIHALLLLKVSMSVGNRELAIRYRAKCEEAAVPLSNTDRLIYDLLLHQPSQVMPSEEDGFPADLALMATVVYQDDRYLQSLSAEAELLALGRELMRIVRDNDDSEVAQAPPPALQDLLLRLLMNGYDELYDRILQRWLQPDFLNSFAVKLADSGRGDLAMNYFSLALDNQVLSGEGYKFVGHYLLLQNELEQGMQFLRTALELAPTEDLIGIAKTSTGVLLPSYREFLAEYLKRFPEAKSLPLS

SEQ ID NO: 1708 - protein, 507 aa, Dethiosulfatarculus sandiegensis
MPKSKRRKKGNKKRRQTGRAKPGLSLVVIAKNEEKDLPRALDSARAYVDEIILVDTGSTDRTVEIAEAYGSRVYHHPWQNDFSLHRNQALAYATCDWVLQLDADEALDQATAIELPALMADKRYNGYMVEIQNLFTNGEKTIFQWPRLFRNRINARYYRKVHNQVEIPGRIGQSRLVLFHYGYSGDNSTLKAKQARRVPMMQAWVQESPEDYEARYYLAQTLVAQPDTLEEAIEQAAKGLELAYSQKIDQHSLSRLYLPLLQGLSQLERHEKVVQKGIEWSQLVPNHPDPHMFLARAFLGLSQWQKVDVAARNFFVLHKKLEQAPQSLGPLEVNSLGLKYVVSACWCAALANLNQKDQALTLYSHLISPKEAQATAQMTAELTLEKGSPKTAFEMAQMAAKEHPDWDWPREFISSRNLSSGCPDPKQICDQAFELATAGDTCRAVNLYEKALSLDPNLTGAGFNLAVIHLRNGEVYRASQLLKDCLTREPSMTPARDLLNRIQETQT

SEQ ID NO: 1709 - protein, 339 aa, Unknown
  Description of Unknown: Eubacterium oxidoreducens sequence
MATISLCMIVKNEEKVLARCLDSIADLMDEIIIVDTGSTDRTKEIAARYTDHIYDFKWTCDFAAARNFSFSKATMEYIYCADADEIIDEENHTRFAHLKQALLPEIEIVQMYYKGQLHHGTVYNYDRELRPKLYRRLRSFRWIEPIHECVSLDPLVFDSDIEILHIPQSVHANRDLAIFESMLSNGQPLSKRLRTFYAKELLLHGTQEHFMFAKDYFADLLNNSEMDNEDSKEAFIILARAYRLLGDAPSFFKYILKNIGLELDCSEIFFELGMFYENLSQYEEAQIWYYNAAFESSAYLNIHFSGDYSLQGLARCYDAVGLTDQAEHYRTLAKQWTPD

SEQ ID NO: 1710 - protein, 611 aa, Paenibacillus sp.
MKKTPRKPLISLCMIVKNEADTLARCLQSVRGVADEIIIVDTGSTDSTVSIARSFGARIIPFPWNGDFASARNAGLAGARGTWILVLDADEELEPGSKKELLVCAEHTEYEAFFVRIHNHKGTDRASQTITVNPILRMFKSRASYRFSGIIHEQIAAVIVQETPAAAMHMSTVVVHHYGYADGVVEKKDKISRNIGLLKEQLKLNPGDAFHHFNMAVEYMRLGDYGHALEHIQTSLDHVEPDTSYIHLLYKYEIRCLAVTGDLPGALEACERGLALFPDYPDLHHIKGALLLQVSAFAEAKVALIRALDIGVSPPAYHTESGLGTYLTRTLLGQACQQIGEDNEAIACFTSAAQLHPEPLPLVTRLVRLFKCAGRELEIKGWLAEHLPVILAEQRPELVRLLVRDGCYAAAADVLGGGVNKGAAGKRAAGEQVVWEFGERELTAGEQVVREFGEGELAAAGEQVVREFGAGEWAAGEQVVREFGAGELAAGGTVAQERFANEHSSGAHAEERQDYAGEPEPSSADSLLRLLQRAEAIPAAELTYGDIAALHQYPAFARTTGGTTPASESAAAVQPWISLADKVLATLEASSVFSPAAARARLALPLPRPAD

SEQ ID NO: 1711 - protein, 374 aa, Bacillus thuringiensis
MSQSFSIVIICKNEERVIERCIEAIHEDLREDDEIIVVDTGSTDNTLSILATMENIKIFHFDWNDDFAEARNFGISKSSKDWIFFIDSDEILVKGSIDHLDDAIKNTLKHANNRERIVFAPKIINTDDSVFYNAGRILPNDNTVKFEGVIHEYPIVIEESLNLVSIKISKVVVKHDGYEDVVIKNKNKALRNTTLIEKILKQNPNNSRYYYFYYRDAKPMLTDQEYEQGMLNFFKKFPDDSYSNQVAKDLGFYYLSKNKNDEAEKYITMLFESAERGTVEDRSVAIYLTGIKEIQKLKSQQKELLRLLIYTRDNVLNQEESLFENGYAFDDLIGLLFFELEDYKTAYEIAHKLNLNNFSSNLSKMLKKLDQIYK

SEQ ID NO: 1712 - protein, 371 aa, Roseburia inulinivorans
MIKHWIILILKGKTLMIKISLCMIVKNEAAILSRCLDSVCDLMDEIIIVDTGSTDDTKAVAAKYTDRIYDFAWNNDFSAARNFSFSLANMDYIYAPDADEILDEENRKRFLLLKEALLPEIEIVQMKYRTVSEFNTVLNARTEYRPKLFKRVREFEWIDPIHETIRLTPVVFDSDIEILHMPQSMHHKRDFSIFVDAFNREGTFSAKLRSMYAKELLKTGDEKDFAEALPIFRLIYDSGTDTDTQKEAACVLAHAYRIAGDTNRFFQMTLRDMLSTPCAEICLELGAYFEEAEDYEEASLWYYNAAHETSSILDVHTGGDLPLQGLIRCYEIMLAALPEDDPFAALTANQYEEALADAREALANWDVPEEL

SEQ ID NO: 1713 - protein, 362 aa, Alicyclobacillus contaminans
MITISLCMIVKNEEDTLGRCLDTVQDLVDEINIVDTGSTDNTIEVARKYTDRVYQFDWTGNFADARNESFRHATKEYILFLDADDVLLERDRQLFKQLKETLDPAVDSVSMYYNAGMDEFGNVTLRYRRNRLVKRERNYRWYGDCHNYLSVSGHIINSDIAVTHQSPPNKTSRIGRNLSIYAAKIERGERFSPRDYFYYGNELRESGKYQDAIESYKKNLAMAEGWVDDKIYACINMADCYRYLGEFANELSSLLKSFEYGTPRPEALSRIGYNFQRAKQFQTATFWYEAAIRTQPDFNQWSFSYPAYSTWYPHLQLCVCYYYLGDLQKAWEHNEAARRYRPEDKSVLFNKKLLESKGIPFV

SEQ ID NO: 1714 - protein, 557 aa, Unknown
  Description of Unknown: Candidatus Melainabacteria bacterium HGW-Melainabacteria-1 sequence
MLQVFLLLNGLPQDPPAFAASLAALQQSIRFSLTVINNGQPFGPKRMFHQLGLTCRLLELPLRFHPAQILAARLAERPKADQFLWLEDRLIWHPAHLSAWLQELENWTWISPRLLPGQTLPQTRRSYQAEALLKPLQPARLQSLTPESFPPCFCFARSAIPVLREWLRPEGQLPLLMMAACDMATPAWHPQPALEPGQTEYALSLDEALARWQRIVEQRDTPERIQALLESLQRALPDSPAVYLRLAPMLPADAAVALLETALCRDLIYPELLALMAQALIACHQPELAAIYLRHLQQRFPGFTGQPSPWPQRGGTSVRLHPQALPQTARLSICLIVRDEAEALGRCLDSLRELAAEVILVDTGSVDQTQAVASQRGIQVLPFAWRGDFAAARNFALEQASGDWVLMLNADETLDPKGLPTLRRLLADPPPGLPAFQVPLLSHDASGRVLHLRHPVRLFPRHPLLRFRGRLFETLDCDGPVQIAVSALPGLPLIQHGEQRPQGLQRRLALLQELLALEPEQALWHYGLGECLAELNQPESALEAYQVALNSWLDAAD

SEQ ID NO: 1715 - protein, 349 aa, Unknown
  Description of Unknown: Lachnospiraceae bacterium XPB1003 sequence
MATVSLCMIVKNEEHVLKRCLDSFKAVADEIVIVDTGSTDSTKEIAAAYTDKVYDFKWVDDFSEARNFAFSKTSMEYIYSADADEVLDEENAKKFLALKEALMPEVEIVQMLYVNRHAYRTTENFEKDLRPKLYKRVRSFTWIDPVHETVRLDPVVFDSDIEILHLPEEHHHKRDFGIFRKMIAASEEGKSLSKKMHHMYAQELMLSGDKMDFADAAPYFERAFCESDPDPDQDMRTECCCILARNAANAGRTDEFFKWCLKNVSIEPCSEICMELGHHYFDLGDYEEASVWFLNAAQETKPALKADAGGKDAYDMLAHVYEKIAGEHPDIKEQALQMAIEYKRLTCMS

SEQ ID NO: 1716 - protein, 255 aa, Unknown
  Description of Unknown: Cytophagales bacterium sequence
MPKISAVIICYNEERNIGRCIDSLQTVADEIVVVDSFSTDKTAEICREKGIKFIEHAFDGHIEQKNFAITQASFPHVLSLDADEALDETLQQEIRKIKENWQKDGYSMNRLNRYCGKWIHYGAWYPEKKLRLWDSRKGQWGGTNPHDQFIMEKNATKGHLKGNLLHHRFESIEEHIRKLNYFTDIAAKAYLQKGKKCRWWHLIINPIYAFVSAYFFKRGFLSGFEGLVISSIDAHFTFVKYAKLWQLDKQKNNGK

SEQ ID NO: 1717 - protein, 356 aa, Clostridium sp.
MITISLCMIVKNEESFIGRCLDTVNDIVDEINIIDTGSTDNTKDIALKYTNRVFDFEWVDNFSLARNFSFNKATKDYILWLDADDIFLEIDRTKLKNLKYTLDNSVDSVTFMYNYSSDEEGKPLLIFPRERLVKRERNFKWVGYVHEYINTYGNQVNSDITVTHKRIHNSSYRNLNIYKKNLEYGNKLTNRDMYYYGKELYYHRFWDEAIKILELFLDTDSWFEDKIDASCAIADCYGYKGDTLKERSTLFKALEYTVPRGEIMYRIGYSFQKDGKIDEAIFWYKTILNTEIPKTISGFIYPEYWTWKPNLQLCVCYYELGDVDKSYYYHKKSYEANPIHESIIANQDFFNSIECI

SEQ ID NO: 1718 - protein, 622 aa, Bacillus sp.
MNKKTISLCMIVKDEEVFLGRCLDSVKNQVDEIIIVDTGSTDASVNIAKEYGAKIYTHKWNHDFAEARNFSIEQASSEYILILDADEFLDISFNIQESLNTNKDYYVLTIKNHMSNGYISYHQAIRLFRKTDGLHYYGKIHEHLNIEQFNNLSHEFSDIVIEHDGYKQEIYKEKNKENRNLKILLKEVNESPTGYNLFNLGVQYKVSGNFENAINMFKKSYFLSKDKVYLPYLLYLMGDCLLSTQKYEEGINLMKDAIQLYPTYTGYHFVLGNLYGESGYLLDSEFSYKKALELGEVKGFQTIDGVGSYLSNIKLSEVLQKQGKLVDALNYAFNAIQQKKDFAPAISQYINVLIQSGIEKSHSFNNIKQVYRITSLDEVILLSGVLLAKRSGILLEFINEYNLNVDKGLMMIANLYGNRYNEALDCWQEVLEISEEYLIDVINLAVVRNDENLINEVVSKLSLSDKDKKYLIEFIVNGKVPTQDLSEEFSSVIIKFITNFISMNEKEIFHLLASKLTKLEKIFLSIVRQSDLYGYSNYVLNCSLDFSPKYQEQFLEIISDIYLRNGNYKETIEIINNLYNRKPSYQNLNRFYNFYEKTKDQEGLNLVLNEISKYEISNIRNL

SEQ ID NO: 1719 - protein, 250 aa, Rhodanobacter sp.
MGREALSVVVTTFNSAGTLDACLRGVAWADEIVVLDSGSTDATAAIAAHYGARLHAQPFAGYSAQKQAAIDLASHRWVLLLDSDESLEADATAPLQRALLAPDCAGYQLWRREWQFWRWQSRRGRLNHYVRLFDRQRARMSDHEVHEEVQVDGPVGVLDVVIDHHGEPDVAGRVAKANRYSSLQQADLAKRRVGWLRLRMVAYPTVAFLRYYVLRGHWRSGWAGFIAARIHAFYAFLKYAKLYERRRPRD

SEQ ID NO: 1720 - protein, 367 aa, Ornithinibacillus contaminans
MITISLCMIVKNEEEVLARCLDSVKDYVDEINIVDTGSTDTTVEIAKQYTDRVFFFEWTGNFAQARNESFKYATQDYILYLDADDVILEEDQQKLAQLKETLDPAVDSVSMYYNAGVDAFGNITLRYRRNRLIKRTRNFRWVGDVHNYLQVYGNVINSDVAITHKSTEHAVGRNLAIYQRKKERGDTFSTRDYFYYGNELRENNHLEDAIEAYNQAVAQETGWVEDKFYACIFRADCYRSLDKSDQELASLLESIRFTKSPRPEASSRIGDYFKRKKEFRHAIVWYELAIAAKPDANQWSFSYPAYSTWYPHLQLCVCYDMLGDSQKAYYHNEEARSYRPEDPSVIHNQKYLTKKLGLDSLTTSATD

SEQ ID NO: 1721 - protein, 353 aa, Unknown
  Description of Unknown: unclassified Roseburia sequence
MRKISVCIITKNESEKLKKCLKQLMGYGFEIIVVDTGSTDDTVVMAKKYADKVCYFSWCNDFSAARNYALTQASNDIVMMIDSDEYLQEIDTGELEKLLKQHPSMVGRIKRINRVSVGEQETEYIERINRIFSRQQYEYSGSIHEQVTAKNKEEYETYLAPVVILHDGYEGTEEERRKKAERNLKLLLKELENHPDDTYFMYQIGKSYYMAEDYEEAIRYFEKALGYDLNPKLEYVIDMVESYGYALLNTGRVETALQFQGIYEEFGDCADFKFLMGLIYMNNERYEEAVAEFLKATEYKSARMTGTNSYLAYYNAGVIRECLGDIGQALEYYRKCGDYAKAQERIRACSKGE

SEQ ID NO: 1722 - protein, 360 aa, Unknown
  Description of Unknown: Clostridia bacterium UC5.1-1D1 sequence
MVSISLCMIVKDEETVLARCLDSVQGIADEIIIVDTGSSDQTRAIASQYGRVLDFAWCNDFSAARNYSFAQAGCDYILWLDADDVIPPESRAGFAALKQQLAEAAADVVMLPYHVAFDPQGKPTFVYFRERLLRRAAGFTWQGAVHECITPQGRILYADAAVEHRKERKTDSRRNLDIYEKQRAEKGTLTAREQFYYARELMAHQQWDAAVAAFRDFLSRPDGWPENRIEACRNLSDCLCTLGQRDEAKAALLLSFSMDEPRGETCCALAALELQEEHYALARFWYETALRAPRRTERGGFVQVSCYGYIPCLGLCVCCDHLGQHDEAAAWNEHAAAFWPDSPAVAYNRRYFAQRASGAE

SEQ ID NO: 1723 - protein, 652 aa, Cohnella candidum
MEKLLSLCMIVKNEEKVLARCLDSVQGYVDEIIVVDTGSSDSTKEIASRYTEHVYDFTWINDFAIAKNEAVRRATSKWILVLDADEYLDPDKKDELRGMLSELDASQPLGFVLPIFNLVESVNSGKFIESTAVRLFTNLPTVYFDRPIHEQVVYRDGELPLRNYPLSIFHTGYLEQTRKEKEKSSRNLSIFKDLKGMEEYDYFTLGNEYSSLKDYKQALYYYERALTKKTETMTIFPFVRYQIVLVLIELKRYRDAISYIDENLRRWPQYPDYYSIKASVLELLGFEEEAAALYQTALAKAEVPSAKDGRFWLIAPSLGSHIPLSNLASLSQKKHDYQQAVYYLSKLVNVNLHDHLVLFKLLNILIPSEPTESILAYLGKIFDFGRSDHLMKLLHVSLLLGHKELAGYFHDECSKRNVELLPAQQLFYAVLFNEHERFEAHLPAIDRESNPGQVNKLLFLASIIWNKPEYESYLSPSTDESEPPYELLKAMFAGIFDSGDNENEKPCDVNYIATLLIDLFKMGYYEQYDGLIQRFPAYYFILANILGDYFYNHNQLQLAIDYYSLLLDKKQLSGPGHYFLSMLYLAQGETVEGLEFLREAIRINPDQGPWYIRYLKASPKTPERATVAKEYEDRFYQNLNIDVVRQLIKGQA

SEQ ID NO: 1724 - protein, 598 aa, Clostridium tepidum
MPNHDISLCMIVKNEEANLERCLNSVHDLVDEIIVVDTGSTDKTVEIAKKYNAKVHYFPWCNDFSAARNESLKYASKNWILIMDGDDEFCKEDKEKFRNLIEKGLNEDIIYFFQTLNYSGYSVNSNDISINLNPRLFKNNYGFHYEGKIHNQLVNHEKDVQGKAYDIRIYHYGYLNKSIISKDKRNRNITLLKEQIQKGEDIKFAYFNLGNEYFALNDKKSALENYYKSYEDFDPNTGYASRLIERIIISNYMLKNYDKALDFVDIGIKYYPNFTDLYYLKGIILEEKNSPILAIKAFERCLELGEPPLALKSIYGVGGFRPKYELSTIYMDLKDYDTAYKYSVETIKSKPDFLVPLYNICHILKEKKFSVKDMKKILENFFTDFPREYPIIADLFYMEGYYNTALEYINKSEEAGTFSDDLKIFKVKSLLYSCKIDECIEYIDTIEEKNLYYFQIMMYKALCFIMKDKYDLAIVSINQFNKSNLSEHNNTTLKVYKEFLNMFTNKNTNILSEDKTMLDYTPVIFQICEVMLVNKEFAKFEKALNLLNLISDESVLLNLGKLYFKHGYNKMAKKEIIRSIKIFEIIDKEGIDILKALL

SEQ ID NO: 1725 - protein, 335 aa, Unknown
  Description of Unknown: Clostridiales sequence
MPTISLCMIVKNEEKHLARCLDTVRDLMDEIIIVDTGSADRTKEIAARYTDRIYDFAWIDDFSAARNFAFSMAGCDYIYSADADEVLDEENHEKFRLLKENLLPEIEIVQMYYGNQLAFGTVYNFDRELRPKLFKRLRTFQYEDPIHEIVRTMPVIYDSDIEITHKPNESHAERDLAAFRRLTEKGTISDRLLSMYARELYLSGTEEDLLLSEDYFTERADSGELELYHLKEAVCVIVRAARLRGDYLKMYRYAMKDIASEGVSEVCCELGNYYEQAGLLTEAVIWYYNACHETGAILDIRMQKQFPLEKLAECYERLGNQELADQYRKEAQEEE

SEQ ID NO: 1726 - protein, 624 aa, Paenibacillus sp.
MSKTIALCMIVKNEEQFLRRCLDSVKDKVDQIVIVDTGSTDNTLEIAKEYTKDIVQIEWTNDFSAARNESIRHANTDYILVLDADEYLEQATNLAEELQSDADYYFTKIFNFMSGDRGMTHLAIRIFRNRIGLCYQNRLHEHLNTREKEDQLTAGYSNLTIMHTGYTDEIMESRGKALRNLALMVVEVKENPSVYNLFNMGRTYMWLSEHEKAIQYLQKAYPLCKNLTIAPELIASLCRSLGELKRYEEALAVLEQAVDIYPLEVDLSHLQALFYMEIGYYKDAMACMNRCLKIGDQGISFTEGNGTYIAHLRIAEWQTTRNEYNKAYEHITEAIKIKEDFLPVIGKYFEIVEKAGLSLEETFTNANHLFSITNSRMLEKILEALYQLRNPLLQKYLDLYEITVQEHVMAVAKQYAKDYSQAREKWLSLPDYEEQNGVDILLLAILLKDEMLYKKAVPLLNLSEKEKKILAIVVRNESLDKLSLTTHLESILETMLVQLIRLQEFEVMETILDYIWHGRVEIKIKVCEHLADYGFGEISIDLLLKLFQRYPINVNIIKLLGDICLKTNYIQDAQLFYNKLLTISGEYSSYERIYDLYDKSNNQFEKISISKVIREKFDLCHWLK

SEQ ID NO: 1727 - protein, 366 aa, Unknown
  Description of Unknown: Clostridiales bacterium sequence
MATISLCMIVKNEEKVLARCLDSVKPAVDEIVILDTGSTDATKDVAARYTDRIYDFPWVDDFSAARNASFAKASMTFTMWLDADDVLLPEDLEALIQLKSQLDTLDADVIMLPYHTGVDETGAPSCRFFRERLLRTGIPLTWKGRVHEAIQHQGRFLRLEKPAITHRSIKTVYTDRNLRIYQAQAAAGEPFSPRDSFYYGRELYYHKRYQEAIKVLEDFLRSGRGWVENNVEACKILSYCYEGLEDDMGAFGALTSSFFFTPPRAELCCELGRLFMKLRLYPNAIFWYELALTCSPADREGAFMNRDCYGYLPCIQLCVCYDALGDHKTAEAYNRRAGGYKSTAAYQHNLAYFAELARHQAKSPCI

SEQ ID NO: 1728 - protein, 353 aa, Fictibacillus sp.
MIVKDEEQCIARCLDSIHDLVDEIIIVDTGSVDQTKNIARHYTNKIYDFKWVDDFSYARNYSFSLATKQYIMWLDADDVINDFNRKLLKQLKDHLDPAVNSVTMKYHVNRDQFGNSSFIIKRHRLVRSRCQFKWNGAVHEYLEVNGPIYHSDISIQHIKNKTDNSKRNLMIYEKQLNKGAAFSPRDLFYYANELRCHNELHKAIKFYTLFLNHKEAWKEDKIASCGRLADCYHLLENLEKERESLYKSFEFDSPRADFCCRLGNLLLGRDQVDEAIYWYEYASRLTWDECCMGFYHVPSWTWLPHIKLSFCYYKKGDYKKAFKHNKLALDYLPYDSGLINNQKLIKNKLKNLT

SEQ ID NO: 1729 - protein, 358 aa, Staphylococcus sp.
MVTISLCMIVKNEEDTLARCLDCIKDIVDEIIIVDTGSTDHTKEIAKNYTNLVYDFKWIDDFSAARNFSFSKATKDYCLWLDADDVISKKNQEKLKKLKETLTIDVDFVMMQYQIAWDEFNNPTFLYYRERLIRNNKLYLWEGEIHEVITTMGKIIYSDVIITHKKIHETDPNRNINIFEKIINSGKELSLRHQFYYARELFYHERYEEAIKYLENFIKNPNAWLENRLDAIKLLSHCYNKLNLKDKILPTLLYSLELDTPRAEICCEIGQYFINKKQYKLAIFWYELALTRPQQTESGGFILSDCYGYIPNMQLCICHYHLGEYHIANECNEKAGKLKPNDKNYKINKKFFQNLLNI

SEQ ID NO: 1730 - protein, 659 aa, Paenibacillus macquariensis
MKRLSVCMIVKNEEELLSRCLDSVMRLADEIIIVDTGSTDRTKEIAGEYAAKLFDYTWCNDFAAARNESIRHASGKWILVLDADEYLAENEYDKWNEFLNNAQSMDYLAYTMSVINFTGDKKTQEEISTMPVTRLFPNFKGIYFERPIHEQLTRGQHGELYHKQIALNIYHTGYQTQRVTEKNKHERNMSIFNEMKKHDSMSDYDWYTIGNEYRNAGEVEEAIRCYEQAFKEKYSKLAWYPFCLVGLISLYSQESRWQRVEELTNNQLSEFSDYADYHTIKGIQYETMGWVDQAIACFIDAINVAEQRASNDQEIWLVEPAYSFEKPVLQLVELYFQLNDNQQAIYWLSKLLHKNNKNPQVLLKLVEWLCQNESPDSVIILLNKIYDVTDKSNCNLLFIVSLVLGQAELVKYYVKYIDSLDHLSLLDQIRFAVILDYKEEGLALSSSDQQLDVDDQLQLWVQTAVGAIRWNDYSGIIQIKDEFKTDEISKLTELIVSMITKEHLPDEQDLKSHSSSLFLVAKQLFLIKDFEKFDEFINFMRSSELVNQLANYFYKLNLTEMAMNYYSILLSEQQLDFTSLINLGRYHVNHHYYDEAVEFFSEAVKLEPTTKSLYYSLIRHAKNEQKAEYINKFIADFPDFVGITFVDDFLHQEKELILY

SEQ ID NO: 1731 - protein, 359 aa, Paenibacillus bouchesdurhonensis
MIVKNEEKQLQKCLDSVCDIVDEIIIVDTGSTDRTKEIARSYTTKIYDFQWNDDFAAARNDSFGHATKEFIMWLDADDLLLPTDRDKLKRLKRTLSKQQEVIMMDYHLAFCAAGEPLILSRRHRLVRRDKGFKWKGIVHEDIEVSGARIAYSDIAVTHSRQGVHTERNLRILEKWIASGGSLEGRLLLHYGSELADLKRYEEAVVQLNHFLKQPNKYKDDCILACIKLADCCGELGLREKKLEALLQSFQYDLPQSEICCAIGSCFEERGQWAAATYWYLQALHIGAASSLAIMENRSLRTWVPHSRLCICYAQQGDLNSAYNHNEKALEYLPQDRGLLENRSKLQHALGMLLSDDDSP

SEQ ID NO: 1732 - protein, 626 aa, Paenibacillus dauci
MNLTISLCMIVKNEDKVLNRCLNSVKDQVDEIILVDTGSTDNTLEIAKHYTDKIYHFDWVDDFAAARNYSISKATGDYILILDADEYFESNANLKKDITEQKDYYIVTIKNLLSNNHAYSHMTVRLFARDAGLLYKNRLHEHLNIEEKEAELVRGELASVLLHTGYNNETMEEKDKKERNFPLMLREVKDNPTGYNLFNMGKIYIGRAEYEEALKYFQRAYPKSSNRMYQPELLNRLAETLEYMNRPKEALKILTDAVELYEEDTDLLNSLAKSYMQQGYYIDAEAILHKCFEIGDKGVAVTEGSGSYLAHFLLSELYEKQGRIMDSYEAILKSIQINNKISATLTKYLNTVSRTGIPENEIQQNIDVIYNINNVEDLKLLIEVLYTIRHPLLQSNIKQYDLNLEENVKSIALQYIGHYEEAKHSWMNIESIKKENAMDVLVLSIILQDMELYKKVKDFMNLSTKEQKIIQSLIDDSIIIKKVGYSTDLEKILLTSAQLLIKVQEYVSFQKVTAHLMQGSVKAKLKLGQLLIDYNFFDAATDVLLNVHNVEPTNAIATGLLGDISYRNNQLDDALFLYQKSIDLSNEYIYFEKLYRVLSKLDEIDQKKQLKNIIENQFPLAKWVRK

SEQ ID NO: 1733 - protein, 648 aa, Paenibacillus pasadenensis
MLISLCMIVKNEELVIERCLDSLKEVVDEIIVIDTGSIDRTKQLALSYTDHVHDFVWVNDFSRARNEAIRRANGRWILFLDADEYFAPGDAAKLRSFLEQAEPSPTVVYAINVINFVGKSKEKSVLTSGEIPRLFPNGFGIQYERPIHEQLYSPHGELLSALAPVSIFHTGYLQEVVKEKDKLQRNAGLFKELKQQSGFSAYDYYTLGNEAAVAKNFVKAIYYYERSLKKQKNALNSSWYPHCVISLVHAYLQMERLTDAWALLEERLSLWKEYPEYMFFKAAIFHHLGFIEDAADSYKEAISTASAKSEQSHRFYLESAEYASTIPMRKLYSIYEWKKSWPDAIYYLTQLLVQDIHDYNALRSLLIILAREEKPVQIAAFLAKLYDPNHAKHQYILFRASLSNKQTELCRYFFEHLSDPLMLSSEDQLDYCFLIEDEEGYRNVIDRLNGVLPNERTAMLHLLASISWEFEIPWKLNQATDEDSLDKLSFLESMLNGRLAPEELAPEHGHLALAVLSLCYEYHRYECFDALIQRYAHDFVLSEIADFMFAQHQTGIALDYYSLMLDQGAALSAKNLEHLALYHLQKGFLAEGLAFLEAAIEKSPDSIYLYVQYLQASAKDEKYREIQQKLLRQMPAARKMPPFQKILA

SEQ ID NO: 1734 - protein, 363 aa, Bacillus sp.
MKALVTISLCMIVKNEEEVLARCLDTVKDIVDEINIVDTGSTDKTVEIAKRYTDRVFFFEWIGDFAAARNESFKHATKDYILYLDADDVLLEEDQKKLKELKETLDPSVDSVSMYYDAGTDEFGNVTLRYRRNRLVKREKNFKWKGDCHQYLEVFGNIINADISVTHKKIRHSVGRNLNIYQKKIDRGDTFTPRDYFYYGNELRENRHYEKAIESYNKNIEMNEGWIEDKVYACINKADCHRFLGDMDNELRSLFQSFEFSKTPRAETCSRIGYNFQRRREYKAAIYWYELATTLVPDSNKWSFTYPAYYTWYPHLQMCVCYYNLGDFEKSYHHNEEARKYRPEDKSVLHNKQLLEGKLGINN

SEQ ID NO: 1735 - protein, 362 aa, Cohnella abietis
MITISLCMIVKNEEEGLAKCLSSVKGIADEIVIVDTGSTDRTKEIAAQFTDRIFDFEWINDFSAARNYSFSKATKKYILWLDADDQIQEKDRLLFIKLKKKLTLDVDSVTMSYNLAFDESGNVTSSLRRNRLVRRDRSFQWIGPVHEYLAVWGNIQNSDVSITHGKNKAYTDRNLQIYLKREQAGEQFTPRDLYYFANELRDHAQYRKAILYYEMFLKGKQGWIEDNIQACTKMADCFGKLGDKEKYFESMCMTLSYDKPRAEVCYAIGIHFLEDNKYDIAIFWFTAAVDCGIDKNNMAMVNPAHSTWLPHLQLCLCYDRLGQLEKANEHNEKALAYHPTHPSMLYNQKYFQNMFKDRIKEG

SEQ ID NO: 1736 - protein, 431 aa, Unknown
  Description of Unknown: Chloroflexi bacterium HGW-Chloroflexi-5 sequence
MSLKNHLSTDLDLSDKDTQKKARDAYDKGDYVGAYNLYLSIYQNENNPRGLQLSIALCLLRMNKRRQARLFAFKELLDYPDNETATRLITEQSSIVVGKTIFRRFDNPVRPEKYPDISLVLIVKNEEKDLPRCLESFKDIVKEIVVVDTGSTDRTVEIAKSYGARVEFFEWTNDFAEARNVSLSYASCEWILRTDADEYIEEPEKAKLLHCVNSGVADIYLCPTVSKLKAGEQTVENVRLIRNHLGVVYHYPIHETVALSAAKLGLLQCLTNIEFLHSGYEFLEEGSSERKTERNISVCSQYLEKYPEDFYVRLVRGLLLLNTQRKADAISDLERGVKDIPDDASPVKYMGLAYIALCQQYVFEKRDIDLINILLDAQVDFNVYSCMMQFIGQVYCFNRGDWKRANKIFDWTLKRYTTKLTFSDVLFADKF

SEQ ID NO: 1737 - protein, 339 aa, Butyrivibrio sp.
MITVSLCMIVKNEEKNLKKCLESLKGIVDEMIVVDTGSTDKTVEIAKEFGAKVEYFKWVDDFSKARNYAFSLASCDYIYSADADEELDEENRLRFIQLKKDIEELDIDIVQMYYTNQLSFRTVYNFDRELRPKLFKRVRNFVWEDPIHEQVILDPVVVNSDIEIIHRPSENHGKRDLEAFRKTVKEGRRLSKRLHGMYARELFMAGDDEDFIKAKDFFAGAVLDTERSLDEIKEASCVLAHIAILEKDVAALLKYTLKDAITEMSAEMCYELGDYYFAVDDLDEAIVWYYNAAYECGSILDARRSGVMPRLALAKCYRKLGNEEQAADYEREAGEIEDA

SEQ ID NO: 1738 - protein, 466 aa, Unknown
  Description of Unknown: Candidatus Brocadia sp. sequence
MQNIRIPKISACMIVKNEEELLPNCLQSIKNAVDEIIVVDTGSTDNTITIAKNFGAKVYNHLWNDSFSEARNHCLHYASGDWILQIDADEELEQADIPKLQHAIKNPEYNAIIIAIHSIIKDNVHKFYNTRVFRRGKGFYKDIIHEQIITEGVRLPTEIRLYHHGYNLDEKKMQIKWQRTTRLLKKQIEQNKFDSFSWFNLVRNYRTQDLFYDGINAGEKALAIITPDPCLKPTGTSVNLHHYAMIMYETANCYLHNEDFAKAKELCHTALSRLEELGITPENIDIIFTLACIYLKEGCYRKAINYFNRFLSLREWYLENMHTNPLMIDTLGYDYAAYHGMGYCYGNLGQWETAISHLQKAISYNPKYLTAYKNLVSCYSNVNNRVEATETLLRTVSEGIADDDVILKLGELYIQQEAYEKATPYLEEYLKKHPEDRSALLKLAQSYEQLGHLGAALVGYRSALGK

SEQ ID NO: 1739 - protein, 490 aa, Unknown
  Description of Unknown: Paenibacillaceae bacterium JTherm sequence
MSERISLCMIVRNEADTIERCLRSAAPAVDELIVVDTGSTDDTVRIARRYGAVVFSAEWEDDFAAARNVGLERATGDWILVLDADEELAEDAPERLRACVRDRSCSGYYVTIYNYFHSFSEDAAVHSSIRLFRNDPRHRFEGAIHEQIAPSILRRDPRAVFGGSDIVVRHYGYVGDVVADRRKVERNMRILRRQLRKTPGDPFHLYNMGVEWARAGRPERAVRYFRAARSRATCDAPFVALAYKYEAFCWRKMGDVEKAVFSCLEGIKRFPSYTDLFHYAGLWEMEAGRWENAESFLTSAYRLGPPPAPFQTETGIGAHKTCFSLGILAECRRDDIGVLRWHLEAVRLDTSAEPPLCRLFRYMHCADREKQLAAALLKHFRPDQAGKQRVLNLLEACGCFRTARLLSRIWGIGRSKSVPRLRRDNPAGEEASRVLNDWHVSANRDTSSRRRWVRAASRMVDARLLDVRSPELRAIVRTVRLLLPWVDGFV

SEQ ID NO: 1740 - protein, 344 aa, Bacillus sp.
MTSQTISLCMIVKNEEDFIEQCLQSVQKLVNEIIIVDTGSSDQTINICKNYNASIFSYEWNDHFAEARNYGLSKASGNWILWLDADEKLEVQKSKLIQDAIQQTNALMIYMPIVNYYGQSLPIQEEDAFIYYQPRLFRNHVGIRFTNRIHETLQLPQSLESSHDIVSIDTEIYHYGYFKKITDQRNKSRRNLQVLFKEFQDSSHSPWIEYHLASEFYRLKEYQTAFNYINKSILGFLQQGYTPPALLYRLKYDILFETKSYEVASFSIDKALLLYPDYVDLHFLKGLFLFQIKNYPAAIASFDKCLELGEHHTDYLITRGAGSFKAEHYKQLCLKAMIVPESDL

SEQ ID NO: 1741 - protein, 257 aa, Campylobacter coli
MNLEKISVIIIVKNAQNTLFECLNSLKEFGEIILLNNESTDDTLKIAKEFQKDFTHLYIYESKFIGFGALKNLALSYAKNEWILNIDADEILENEAKEELKKLEFKEQNILALTRKNLYKGEWIKACGWWPDHVLRVFNKKHTKFNENLVHESLILHPNTQKVYLKNGLKHFACNGIESMIHKMNLYTSFSAKEKFKKDKKASIFGAIMRFCLTFTKDYFFRGGIKYGYKGFIIAFLNANGAFFRYMKLYELQNEKN

SEQ ID NO: 1742 - protein, 355 aa, Paenibacillus herberti
MIVKNEEKLLEQCLLSVRGVADEIIIADTGSTDRTKEIARKYTDHVLDFAWVDDFSAARNYAFSQASQDYIFWLDADDVLLEEDRNKLLALKAELAPTTDACSMFYHYSFDDYGKVNLKFRRNRLVKRSLQFKWYGAVHEYLDVSGNVIDTDIAVTHKRVHDAKGRNLAIYENKLRSGAELSPRDHYYFANELRDNGDLARAAQQYERFLEMEQGWVADKVTACDKLSDCYYRLGEHDKECKAALKALEYATPTAEICCRLGYHFLQKEQFSIAVFWYKLATDLEEPKEDWGFRNEQCWTWLPHVQLSVCYYRLGQERLAWEHNEQALRFRPQDQRMLGNKLFFEARFKKRGESV

SEQ ID NO: 1743 - protein, 364 aa, Brevibacillus laterosporus
MITISLCMIVKNEEDSLSRCLDSVKDLVDEINIIDTGSTDGTVELAKKYTDRIFHFEWIDDFSAARNFAFTKATQEYILHLDADDFLLEIDRERLRTLKETLDPAVDSVTMKYHTAFDEYDNPIVSFRRNRMVKRSNNFQWYGAVHEYLSVWGKIIDSDVAVTHKKIHQNEGYSTRNLRIYEKKLERGEEFTIRDLYYYANELRDHSFHEKAIEYYIKMLDSKQGWIEDEINACYKIADCYLALGNKEKELEYAIKAFTYDTPRAEACCRIGHIFFTRKEYLKAIFWYDLATKVKKPDTWGFFTEACWTWLPHIQLCVCYNRIGQNEKAYEHNEEVGKYRPKDPKYLFNKELLEGLMNKEDLGN

SEQ ID NO: 1744 - protein, 378 aa, Paenibacillus thiaminolyticus
MPKVSLCMIVKNEEENIERCLASVQPFVDEMIVVDTGSTDQTISICKAAGAKVYPFQWNNHFAEARNYSLDQASGEWILWMDGDEVLEVSAESCWKEKLAEETEHILNVHLVNYMGESPDPNETYHIAHPRLFRNGIGLRFLYHIHEALNVEEIFAGERALKKIKQHDGLTIHHYGYLQSHTIAKQKSERNLHMLLHELTLDNNNPWTEYHLASEYYRLEKYKQAYEFVNLSIARFLRKDKLPPSLLYKLKYSCLISLGSIDGIPAAIDKAIIMYPDYVDLYFYKGVALYLSNLHSLALDVFEQCLLLGEDNIQHLTLKGAGSFHAWYYKGLCLEKLGKFEAAVEAYKEALRLYPNYFHAAEALTRLEKSGQHSGTKE

SEQ ID NO: 1745 - protein, 355 aa, Unknown
  Description of Unknown: Chryseobacterium sp. 52 sequence
MKISLCLIVKNEEKVLRRCLESVTKFADEIIIVDTGSTDRTKEIAKQFTDKVFDFEWINDFSAARNFAFSKAVMDYQMWLDADDVVPEKSVTEIIELKKTLKDHVEMVTMKYALSFDQNNNPTFHSTRERLFKRSKNYQWIDPVHECIPLIGNLHYTDIEIWHKKTKPEELSTRNIDIYRALEKKGEAFSARQWYYYARELKDHNETAKAIACYEKFLNLGSGWVEDIITSCHQLAIEYKKMGTKEKILPILFKSFEYDVPRPDICCELGYYYKDEQNYNQAFKWFDLATRLPKSNPVGFVFSDYSGYVPNIEACVCLSLLGEYKKANEYNEKASLSRPDCPSVKQNREYLRDLM

SEQ ID NO: 1746 - protein, 751 aa, Acidibacillus ferrooxidans
MLLTACLIIKNEELLLDRCLRSLKGIADEIIIADTGSTDRSLEIAKNHEAHIIHYTWDGNFSNARNKAIEAAQGTYILTIDADEYFKEEDQIEIRTFLEANSADGYLVQIVNYLGSVNKLTKTSPIQSVRIFKQKHRYTGSIHEQIDLGTNHEFHNIMFSPITIHHVGYISEFVAHKRKPERNMAMLKEQLDQTRSDPFHLVNMIVEYARIGDFKNVLPLYEETYDLVKDLSADALPLYLPRLFNISSLAASELKDWDRAIMIAEQGVTRFPYIAELYRKMAIAYMGKGNYQKAIQVLKECKRVGEPKLSFVDTLEGMSTFYSSFDMGLCYMHLGDPVTAQKWYLQSFLENPSFDTVIPYLLSLMPANEDFLKTNIESRIQDALCLSIYAESYALFRLPGAENVIERIAARVGKTEWIQRGMWFTDCEDKYTLLRSAYANSDDEMTRVINGIIHVMEGREEVGYSLLDHTNRGRNLAAWIRTPSQGGLLSGVIKDLIAARAYPLIALLFPYAEDADHFYGWFRHTSRKDIFKGCRPLQEHSLWLEWDALSSFQKGHFPLVEALIEKSLETPVTISKIALECDLLLQKNQTKKALKHVEDGLTLFPDSQLLQNISKQLGQMIQTKKGELFMNRIASYQTQSVMTTPLHVQLSQLHEKAAILVRGIHTDALNHQVMEARAKIEQLQEIISFLRSSLDLTLEAAQKTDQTYAYFYRLSINWYMQPNIIDEQSEERASAIEFWESWAKTWAQVKE

SEQ ID NO: 1747 - protein, 656 aa, Unknown
  Description of Unknown: Firmicutes bacterium HGW- Firmicutes-15 sequence
MLLQVTLSICLIIKNEGKYLSRCLYSIKDIASEIIVVDTGSTDNSMLIACEYTDQIYSYKWKDDFSSARNFCLDKAEGDWILVLDGDEEVDRKCLDLLKEIIQVQDIDVYFVTINNNPDNTQEIMAISDLKPRLFRNNKQYRYKGIIYEQIMDSILGSNARIEIARDIRIMHYGYVKEDSGNRHRLMRNTDLISKAWCREEAVKHFYLGREYYLHHKFADALVHFLVVYDQADLQADYFPELLRSISVSLYMLDRNADALTFIDNAITFFADMGDLYYIKAVIYKNSYEYAKAYEAYKICLTLPDQSLNYYSVYCLHQDKIYFYLGGLAEYFMDKDQALHFFLESLKQNPYMLDSLRRIIAILNPRVNPEYTTLSLNRVFDLSDQALQIDMALMFYEEGAYQLALNNINKLENSAPISEYIRAIKGACLLRNKQYTEAEEELQNISSNKNLYISARKYLLVYYWLVQDCRKAAGCLKRIKNAGAEPAINYVLNLLISGYSGKTNTGQDQAYNLAKQIMEMVVEFDDIDRVDEAFQNLAPILGERPSRLLAEIFYKYEKYELAEKEFNYLLEKDNTDAQAFYYLGKTFWVRGDLHGAENYLCQAINKGLETPKIRWEVARLYQELAIESLREGLKDCPDSEEMQKLLQELKDKMLEV

SEQ ID NO: 1748 - protein, 638 aa, Brevibacillus panacihumi
MDKKIKLSICMIVKDEEKNLERCLSSLQLLNQRHDVELIIVDTGSTDKTIEIAQAYTENVFYHEWNGNFSDMRNISISYAKGEWLFIIDADEELQDPEKLSLLMDKKSLSDFNTVVIRVKNFVSSDQNIFIINKSERLFRNDGFCYQGSVHNQPRFKMPILFVTDIFLKHYGYNSEDKELMEKKFQRTSKLLLEELKKNPENIYYHFQLSRTYSMHGDYKEAYKEAKQAYELLSGNEINKKIQYLYVYHEYVRMSILLGRYEEAKKACTEGLEINPNYIDLQYYMGVIYEECGDKQSAFEARLIYLKLHKKFTEDRFDDKGLIELYKLDDNSKYEILFKVAHFYYDNKNFTKAEEFLKPVIDNEPKILLYTKILLDGKQFTGLREYYDSLTEGDKDKLVNLLEVHRKELDEQEKYELARAFIEGEGCYHQLNKIRTTPDEKVLFEAKSFLAEHDINNLPLFYAEVFSRIMEYPIFWQELKKLKSAIVRKVIKELVLLNHNHKVSLETLVSKMKIRHDDYQGNRIFICIIYVLLVMDLEKHGKENIEMEPELLRLFDKYLEYGIQYIKCFYQMDKFRLIYTTVENSEEQFFMLMYLYNQAMTSRNFKVALNYMREIVSVYPVMSPFLKNTANNLNGDII

SEQ ID NO: 1749 - protein, 335 aa, Lysinibacillus endophyticus
MIVKNEEDLIEQCLQSVQKLVNEIIIVDTGSTDQTINICKKYNASVFSYEWNDHFADARNYGLSKANGDWILWLDADEKLEDKKTKLIQEAIQQTNELMIFMPIVNYYGDSLPIQEEDAFIYYQPRLFRNHAGIQFTNRIHETPQLPQPLEPSNDIVSIDTEIYHYGYIKKITDQRNKSQRNLQALFKEYQDSSHSPWIEYHLASEFYRLKEYQTAFNYLNKSILGFLRQGYTPPALLYRLKYDILFETGSFEVASSSIEKALLLYPDYVDLHFLKGLFLFQIKNYPAAIASFDKCLELGEHHKDYLITKGAGSFKAKHYKQLCYIAMKVPESDL

SEQ ID NO: 1750 - protein, 282 aa, Ruminiclostridium cellobioparum
MVYLSLCMIVKNEEKVLRRCLDSVKDIVDEIVIADTGSIDNTIKIASEYTDRIYNFEWTDSFSDARNFVQSKAKGKWILVLDADEYVDKTNLEAVKREIKQYDNDMDALGVTIYNFTGTGDQMVQNKNLRIYKNSREIRYERAIHEALVRVNGHLKTVMCALNIYHTGYLAEVAKSKDKRSRNTRLLEKQTQKSGNSSYDQFNLGNEFFSAKDMKKALESYQKSYASDKNSSWASFAVVQIIICLIELARYKEAISVIEDADKIWQDVPEFKYLRGQVYYLQ

SEQ ID NO: 1751 - protein, 305 aa, Paeniclostridium sordellii
MLLSIVMMVKNEERYLDKTLESLKPLMKEIDSELIILDTGSDDSTVEIAKKHTDKVFFANWSNDFGQMRNISISHASGEWILILDADEQLTNYDKLKEFFNSNLCKKYNSATITLKNIFSEDEDRYSIDPLLRLFKNYDGFRYEGAIHEQPIFKSPTYNDIARFNHYGYLFEDEEVRQLKESRNKAILLKEIEKNPNNPYINYQLGKQYIISKNYEDALFYIEKGYEIYEKNKYIPLFVTLDLANLYVDLSEFDKCENLCIKYIKKDDRNIDIYYYLATSQKQLNKNKKSIESYKRYLYLTENFI

SEQ ID NO: 1752 - protein, 364 aa, Christensenella sp.
MITISLCMIVRDEQAVIGRCLESVQDIVDEIIILDTGSKDRTKQIVKAYTPHCYDFTWIDDFAAARNASFDKATMTHIMWLDADDVLEQRDREGLRRLKQTLSPDIDVVMAPYNVSFDQNGHPTFTYYRERILKRAQHFQWVGAIHEVIAPQGNIVYSDDFSVNHKKLQQNDPDRNLRIFERMRTNGQPLDARQTFYYARELYYHARYEEAIKQFINFLEDTQGWVENKITACQDLARCYACIQDQEKALDALLRSLVYDVPRAEVCCDIGQYFMHRQAYKQAIFWYTLATSCTKGNVGFIQPDCYDYIPWMQLCVCYDRMGDAARASAYNEKAGTVKPDDTAVAYNRAYFQKKLLTQEEKRVE

SEQ ID NO: 1753 - protein, 454 aa, Unknown
  Description of Unknown: Verrucomicrobia bacterium sequence
MLALSIAMIVKNEEKNLPRCLTSVQGLFEELVVVDTGSTDRTVEIARQFGAKVVPFKWQDNFAAARNAGIAHCTGDWILAIDADEAIDPVDHTAVRSLLTEGGPQAFRIRVRNYLLNASQTILNTVPVRNTSAYALGREFTHYVDYVTNARIFRRFPDVCFSGRIHEVVDPYFEARGLPVGMTTAVLHHFGKVDAPRETYKREFYLRLCEEEARNAPQNYRALFNLMIQSRTAERWEACLAAAENFMRLQKTVPVMVFVTAGICHLQLGNPNTALEWLERALAIEPEDVGALTEKGSALMEMGKFEDACVCLERAAELRPGYTLPYLKLFEIKTSLDLKDAARATLLKAIRANPTEEVLYNKLLQLSPDINHLPTAGADAALALASLPSGGNGLWHRFVAMSQLQAHKHEEARSTVEIGLQAFPDDAGLSRLKRLCDTAVTPPPVISLPGQARF

SEQ ID NO: 1754 - protein, 358 aa, Clostridium amazonitimonense
MITISLCMIVKDEEDVIDRCLDCVKDIVDEIIIVDTGSTDNTKEIIKEYTDKVFDFQWIDDFSAARNYAFSKATKDYILWLDADDVIFEKDRERFKELKQNLDNKIDAVMMKYNVGFDEDGNVTLSYFRERLSKRIKNYQWMEPVHEYLKVDGNIINSDICITHKKERIPIKGRNLSIYQKTISKGEDLSPRGIYYYARELYYNGNYDEAIKYFEEFLNTGKGWIEDNINACYILSTCYNNKNDQKKMLEILLKSFEYDTPRAEICCQLGAYYFNNKDYKRAIFWYKLVLDLEKPIDGWGFISHDYWGYIPCIQLCVCYDKLGNTEEAIKYNNKAEEYKPKDPSVAYNKNYFKSISER

SEQ ID NO: 1755 - protein, 387 aa, Labrys okinawensis
MSHRRLCFIQDVGLVMMHGRVTISAAMIVKNEARFLPGCLDSLAGRVDEIVVVDTGSTDGTIEIAEQAGVHLLHQAWRGDFAGPRNFGLDHVRTGWVLYIDADERLGLPRGGRLADYIDPVAVAGFVRFRPKTNFTRYREWRLFRADRRIRFAGMIHETAVPAIKAVGRLEGWPVVQTDVEIDHLGYDGDISHKHPRNLALLEQALPGDPDRLFYWHHLAETYAGLGRWEEAEKAARQGLERTEGQDDDNRSATASLLHQFLVRSELRQGRDPTGLIASALAREPDDYALHFLKGHALLAIGQAEEALEVAQLLRGIDPDRLPDGWLAFDRALFADKACELAALACLDLGRHTEAGGYFAEASRLAPGVLAYRVKAAAFGGIVPVDQ

SEQ ID NO: 1756 - protein, 550 aa, Paenibacillus sp.
MTTKPQQLLISLCMIVKNEADNLARCLRSVRGTVDEIIIVDTGSTDATRQIARSFGARIINYPWNGDFAAARNAGLALAQGTWILVLDADEELEPGSREELLVCAKHTEYEAFFVRIHNHQGTERASQTLTVNPILRMFKNRPNYRFSGIIHEQIAAVIVQETPDAAMHMGTVIVHHYGYADGVVERKDKISRNLGLLKQQLEESPGDAFQHFNLAVEYMRLGDYGQALEHIGTSLNLAKPGTSYVHLLYKYKVRCLAVTGDYPGALEACGQGSTLFPDYSDLHHLKGALLLQVSALAEAKTALCRALEIGASPPLYHTESGLGTYLTHTLLGQVCQQIGEAHEAAACFTRAAQLQPDPWPLIPRLTRLFKCTGREPELHGWLAGQLPGILTEQRQDLLRLLVTDGCYTAAADMLGGGIAGAGEMDGTAQSAGVMEAAVRDAGEIDGKAQSAGVMEAAVRDAGEIDGKAQSAGVMDAAELSYDDITELLSHPAVVPADRNTSLPIPAIAAAVQPWILLADKVLAALVTSAMYSPAAAAARLTLPLPRSAD

SEQ ID NO: 1757 - protein, 569 aa, Paenibacillus taihuensis
MSSKHKKKASGGLISLCMIVKDEAASLPRCLQSVQGIVDQIVVVDTGSSDNSVAIAKRYGAEVVHARWTNDFAAARNTGLARAAGEWVLFLDADEELDAGTGGQLRMLARERAITGYFLNIWNYMGDSGSDGATINPVLRMFRNDRRYRFEGRIHEQIAGPITRHTPDARFHLSDVIIHHYGYKREVVIAKNKLERNRELLERAVVEEPENRFHWYNLGVEYFRGRALEDALRAFRQARDGIDYASISYAHLLVKHEVQCLQALRRWQDSLALAEEGLAWYADYPDLWHAKGIGLAALGKRRKAAEAFAAAIHIGKAPAIYHTEDGMGSYQSAYWLGSMHEAELDFETAAHWYAEAVRFRSSLLAPLYRLCHMMRIGGDEERLAEFVEQRFTLDSPQASLKLADVMRRSGCYKALRIWLTRRLADAEATERAMLQPWLSVAEDCEALACGSSDDDGGLSTGAAGSLGQALAWLGMAEQSPFPDVALEWLPLLIRSGIAEGPVRDVAGALLDLRPDGEGPSSGAAGVRYAAHALCALADGHLAEVQKTADYTRAAQEMRLLLPAQGEGDR

SEQ ID NO: 1758 - protein, 367 aa, Paenibacillus ginsengarvi
MITISLCMIVKNEAEVLARCLDSVRGIADEIVIVDTGSTDETKNIAAAYTDRIYDFEWIDDFAAARNFAFSKANELFIMWLDADDVLEETDREKLKRLKETLDPDTDSVMMHYHLGFNAKGEVTSSLRRNRLVRRERGFRWVGPVHELLEVSGKTVYSDIAVTHKKERKHTDRNLRIYRKRAERGESFNPRDLYYFANEWKDNGYYAEAVDYYERFLATKLGWSEDNYAACLKLADCYVRLNDRRMQGRSLLRSFGYGRMRAESCCRMGAYFMEKGRLEQAVFWYKAATRLGSPDGITSAVEHEAWTWLPHLQLCVCYDRLGQLSAAQEHNEIASSYVPDHPSVLRNRAYFDGLAKRDIVMGKGEST

SEQ ID NO: 1759 - protein, 376 aa, Clostridium clostridioforme
MRISLVMIVKNEERSLEKCLRSAASLVDEMIIADTGSTDGTKAIAERMGARVWDYKWTNDFSAARNYALSHSSGDWNLILDADEILRPFQRDELEQAMGRYVKHHGASWMGAITRYDVYPDGEGTSVSVSSIPRLLPAGMRYTGIIHEQPDTEYPCYKLPLEADHDGYLRGDKGERNLSYLEEAVKRCPEDLYFKFQLAATLRNMKRLGDSLYWFRDFYAGYIRQRKEGRNNGKEAGMYLTEGVLLYLYTLLDIGNSACLEEAYAVVKNESHILGERADFWFVCGLFYMKLVLSDVAKYVHLLPEIEASYLRCLSIGERRNQDRVIGTGSFKAAYNLGTWYEVSGQKDKAAYYYMEAAKEGYEPAEKRLELMGKCR

SEQ ID NO: 1760 - protein, 355 aa, Unknown
  Description of Unknown: Lachnospiraceae bacterium MD335 sequence
MPTISLCMIVKNEEIHIARCLDSVAELVDEIIIVDTGSTDSTVEIVSDYTSNIYLYTWKDDFSDARNYSFSKASMDYCMWMDADDILEEEEKEKFLLLKQSLSLDTDIVMMKYNTSFDESGRPSFSYFRERWIRNCPQYRWVGAVHEVIVPNGKILYSDIAICHRKMGVGDPDRNLKIYQKMIADGIFLEPRHQYYYGRELYYHKQYEEAVSVLEPFLRSADGWVENKIEACSICANCYLQLGKEQDALITLLRSMSFDLPRAELCCEIGKYFLEHGNFHNAIYWYEIALNTPKSEYSSGFILPDCYDYIPLLQLCVCYDRLGDQQKAKEYNEKAGAYKPYSQAYLYNKQYFDSL

SEQ ID NO: 1761 - protein, 804 aa, Desulfohalotomaculum alkaliphilum
MKKLSISLCMIVKNEEFSIIRCLNSIKNIADEIIIVDTGSVDNTIEIAKDFGAKVIEHPWQNNFSDARNVSLEHAHGDWILFLDADEEVMAEDLHRFEILESTDRDGFFLVILNLDEKGGHTRQQSLRLFKNQCEYRFQGAIHEQIMQSIINHNPSARFGSLNIRIKHYGYLNEQVSRHNKVYRNISMLQHELIKEKNNGFLYFSLGNEYMRMGDYAKALQYYNMAENFTAAEVSYAPLLGKKKSQALINRKLYQEALGVLKNYLKIYPDYTDLLFLKAGVYYKTGQHQQSLSLFKRCLLLGEAPACYVSESGVGTYKAEQAIRKVSASMNKSGISLCMIVFNEENNLPRCLNSAKDVVDEIIIVDTGSTDSTVQIANNFGAKVYHFDWSGDFAEARNYSLKFATCPWVLVLDADEMLRPCEHQRLREAVGVTGTTMGYYLKIINYFGRGDAEQYVVDAVCRLFRNSKEFSFSGRIHEEISQSIISRHGLKSISPLDVHIDHRGYIEQPGLNNKNQRNIGILKKQLKQDPEDAYALYALGTEYFQQGDYNNALVQYYKALRLIDGKDVMSDLFFKIAVCHLELKEYQKGLQIIEQGQQLFAHFTPLWYLQGLIEYKQNQLTQACRTWEKTLSMGDPPWHRYTFPHGIGGFITAAALGGCYEKMGLLDKAESLLEKYLIKGKGVRAVTPIYCRILLKKYQANECLAKLERLNYPRCFKESIILARVFSQLDNVELEHIYFRKSLDLLRNQPNQGDYLQLIALKLKSIDKYCGYGMKLGDQSPLLSRLKSKLISLRKEDNKNICPK

SEQ ID NO: 1762 - protein, 704 aa, Paenibacillus riograndensis
MKKPTLGVHLIIRNEAALLPQCLDSLHGAADEIVIVDTGSTDNSAAIAASYGAKVYHRNWNYDFSAARNTGLSYAETDWILVLDADEILKTPVGAITEMLRNTEAMAFTVNIENWLGSLPEDRLTHNAIRLFRNGAGYSFQGIIHEGLDASIIGKHGASVIRSSGIEIIHLGYLPGIMAQKDKISRNEHLLRRALANDPGNDFYSYNLAVTCCQNGQLEEAAELLTRTISRAPFQASYRPSMIRDLAKIQLSLNHTQAVNALLARELPRYSDYPDLHFIQGQSWESQGLTERAFQSYQRAAAGSEKPAAPVNASSTGAPQEAAAVALSGKYVSEKGMNSFRPLARMGEISLQLGHCEEAARWFHRALQHHVLYAPALQGIAAAFQRLDVPDQDIATLLIQLVGTREAAGRSAVIHALDAVCAYEAIAGLPQADFPLEQETLPARASAWIITGRLAEAGTALREALSQLRDTATMDGDMDTIHRLWRIAAICRWQDNSPQAEPLEFADAPEPLRSALLLVDEQLTQHNTAPALPGEAGNLSQVIAELIRQAVKLRCCGLAAELAGLFPEHRADWAEALYESGQLKEAGELLIALAADQQVRGKVSFYLAELLFDKGHYREAAEWFQLMLDGTPGHEPSRIGLALSYLHLARLELEGAAAGFPDIYANGPLQEDMKAAEQAIAVLNRTAWHTQRNPHRTLQKGATP

SEQ ID NO: 1763 - protein, 655 aa, Bacillus acidiproducens
MRPFISLCMIVKNEEKVLNRCLDSVKDSVDEIVIVDTGSTDRTKEIAAAYTSKVYDFEWTDSFADARNFAQSKALGQWIFVLDADEYVEPENLKQAVRDLKESTSEIDAVEIKLFNFTGIHGESIIQHHSIRLYKNDPFIGYKRTIHEQLVKTKGQLKTKGSSLIIYHSGYIASVVKEKDKNKRNKKLLEKELGISRNKAFDYFNLGNEYLSTKEVEKALKSYIKAYQGKADIRYSWVSFCLVQIINCLIQLNRYQDALNVIQDSMTIYSQSPDLKFFKGYVFAQQKRFDDAIEELEDLLSNKEQYSYFLTSIDYLEYRPHQLLGTLYEKKGNKEKAITHFAQALNINHHCDRSFVGLLEILIQHESDHALSLFLDQHEFMTDSNHLNKLIAVLVANSKFELAEKYINLIENNELLKAGFKMKSEFVQGNDLLINKFIESNTFENLNQLIVYGCFDIYDLILFCIRNNDKKIAQLLYMLIQEPEKKHLMDVFFSNNKPKTINHDEYLTLIKKTLKYKMFDLFAVLAEKADLYPSIYLPTGHLLYQFGFKKEAMNIYENLETVQYENETFVDIISYYKEHGDYLRVAQWIIQALTEDRMDFRIFESALQADYHYEGLIDWDIHQIWEISCQYYPNSSCLTKRNHMVEEKRYIQAHI

SEQ ID NO: 1764 - protein, 345 aa, Bacillus psychrosaccharolyticus
MIVKNEAKMIDRCLNSVNGIVNEIIIVDTGSTDSTKEIGENHGARIYPYQWSNNFSEARNYGLSYATGDWILWLDADEELDETDKNNLPKILGDTKANILALPVLNYHGLTEPVDKNHLFLIYQPRLFRNHLSIKFINRIHENVHLPENIDQFIENISVSIHHYGYLKQITDEKHKGRRNLRLLEIELSEPSHSPWIEYHIASEYYRNNQYEKAFMYVNQAIVAFIQKGLMPPSLLYKLKYAILIETNSLDGAWPSIEKAILLYPDYVDLHFYKGYILYEKKEYVESLESFEKCLELGENNTKYLILKGVGTFKAWHYKGLCLEHLGRTAEAQAAFECEENSLLY

SEQ ID NO: 1765 - protein, 633 aa, Tumebacillus algifaecis
MTCTRVLIVSPVRQTPEILQEHLRSLERLDSTGLELEYLFWDDNSVEESSVLLCNFSQRYPDRTCLICALRPSQQSTAHSWSDQNVWHVAQMKDIALQKAVEGRYDAVFLIDSDLVLHPNTLQQLLSTEKEIVANLFWTRWQDDGPALPQVWLSDSYTLYEQNVGEQLSEQERTQRINRFLQQLRKPGLYQVGGLGACTLIRRSALLAGVKFEKIGNLSLWGEDRHFCVRAAALGIPLFVDTHYPAYHIYRPSDLAGGQAFNRGEGEQAGITISLCMIVKNEEETLSRCLACVQDLVDEIIVVDTGSTDNTRGDAELYDARWYEYEWQDDFASARNFAFSKATKEYILWLDADDVIEEPDRMRFRELKKNLTSEVHYVSMPYQLAFDGAGRPTFSVRRNRLVRRDRNFRWIGVVHEYLEVGGVGQSSDVAVKHRKARSSSDRNLNIYRRLEQQGVEMTARELYYFGNELRDHGHHAEAIEKYQAFLATGNGWIEDNISACLSSADCYSALGDREKQLRMLLRSLEYDMPRAECCCRLGSYYLSEQQYEKAIFWYKSATQVSSPTEQVGFVDLSCWTWLPHLQLCVCYDRLGQLEIAHFHNEQAYLYNNSHPSILQNRKYLQARLEERKTGSEV

SEQ ID NO: 1766 - protein, 403 aa, Lentzea albidocapillata
MREKTMSPGPNPWIRRVLPPLADLSFTGQETSARASVVVLARDEERCIARCLDSVVNSGFDDVLVVDTGSVDGTLGIVATYADRGVRLLQVPWGDSFAEARNVAVDAIGDGWVVFVDADEWVESAEELRDCLDSLTGAGGLPRLVFAPRIFDVDRETYDDSIPRIFLADGGVRFKGAIHEYPVVAGEVDEPIGLVELDVVFLHDGYRPDVVDAKGKRQRNMELLRSALKSDPANPRWFYFMVRDALPVLGGDQIVGLCDALRDLVGRDTGSGDLLGAAEYWKLALAFSCQGLVALGDWDSVHRFCRDLEQVDAHYFSTMAELVGGVVTKRDLLRAVEIRKNDDLMARSAIDRAGRHTDALICALLGRLRGEGEADRYRELCDPWDDVFFEKSVPRRASGVSPA

SEQ ID NO: 1767 - protein, 355 aa, Unknown
  Description of Unknown: Chryseobacterium jejuense sequence
MKISLCLIVKNEEKFLSRCLESAVKFADEIIVVDTGSMDKTKEIAEKFTDKIFDFEWINDFSAARNFAFSKATMDYQMWLDADDVIPEKSINEINELKKKLSDDVEIVTMKYGLSFDENNNPTFHSTRERLFKKSKNYQWIEPVHECIPLVGNIYYTDIEIWHKKEVSEVVSTRNIEIYRALEESGKEFSARQLYYYARELKDHHETVKAITFFEKFLASGSGWIEDVIACCQELAIEYKKNGTEEKILPTLLKSFEYDIPRPEICCELGYYYKDKQDYNQALKWFDLATRLPQFHSVGFVSSDYTGYIPNIEACVCLSFLGEYKKANEYNEIAALSRPNCPSVRQNRDYLRELI

SEQ ID NO: 1768 - protein, 657 aa, Desulfotomaculum sp.
MDSRVSLCMIVKNEAQNIKRCLDSAAGAVDEIIVIDTGSTDNTGQIAAEYGALVQSFLWNENFSDARNASLDLATGNWVLFLDADEELTQSSREALRRVIDDNAVEGYFVKIINYLGNDGWSESCPDLVFRLFRNRRDYRFRGAIHEQIAGVILEKNNQASYRIAEEIEIIHYGYLDKQIGEKDKKNRNINIIQKELLQDPENRLLRYHYGVELFRAEKYEEAAVELIQAANGIDPNTIYLPKLFRYIVMSCQSAKQPEKALDTALLGLRFFPDYADLYYYAGLLFLELKQYNKAREFFQNAVSMPAQPSLYASFGGVRGFRSYYHLGQIAETFLDYEDALKNYISSLRDNPNFTPALESMVKILKPRENPEYTKESLEKVFEFCTPEANQIMGGIYFRHGAYQLALEYFESAAANGASSPEIQLCKAICLIQERRRLEALRTINKFSRESHLYPLAKINELLCFWLQDKKKKVRSLFAELQALGLVADTEKVLSLFLAIPGKQKKHCAVTLGQDGMSLLLDVITRLLDMEEINKVEQLLSEISAENLAEYSLAIARRLYDFGYKEMAEALLREHISGNQNAEPHFLLAEICQEAGKNIEAEQYYRRALELDPDVPQYYIRLLNLYESSRKRILQEAMAKYPGADIFKKLSGEAPAD

SEQ ID NO: 1769 - protein, 361 aa, Paenibacillus ihuae
MIEISLCMIVRNEENSLSRCLASVKAIADEIIIVDTGSTDETKAIAASFGAVIYDFTWIDDFSAARNFAFSKATREYIFWLDADDYLKEEDQQRFMELKRCLPEGIDTVNMQYNLAFDKAGNVTASLRRNRLVRRSCNFKWIGPVHEYLEVYGPSLTSDVCIFHEKDKAFTDRNLRIYQKRAAEGEHFSPRDQFYYANELRDHGLYGEAGDYYEQFLSGGKGWIEDNYQACLRLSECRERLGDKEAAFAALCRTLQYDRPRPEFCCLLGAWHLEKGQLLTAVYWYELAAGLPPDKAPMGVRNEAYSTWLPILQLALCYDRLGQHEKANLYNETALRYHPSHPSMLFNRNYFQNLLGERYTT

SEQ ID NO: 1770 - protein, 359 aa, Sporosarcina koreensis
MFSDHQEISLCMIVRDEEKVLERCLRSVSEFMDEIIIVDTGSVDGTREIAEKYADKVLDFAWVDDFAAARNYSFANATKDYIMWLDADDVLQELDRHGFRELKEQLDGKVNRVSMPYHLGVDSNGNVTHSLRRNRIVRREAGFRWVGKVHEYLEVFGDVIESDVAITHQKEKAHTPRNLEIYLRMHENQEPFSLRDTLYFANELMDNDRKEEAIIYFEKFLSLEGGWLEDNITACLHLSHCYKNSDDRKSLRYLFKTFEYDKPRAEACSEIGRYFIGHGEMGLAVFWLEMIFTLDRPHSMGIANEAVWTWMPHIDLCYCYDQLGQFEKAYEYHMKALSLVPDHPSVLFNEKYFEHRFNQ

SEQ ID NO: 1771 - protein, 253 aa, Escherichia coli
MDDYLVSIIMPSYNAEHTISASISSVLKQTYANWELLVCDDDSSDNTRFKVLEFSDSRIKLLTNEYAKGAAGARNTALKYASGRFIAFLDSDDIWIANKLEMQISMMLKNNISFMYGNYEIINNNSIVGKFVAPQKITYNKLLKNCGIGCLTVVLDRTLLNPFSFPFVHKEDYYLWLSILKDNNISAINCGFICSKYRLSQSSISSNKFKELKRQWDVLGDFVENPLARIYYLLNYIVIGIKKHAFDYKNGKK

SEQ ID NO: 1772 - protein, 479 aa, Acidibacillus sulfuroxidans
MVTHDEVRQNLILHRYDEARNGALELVSINPLDAQGWVFLGEACLRSGNGTVARRCFDRAWLLDPEAKWVSAMQKACEDAPSGTVTDHEVEKVLAYPSKTVSALILFKNNKRTLSACLAALQRAVDEIIAVDTGSSDGSREIAEMYGAKVYDFPWIGDFSAARNFGLKYVSSDWVIAIDSDEILELGDQDNIRITAGLFHELQVPAIVRIVQMNKLGRIIVPALSQSRMFPMNKGLHWDGKIHEVITFQEFVRDRRVVRPAVRIRVFHDGYDPESVDIQSKYDRNITLLLQQLQQEPDNPSLHFFIGRESLFLKRYDVAIKHLEEAERLGQKITGYGMVPDIMRRLVQAYAESGNVKKAEQKAEEMISLFPTYPDGLFLRAEIRIRKIDQEIQKAYSEMLSAQKAANSYRGITETDSTIGTWKSEVYLADIARWLGRWDEARARYVSAISIAPELMEIRKRIDEMDRQIHLLSEATTQN

SEQ ID NO: 1773 - protein, 697 aa, Paenibacillus sp.
MCSSFSSRVHLQGGYDMPTPTLGILLIVKNEADLLPRCLESVSAADELIVVDTGSTDHSAEIAASCGAKILHHAWAEDFSKARNAGLELASTDWVLVLDADEILVTPVAEIKDILAATPLLACTVRIENHFGPNREDRIIHTAVRLFRTGYGFRYSGRIHESVEPSIIGSHGIGAIGFSAVHLVHTGYLPERMEHTQKLARNERLLRLALAENPDDPFTRYNLAVHCCQTGHLEDAEQLLTDTLARAPMQASYRPTMVRDLGKIELATGKIPQLRNLLADELPRYPDYPDLHVMEGQALESQGLLERAFESYGRAADCGSSNNPGEKYALELGMATFRPLHRMGVLARRLGRHEEAARLFHRSLLGHPLYVPALTGIADVFIHLHAADTAIAGLLTSLVGTDSAAGWASMLEALDSIGAYEAISALPQPPMDLEPQAWARIIAARIGTNKYAEADGMLGKMLTSRTADFANHAHRLVWLELYALSRWDRGLAMEPVPAGELPGLEKTFLHIEQTLLHGPTLPEDHHSGSPPAEFVAGLIRRSVKLRRYTLAAALADRFPGHLAGLAEALYEAGRRAEAGELIITLAREDQLSCRLCHYLGEMLLDKGHYAEAAGWFQRASRDRPEAEGDASRMALAFCYLQQAEQDLREAVQRLGNDGGGSALTEEIESTRQAILLLNRIPWHTEWSSCQRREGSTP

SEQ ID NO: 1774 - protein, 790 aa, Unknown
  Description of Unknown: Desulfobacteraceae bacterium sequence
MLSLVRALGDEFIVVCQEFFSRDIKPPMPVIFIPAEADLAAAAGKAVKKATGDWILMLTSNENISSSDCEAVKRLSRNHAVEAYYLIAQNKLEPGALGKYERIANKGKYSNRKVQIAGYIPAMEIRFFQKSVFKKIFSVCDDSIHINLIDNHRGIAHSGIRLITQKDAEAYTGGAREEENHRKDFMRFTHQDEEIPGGNNASEMNIFGTVGFSLISEKDLPSLEAGLEMGFGSINLFNWAVHQLIKKGRYNLAVSLAEKVISRFPGNYEIWHLRGIAFFYTLNLVDAEKSMKKALEQNGKDKTTLSDLARVLIASGRLNEAIVVLEKVRDIHGLTPENEYILKAIKNKSGKTAGISLLMLCRDEEEYLERALKSVKDLVDEIIAVDTGSTDKSLEILEKNGAKIIRHPWNDDFSEARNAGLDHVTHDYVFWMDADEFLEDKTRLSFYVFKHLLPINEKQAVIFDVKCFFGSLEATNLGIPPTDIIKRTSIFPNLKTVRFQGNIFETVEQSLAAAKIPVIFAENIFIKHHNDNNEFRNRRKISAMFKSGTASHRPEDFFRNTIFWLDAGNVLEAADWFEGAVIKADGDRKYLDIICRLFSSFALNGKICPDSRIFRELLSRYGNSYRIASLCADCLYRFKEYSQAAELLKKLASPEYQPPHNARDHDLMRNNWLMLSMASLELDDYETSDSMLDLLSMDNKTADTARAVSFYKAIRVKDLDAAIAVLDKWIRERNIPIRSTIDDFAGFIRLIGDIAEVAAKYGQTDAGKVLLRSAEYFTSTITPMAQITPA

SEQ ID NO: 1775 - protein, 342 aa, Unknown
  Description of Unknown: bacterium D16-50 sequence
MITVSLCMIVKNEEKVLERCLDSIADLVDEIIIVDTGSWDRTKEIAARYTEHVLDFRWTEDFSAARNYVFSMATMEYIYSADADEVLSEENRERFRLLKETLLPEIEIVQMKYSNQLRFGTVYNFDEEYRPKLFKRKRDFVWEDPVHETVRLMPVIYDSDIVIEHMPQESHGKRDLACFYKHCRQGLRLSKRLHELYARELMLVGDEEDFRQAREFFTASAGDAYRDGEELAQACCVVARAARLAGDTVAFFKHTSKVIAEEACSEICCEMGHFYEEEGDWEEAAVWYYNAVYETRPILSIQAGGREGLEGLIRCYEKMGCKEQVEIYKEELSSRDGDINKR

SEQ ID NO: 1776 - protein, 508 aa, Anaerospora hongkongensis
MNTACLISLCLITKNEEHCLAACLASASPVVDEIILVDTGSEDNTLSIAAEYGARIFHFTWIDDFSAARNYAISQACGKWVLVLDADEKLTVTRSEILHFIALNPAEGYYFNILSYIGRDRQVARDQVVRLFKNAPQYRFTGAIHEQIAGSILSQQPPGSLRVTPFTVEHYGYLPEVLINKSKFSRNTELLVKSLLNHPKDPFLHYALAIEYLQNRNFVQAEQTLQEALPLLTGTEGYLPQVLGALLLVKLTQPSDQQAQTLFINAIQVLPDNGDYYCLYGLWLMQRSRYSEAVSILEQALQKPRELTASVSLPALLGDACCLAGQQQHAVDYFTTAVAEAPQLLYPWLRLLTVSCSENSPQLWDYVYNGLTAAMPLSSLLTLQPPIHFETASARMLLEAQYALRTNDARKLAAACSLLGQLPHAAYPVLIAPAEVPALVTLGTELLLFESHLILLGSNLAAQHSLEDSIFHQLRLLTAVISQSFPTSPLHFWEEVFIGEACFNRQPG

SEQ ID NO: 1777 - protein, 626 aa, Paenibacillus polymyxa
MMKTIALCMIVKNEQEHLRRCLDSVKNKVDQIVIVDTGSTDETVNIAKEYTNDVHHMEWDNNFAAARNESIKYATTDYILVLDADEYLEGSADLQKEIASGADYYFTKIHNIMSFERALNHLAIRIFSNSKDLYYQNRLHEHLNIMDEKRNLISGQAGLVIMHTGYTDEMMEGREKAKRNLPLMLKEVEENPTVYNLFNMGRTYMWVGKYEKAITFLKRAYPMSKNLTISSDLIITLCRSLGETKRYNEALQILQEAVVVHPKEVDLLHLQALYFMEIGYYRDAIATMTKCLDIGDQGITVTEGHGSYIAHFRLAEWYELRNDLTKSYKHILEAFKLKNDFAPIMGKYFKIIEKANVPLEEVFVSTNQLYPISNSGQLEKLLEVMYQLRHPLLQRYLTEYNVTVQDNVMATARQYARDYEGAQALWLEMADIDEQNGEDILLLSILLKDETLLRRAITLLNLSQKEQKNIYKIIMNDLSEDNVKLTPHLEKMLEKTLLHLIRLQEFETFEIILNYLWQGSADVKVKVCEHLVAYGFNEIAIDLLVKLFEKYPRNVRIIEILGDVCLRSEYYQDAQLFYAKLLEFRPDYSSYESCYFLSEKVGDQEGSFNIKESIKLKFPLSSWVVD

SEQ ID NO: 1778 - protein, 359 aa, Clostridioides difficile
MITISLCMIVKNEEEVIGRCLECVKDIVDEIIVVDTGSTDSTKEIVSKYTDMVYDFEWIDDFSAARNFSFSKASKDYIMWLDADDIILEDDREKLLKIKETLDTSIDIVMAKYNVSFDENGKPTLSYYRERLFKRSSNHKWVDPIHEVIPLVGEIFYSDIAISHKKLHRQDPLRNLRIFEKMISEGRVLEPRHQFYYSRELYYNAKYKEAIEGFTKFLDSARGWIEDCISACRDLATCYYLINDEKSALYSLFRSFEFDEPRAEICCDIGKHMFDRQKYKEAIFWYKVALTRDKNDTNGGFKSNDCYGYIPYIQLSVCYDRLGEIDKAIYCHEKAKEIKPKDSSILYNENYFSKFKNNL

SEQ ID NO: 1779 - protein, 372 aa, Paenibacillus terrae
MTKPPVTISLCMIVKNEEQTLARCLDSVADLMDEMIIVDTGSTDQTKTIAARYTDRLYTFDWNDDFASARNESFDKATCSYILWLDADDVLLEPDRERLCSLKRHLSTATDIDAVMMPLHLAEGEQGEPLFTSRRIRLVKRERQYRWAGRLHEYLVIPEGRIVHSDVAVTHRRMEDHTLRNQRILARWISETDKLEGRLLYFHANECFDRKEYAEAAEAFNRLLGEPSGYREDRITACVRLAECYLHLGEPEQQLDILLRSFRYDVPQADVCCMIGDWFFTRKEWSIAAYWYEKALEQQDVSGLRAVPLPCYSWLPHVRLSHCCANLGKLDASYEHNQKALRYLPEDPYLLDNERKLRSAIQKPSSSVRPSK

SEQ ID NO: 1780 - protein, 1311 aa, Centipeda periodontii
MMRISACYIVKDEVAELRRSLASLRDAVDEIVIVSTAADVGVAELASNFHAQLWDFPWQNDFSAARNYALGKVSGEIVIFLDADEYFFHPEHVRNALDDVIRAAPDFDIIMLRRCNFMTANVVQNAMYDNSPRILRMPGLHYEGMIHEQAVRDDGKERVLAYGDERLAVGHTGYLKIRGEAKIRRNIAMLAQDAALHGRTEMHALYLMDCFFGLKDYEKVIALSKEVLQGNIRVIGSESTIYHQVIESMRALHYPDEEMLALADEALAKFPELPDFYAQRGMILCGLVRYREAAESFEEALRRYDHDFLSIHNSSFFNDAVAALVSERLARIYRVLGVPAAAQLWEERQRAYLGGDTGAEVKEKMQITACYIVRDDAVHLKQSIESLCTAVDEIIVLDTGSQDDSVRTAEECGASVYHAAWQDDFAAARNAVLAHASGAWIVFIDADEYFSPETREHLRAVIEEADRTEGEVLLVPWHNIDEATGETLLDSYAPRIFRRREGRHYVGRIHEELREADGSAPLSRIIAPELLTLVHTGYSAVLTREKGERNLRLLLEELEHTDTPERCWRYLAETYDNLGNERMAERYALLDIGTGRRSVLYASCSYRILLRIYGANPVLRDKHLAVAEQAVREFPELPEMHAELAEALAAFHRYEDATAAAEQALQTGPPTAGTEQSVFTAEMRDALCRRMKIWQRIASRAEEIRIAACVFVRDDARDMETWLGNAAVYADERVVADTGSTDGTRALSERAGAKVFDFPWRDDFAAARNAVIAEAHADWVTVLDADESFVDPAELRPYLAMMDVVLPHVDAVLLPIVHVDEDAGNREIGRAPHVRLLRMGRGLFYEGRVHEALRKEDGEPVLYHEPVALVIRHVGYSSGRIRAKHERNLALMERRIGEHGLQIGDCRYLADTYYGLGKYAAALIYVRAALEENVTSFGAQSHLHHLLLDVMEKENIPLPEQIAAAHAACRAFSQLPDFYGRLGLLLAADGDAGALDALTKALMLYEHPTDAEGEASVFPAWAGAVSAARARILMEMGQRDAAEEELTRAFTFNTAREEALDVSMELHGSEDVAQILAGMRELLGEGVETLAYLTRFADSYGWLALGAAARAELSRMTGHVVPTPEIYERIRVLAPKELGEHVVGALVEYVREMPEILLRLERERRAKSLHLYHRLRSLLPDAMLAFWRHYDEPDAVALPEAMDGYESVRAAFIHHADAEQSARFLRVAAGYGRDVLRAAAEDFADAQRWEGAFLGWSLLSAVEGESLDSCYGMALAALYLGARTEAQECLTRACTLDPSHRKAMELLELIK

SEQ ID NO: 1781 - protein, 355 aa, Unknown
  Description of Unknown: Candidatus Stoquefichus sp. SB1 sequence
MITISVCMIVKNEEDVLERALSSIQDIADEIIIVDTGSTDNTKSIAKKYTQKIYDFEWCDDFSKARNYSFSKATQDYCMWLDADDVLLEDDQNELRKLKATLSPDTSVVMMRYNTNFNENGQPTFTYYRERLLRRIDCFQWVGFVHEVISPSGKIVYSEIAITHLKMKSNPHRNLKIFQKKQAEGVLFSPREMFYYARELYNHEYFDEAIAEFKRFLNSQKGWKENAISACQFLGYCYYHKREMQEAIRWLLTSLCYDLPRAEICCDLGKYFFELKCYEQAIFWYITALSCQRNDQSGAFILPECYDYIPYIQLCLCYDAIGDHETARFYNEMAGQCKPNDKAYLYNKQYFNKIL

SEQ ID NO: 1782 - protein, 381 aa, Oscillatoria acuminata
MNPTFLSFCTIVKNEKYNLSRCLTSVKPYVNEIIVVDTGSDDGTPDIALEQGAKVFYFQWCDDFSAARNYAVSQASGEWILTLDADEELIIQSENFREILAANSKVLVYSLDLINVGQEENQIGGKLQRIFRNIPEIRYQGRLHEQLIYENQKISGSRRVYLNSLKILHYGYSDPDLTAQKATKRNIPLLERMKKEEGLSLGNLFSLAQMCDYFGQTEKAQVYYEELFGVLLHYVMNNERPNELVWLATMLHFFADKCLKQEQYETAQIFCQFGLKWFSDFPPLNALAGDLLIALGFTLGAVPYFEKCLQLGQEGNYYARDPFDVSFINTYPAYRLGCAYLNLHRWQEAKIACEMALSFDGNYSPAQQLLEQILQFFPDKK

SEQ ID NO: 1783 - protein, 592 aa, Unknown
  Description of Unknown: Chloroflexi bacterium HGW- Chloroflexi-4 sequence
MNKRRQARLFAFKELLDYPDNDTATRLIVEQSAKVVGKTIYRRFDNSVRPEKFPDISLVLIVKNEEKDLPRCLESFKDIVKEIVVVDTGSTDRTVEIAKSYGARVEFYEWTNDFAEARNVSLSYASCEWVLRTDADEWIEEPEKAKLLHCVNSGVADIYLCPTVSKLRNGVQTVENVRLIRNHLGVIYHYPIHETVALSAAKLGLVQCLTNVDFLHSGYEFLEAGSSEKKTERNISVCTQYLEKHPEDFYVRLVRGLLLLNTTRKGDAISDLERGVKDIPDDASPVKYMGLAYIALCQQYVFEKRDIDLINILLDAQVDFNVYSCMMQFIGQIYLFNRADWKRANKIFDWTLKKYSTKLTFSDVLFPDKYNEVECSKLMAETCVLLKENEKARKYYLQAKKIQKSQSEKSEHQSYDKHYEDVDSFSAEQLRILAKTPKENLKYIETYSNILRAASKSELTAQDYLDLANCQIQLNNLKFAQKLIDESRLINSEIPFAYNLESLIALKEKENDKALEKAVQAYIKEPGNSSYQNNVEQISNLLRLSPVQGIKKVGLNWLSTGQTKEGLFALMLYLKFVPEDLEVNAVVAKYLN

SEQ ID NO: 1784 - protein, 362 aa, Bacillus koreensis
MISISLCMIVKDEEALLARCLDTVKDIVDEINIVDTGSTDRTVEIAKEYTDRIFFFEWIGNFGAARNESFKYATCDYILFLDADDVLLEEDQRKLKELKETLDPSVDSVSMYYDAGTDEFGNVTLRYRRNRLIKRSRNFVWKGDAHQYLEVYGNVINAGISVTHKKEKHSVGRTLGIYQKKIDRGDEFSPRDHFYYGNELRENGHYEKAIESYDKNISMAEGWIEDKVYACINKADCYRFLGDTDNELKSLFQTLQFSKTPRAEAASRIGYNFQVKEDYESAVYWYDIATKQKADPNQWSFSYPAYYTWYPHLQMCLCYYRLGNFAKSYYHNEQARTYRPEDQRIVNNKVLLEEKLGIEKEQ

SEQ ID NO: 1785 - protein, 356 aa, Bacillus marmarensis
MITISLCMIVKNEEKLLKRCLESVVDLVDEINIIDTGSTDATIKIAKEYTDRVYSYKWNGHFADARNESFKYATKEYILYLDADDVIKEEDRTKFKKLKNELPQEIDSVSMFYHAGLDAYGNVTLKYRRNRLVKRSKQYRWVGDVHNYLDVHGKVYNSTIAITHLKEKHTVSRNLNIYKEKLNRGDQFSARDFFYYGNELRENNLYLEAIQAYDKSIEHENGWVEDKFYSCIFKADCLAQIGKTLKQRNSLLQSLRFAKTPRPEMCCRLGDVYLKETDYISAKYWYELSLIVPEDSNKWSFTYPAYSTWYPHLQLCICNFKLGKFKAFKVHNEKAAAYVPRHPAIEHNRKLLKNIA

SEQ ID NO: 1786 - protein, 365 aa, Oceanobacillus chungangensis
MNTISLCMIVKNEEEVLKQCLESVNDICDEIIIVDTGSNDLTKTIAKEFTDKVIDFKWIDDFSAARNFAFSHATMDYILWLDADDVLLKEDQLKFKALKDVLHEGIDGVSMLYHIAFDEYGKPTFSYRRNRLVKRSKQFHWIGAVHEYLEVSGNIISADIAVTHKKSEKTRGTQSNRNLTIYENRLKKGEKFTPRDLFYYANELKDHGKFQKATIYYREFLATRKGWVEDEIRACINMAACYKKIGSEEKELESLVSSIQYDVPRPEVSCQIGDIYKGRKQFKKAIIWYLLAIEIEIDNDYGFTQISYATWYPHLQLCVCYWQIGEIEKSIKHNNKAKEYRPNDSQVKHNENFFKEYLANKAKLE

SEQ ID NO: 1787 - protein, 629 aa, Paenibacillus polymyxa
MNKTISLCMIVKNEEKVLDRCLSSVVNKVDEIIILDTGSTDSTMEMARKYTEKVYSYQWDDDFAAARNHSLEYAKSDYILVLDADEYLESDADLKKVVESGNDYYLTRIRNLLSFGWAHTHTAIRLFVNKPQLKYKNRLHEHLDTMNENYEYSTEMAEFVILHTGYMNETVAEKDKLSRNLPIMLREVAENPNGYNLFNTGNVYYSLGNYKKAIEFYQRSYPLSKDKSYAPELLTKIATCLSYLGKHEEGLRVLEDAVEIFPNTVDLRYAQGKIYFEADYLKDAELAFRKCLIMGDKGITVTEGAGGYGAHYYLSLLYYKKGELAKSYDEIIKVIQEKKLFVPGLNHYFDVILKSNIPFNDVKFNINDIYNVSNVEELRWLMESMYSLRHPLLNEYLITYNLTVEAKIKAVALLFDKKYEESKQYWGKVPLDQENALDVVLLAIILQDEGLYNSAQMILNLSVNERKMFKSILFGGNLTKLSMTTNLEGMILKVISHLIVLQEFEIFESISLVLITSESDRIKQKLGEVLTSYGFHEVAIDILVKCFEKKPNSSSLVSLLGDICLKSGYLQDAQLFYNKLLEIKPDYSSYERCYDLYEVSENVQGMRVIKEEIKRKFPLATWVKGFSMV

SEQ ID NO: 1788 - protein, 358 aa, Thermoactinomyces sp.
MIVKNEEKNLANCLASVKDVVDEIVIVDTGSTDRTKEIARKWTDRVYDFEWIDDFSAARNESFRYATKDYIFWLDADDILESTEIEKFKHLKKSLLKEKIDVVYMKYFLPSDQVESHTTRIRMVKRDLSARWEGIVHEDIRVLGNYRYTLSDVIVTHTKDLNTPSEDRRPSRRNLEIYEQNIARGHKLSIADMFNYARECSIHKDYPNAIKYFELIRDHPEISLPNNMFIYHKLATCYVLNNQPEKELELTLQSLAMDMPYPAFSCRMGEHFIKKGKIEVAIFWYKTAYLQPLSDSYSFSVADATYHTWLPHQQLAVCYESLGEKDQADFHKRQAEYYKNRLVSNTKKVNISPQTVDS

SEQ ID NO: 1789 - protein, 418 aa, Ruminococcus gnavus
MMILCDIIYFSKIENRVIKVRKYIDKEVVAVSKEYEMKWKEKAVTKERGSVKGNVLISGIIICRNEEENISKVLDSLIDLKIDEIVVIDTGSEDGTLKIIETYIYQNSNIRMYRYQWKDSFSEARNFGIRKAKNDWLFFVDADERVTNTNDRSIQSMITYYSEMCGDEIAFCPVIVSSKFNKLYGNPRIFNKKSGYRYYGNVHEMLRKSEDEYNTIPFVCLNIIIEHEGYGKRLIKSKLQRNLRLLDFCIEKERENPIWYCYKLRDGRDFLDFDEKKQLYENVQKIYKENVNKSFYQYCFDWAASVFIQNVVKMGDIKLAKNLLIELLTYGKCSVEDQFYLKTLVKLLEIETDLLNLETECTVMQENADFSSSIIDTAGYYIDELKMRIFEKEHKMGDYFKMKEFLYSVGYICDMETI

SEQ ID NO: 1790 - protein, 348 aa, Clostridium butyricum
MLSLCMIVKNEDQNIKSCLSKVVDFVDEIIIVDTGSTDNTKNIASEFTKKVYDFKWCNDFSKARNFAISKAANDWILVLDADEFVTNFFRDNVNKFIKNSLNKKKVGRVQRINIMEDPNGNKKYIERVNRLFNRNYFNYEGIIHEQIRDLNGENYETEIVDIIVEHVGYTKEVLHRTDKIKRNISLLEVAVKNDSEDPYLYFQLGKSYYMMKDYKTSVLYFEKALSFELDFRLEYVEDLVETYGYALINSGRYSEALILENCIEIYSESPDFQFVMGLVYMNNAKFTQAVERFLKCTKFSRSNVEGITTYSAYYNIGVIYEVLGFKENAIEYYNMCGDYEPAKNRLKL

SEQ ID NO: 1791 - protein, 596 aa, Caldanaerobius fijiensis
MIESPLLSLCMIVKNEEKNLPRCLDSVKDIVDEMIIVDTGSTDSTVKVAESYGAKVFSIRWNDDFSEARNASLEKANGKWILLMDADDELDQEDKQKIRNLLTDDVEGYFFKTINYVGQNPGVEVALNMNFRLMRNRPEYRFIYPIHEQIAAVIQQIRPGAKLVSTDIKVYHYGYLDDEVVIKEKRKRNMRIIERVLQENPSDAFMRFNMGNEYFALSDYNKALYEYMLSLNNTHGKTGYLSKLYVRMTLCYNELKRYDEALSIIERGLSDYPDLTDLVFLKGYIHHVNKRYTIAERLFKECIEMGEAPFDIGFIMGVGSFRAHHALGELYLELEDYDEAYVHFEQAYKMNNSFKEPLFKMCEILMKTRGVSEAREKLEDMIDIQNPDGISLMINIFLRYKRYDICLEYLDPLLRNDKCNDEIYYLYGRCLFYLKQLDKAYDMWKMIDSKSHFYDMVIDDLMLRCVIKNEYEETIAECCRIKKAKKYEVFQRLNDLLNRKKPDILSDDIETSKEYSDIIFDILDKLLYLEEFEIFENALGLLNLIEDKTVLLRLGKLYYRYGFVQNAENEILRSMKLFNIYDQEALSILNHIIMEE

SEQ ID NO: 1792 - protein, 361 aa, Cohnella panacarvi
MRAKGNAIMISLAMIVKNEEKYLDRCLKSAAHMVDEIIVVDTGSTDRTVEIAEQYDAKLYRFEWIDDFAAARNYSLEHVTGDWVLVLDADQYFQEDFSESIKQFTNSNAKRAGLIEIISKYEQNGQTLHSTDYMARLFPRGARFEGRIHEQLTPLMPTVVTGLKLMHDGYFQTDKGTRNIPLLLKALEEEPDDAYLNFQLGKQYRGADEYNLAQHYTEKAYGLLQGSNPPFALETIIELLEVLTVNKQYEAALELASNEVEWLDKSPDFAFSVAQFLLEYAIDAQDFSVVGNIENSYLKCLELGRAGAKEIVIGASTYLAAYNLAVFYESIGNDANAKEYYALSDSYGYEPAKERLQKYTS

SEQ ID NO: 1793 - protein, 625 aa, Paenibacillus odorifer
MDKTITLCMIVKNEEKYLKRCLESVKDKVSEIVIVDTGSTDGTLVIAEEYTTKIHHFKWVDDFAAARNESLKYATSEYILVLDADEYLESDADLQKDIKPDYDYFLLKIYNDVSYGRAFTHTAVRLFANNRGLHYNNRLHEHLNILDAKTNYKSQYGEVIIHHTGYTDEIMQEKEKTKRNLPLMLQEVEENPGAYNLYNMGKTYLSINENAKAIEYFQRAYPLSSGRMFLPELITKLCYCLGELNQYDDSLRILNDAVKVYPLETDMRYMQGRIFMDAGYIKDAEITLKSCLEFGGDLGVSVTEGTGGYMTRFVLAELYEDQNQLDESYKYIVEVLQEKKTFAPGLSKYFEIVTKSNIPLDDVYQNIIQLYNISNINDLQLLLDVLYGLRHPLLNRFISVYSITAQPNVAASAMQYDKKYIEAKDMWLSMEDIQIENAVDILLLSFVLDNEELFNLAKPHLNFSEKEEKLFRKIIRKEVISSNKMTSYTEKILGDIASHLLKLQEYECLQTLLEYIEETSLKSKINSYSLLISYGFNEVAIDLFVKLFKNNPNDVEIIRLLGDLCLSCNYMEDAQLFYSKLLELASDYGSYERCYRLYEKMNDRVGMSRTIDSIKIKFPRSLWVI

SEQ ID NO: 1794 - protein, 476 aa, Paenibacillus alvei
MTRPKISLCMIVKNEESCLERCLDSVKNIVDEIVIVDTGSTDRTLQILEERGITAHHYNWNHHFGDARNHAISFATGEYILQLDADEYLDESTKGVLKEPLDCDCYILKIRNDLGSGFNEVHSSIRLFRNSPKIKYVGALHEHIDTETTKLKHGKLSVLIHHDGYQQSVIDKKNKNKRNMQIIKKEAKLNPDAFNLYNLGVQLKIEGEHLAAIDAFKKSFAAGSNYTFTPKLLVYLGQSLMELNRHEESLAVFRDSIALYPTYTDLHYFKGFVYEKIEYFRDAEACYKKCLEIGEVSETYHNSQEGVGSYLAHAQLAELYLKEERREESLNHALEALKGSKNSFPTLKVFLNIFPGGDRKQLYGILKQVWNLDSDKDLELLLIALYQIRHPLLLNYVEEYNVSIPYEMQRFLLLMDKKYEEVLEREAVNGELARDQSSQYGRDMLLLSFVTRDENLYNRASLDINLNQKESKILKR

SEQ ID NO: 1795 - protein, 642 aa, Anoxybacillus ayderensis
MKPFLSLCMIVKNEEKVLQRCLDSVYGVVDEIVIVDTGSTDLTKEIALKYTNKVYDFEWTNNFADARNFAQQHATGEWILVLDADEYVERTNLQEMIQQLKQTDDSVEAYDVSIYNFVGAYGERVLQHRHTRIYRNVPYLRYDRAIHEQLRHVSGKYVEAKTGILTIYHTGYMRHVVVEKKKHDRNAQLIEREMEAGESIAFDYFNLGNEHLSKGEVEQALQAFIQAYQHKKDIRLSWVSYCLVQIILCLKYLQRFDDALRVIADVENIYSETADFQFLRGEIYYLQHRYDDALKQLEYLLENKEKYPYTIKTFEYVEYDPHMLLGQIYKHKGNLQKAIYHFSCALSFNRKSYEALYNVLQLLARVHSETEIIQFIESKQLANDLLAISLVARIASALHLENVMKSLVAKLGDDVIQRGFEIKVNILQNAYDDALQKILKSSVADLQTYVRSGGLDSYDLLVLAFKTNQLDVVRLLLHLVSDQKEKEFLLFMLNEHEQAPESMFYLFLLERTIQLKEYELFEQFLALKNRFAPSVHIQIAHLLHRYEFMDVALQLYRSVDNMNDWDAGAFVNVMEALAMKNEIMEAMQYGLLAISFGHHDFRLYKYMIELMSICGMSEERRKIVQQAKQLYPDSEWLLKQRD

SEQ ID NO: 1796 - protein, 357 aa, Unknown
  Description of Unknown: Candidatus Marinimicrobia bacterium sequence
MAAKIPLMLSACLIVKNSEKFLRRCLESICEHVDQIVVVDTGSTDNSIDIAKSFGAEVYSFKWCDDFSAARNKSLEYAAGEWILQVDSDHVLEVKKGFDLRRALGGARQIGFFIKEVSILKNGGKQLLDRMLLFRRVPGLKYEGVLHEHPMASLISYAKNKGIEEPFSTLDSVRVLHYGYFDIEQKLKRNIRILERGIAKEPMNWHYRYKLLLSYESAGEKGKFDSLLKETFSLMERNGHRGISLAMVGIAGIVGKWMLKVGYPEGDAIEFLERYYRATRGKDLRIALPLAEFYYIKGDYKRTFDILSLILKEGYGPGFIPLTEVEKSRAFRLFSKAVEKLFSEDDRKRILKAIGML

SEQ ID NO: 1797 - protein, 389 aa, Unknown
  Description of Unknown: bacterium 1xD42-87 sequence
MAADTGNKYIRRMNRAETRRNHMIPISVCIIGKNEEKNIEKCLEPLTHYPFEIIYVDTGSTDRTKELAAKYTDNIYDFEWIGDFSAARNFSLKKASHNYVLVIDCDEYLTDLDLDGLCEAIETHPRGSVGQILRKSFSDTQYRKDYSLERVDRLFHKRSFHYIYLIHEQVADIKTDRTDYERYDIPVEVDHVGYVGTNDEKRLKAERNNALLFKEIERKPEEPYFYFQVAQSYNLIDDYENAYIYYKKAFELPLLLQNEWVHVMANNFINVMVQTGRAAEALELYVPVYNDYAHSQQFLCSMGALYLNQDPPQPLKAVMEFVKALQCTPDSESEDYSGMAFFSIGFANELLGNLPAAASFLVKSAEKGYPLALEKLEEVRKTMEERGSV

SEQ ID NO: 1798 - protein, 366 aa, Unknown
  Description of Unknown: Lachnospiraceae bacterium A4 sequence
MKFSLCMIVKNESAVLRACLDSLKEIMDEIIIVDTGSTDDTKKIAAEYTPYLYDFEWHNDFAAARNFAFSKATGDYIYSADADEVVDQENQDKLKALKRAMLPEVEIVQMIYVTEQINHPTENFARDLRPKLFKRLRAFTWIEPIHETVNLNPVIFDSDIEIHHCPQGNHSSRDFGVFERIIADKGVLSDRLMGMYLRELYKAGTEEELRRAEGFFEGALSSKRAEGKTLLCRQIIAVLLKIYRLADTPVKMLKVSLSEEATIPSAEMCMELGYFFMKKEDFQEAAEWFHRAGYDCESDIDVASSGTSALMALALCFRKLAKSPKVKALPQREYEIEHRRLMERATEYEQLARDWKPVEPKLIKEE

SEQ ID NO: 1799 - protein, 351 aa, Pseudoflavonifractor capillosus
MIVKNEEAVLGRCLESAAALVDEIVIVDTGSTDATKEIARKFTDKLFDFPWVDDFAAARNFSFDRASGDYCMWLDADDVIAEPDRARFRAMREQLLPEADVVMMPYHTAFDSHGHPTFTYYRERVVRNEVRFRWAGAVHEAITPAGEIRWSDAAVSHKKAGAGDPDRNLRIYESQLAAGKVLDPRNQFYYARELWYHSRFEEAAKVLIAFLDSGKGWLENQIEACRLLSQCMTALGRDGDALSSLLRSLTLDTPRAEVCCDIGGWFLARKQWRQAAFWYELALTRKRNDTSGAFVSPDCYGYLPAIQLCVCLYHLGDVEKAKAFNELAASFRPEDPFVLQNRTFFSSLSFS

SEQ ID NO: 1800 - protein, 631 aa, Psychrobacillus sp.
MLINNRTLSLCMIVKNEEERLEKCLTSVKDYVDEIIIVDTGSTDGTLEIAKRFTEKLFTFNWTNNFSDARNYSIAQATSEYILIMDADEYIKEAPELKRYLKGKADCFLFNIKNHLSNGGSYTHQAYRMFKKATGLSYEGKLHEHINIDHFPEVITREIPIVIHHDGYLEGVLNDKNKKIRNIKIIEVESKEHPTAYNLYNLARAQFDLGMYEKAQHNFKKSYQLDNSKSYLPDLLNKLALSLMELRRFDDGLKVISSAITLFQNQSQLWLTKGLIYFYYGYFQDAEMMFKHCLNIVEYGYEITEGTGSYIPKLKLSEVYEERGDLLKSFEEIVEVIQEHKHYAPALVRYFEVVKKTGIPKSDIVNTLNAIYPINNDRDLNTLLISLYNTRNPLLKYYIDEYSLNVNGRIQAVAETLNNNYEYPFEFWSQLDIIPQVNYLDVISLCYVRRDDSLVDKLTSLKLNKKDKSTLKRLIKRDSITQKELSNLLLEYLVNINMRLIDMMELDDFDYIYSKYLANNQQQSIRILFAKELFEAGHVNMAETVSLNLLSSYPNSKEGLKLLADCYVRLNRYEDAINTYKRALKYGNSLSIYEKLYFLYEETGNSVEKEALLTEMKLKYSLSDWLNQLSD

SEQ ID NO: 1801 - protein, 589 aa, Clostridium tetanomorphum
MISLCMIVKNEEDNLDRCLKSIEGIVDQIIIVDTGSTDSTVNIAQKYTDEIYYYKWDNDFSAARNFSLEKAKGDWILLLDGDDEVPEEYKNKILELTSNKNIEGYFFKTINFLNSSYNNKDVIVNSNFRLFQNKPFYRFSGRIHEQLASNIKKICPEAILKTEDIEIYHYGYLQENVEKKNKRQRNLKILEEEIKASPNDPFTEFNLASEYYSLRQYDKAIPLYIKAMTNCSPNLAYYTKIIIRLTLCFIETKLYEKAYDCINTGLKYYNKLSDFYYLRSLIHLNLSKPTLAIDDLNKCIEYGEPPQEIAFFSGVGSYLSYERLANIYSSLEDYEKCLDCCYKTLNYNSNINIIYLLVHCLYKLNLDKNYIRNTLNKLFGNNLSNSASIISHILVCEKDYALALEYCNVGLNSKKDDKLFYLKGLCEFKLFNFNGCLNSFSNIVSDAYKEESLLFKFLSYIKLNKEDEISNLLNEKSKVTDICKCYYLLINSKEVNDITDDENESIIYSKIIFKLLDILLEFEEYDNFEKALELLNLINDNTLLLKLGKLYFKYEKYNLSMKELLRSINLMNVMDGEGANILNKLYLRM

SEQ ID NO: 1802 - protein, 697 aa, Desulfosporosinus sp.
MRKLTLSICMMIKNEEINLRRCLESLKPLMKEVSSELIIVDTGSTDNSVEIVKEYTDKLFFHPWNNDFAAMRNTTIGYATGEWVLIIDADEELENYKGIVEFVKAKHGKSVGGALMTVINITGRKNERLPLMSARVFRRAADFCYSGVIHNQPHVKGQLLPTEASLLHYGYMTTDSELMNKKFQRTSLLLKKELEKDPENFYYRYQLAVTYSMYGDNKQALHEILKAYHLINRDEALLKQNIYILGAVVQFYVAAGYYDEEVVTIALKTLEMQPEYVDVIFFLAQTYALREEFEKSYQYYDRYLLLVENFAQLKIRYDISISHYTLNNTIEAHFNMATMSIKVGELERAKKHTAILMNSEMKNEEFRGSVYKMIVQLDYALGSFAENYQFYQSVIKAGDELTAAVVEDAETRWQGASIEVRDAYSSMFAELPDLYGTLNRVRLGRSTVADLAKEIFRKDPNQMQPYFSLTLFALMQDDLLCEIGGQLLTEQTILNFMKHLEDCHRQEFLNRSRQYVFSIELTGAVTYSKARLAKNIAKYLLFSGALDEQEYRQVFAVYLYSGSIYLQTLYNEIVFAKELVFDLKNVEEIYLLYMMLAERSKSDGSKSVQYLRKALEVYPDMSRGVEIILGSLSDKEDDGEMEQLTKQLLANVESLITAGQLEEALNMVNECETIIGGDVRLFAYKTLIIKKRHETIN

SEQ ID NO: 1803 - protein, 362 aa, Cohnella abietis
MANISLCMIVRNEEEVLARCLDSVKDLMDEIIIVDTGSTDRTKEIAIRYTDRIYDLEWTDDFAAARNYSFSLATQEYVMWLDADDFLREKDSEKLRELKQTLDPEIDSVVMEYHLAFDGYDNPIAMSRRNRIVKRSRQFTWYNPVHEYLFIEGNVYLTDIAVTHGRVHQNTKRNLHILEKIIEKNGSVEGRDVLYYANELADTDRLVEAVEQYRRFLESPVDFFEDNLMACARLSACYHQLGNYELKLQALLQSMAYDIPRADFCCSIGQCFVDKEEFSKAIYWFKQAIAQDEVPNHFGVLNLICWTWYPHFQLCICYGMEGELELAYEHNEKALKYLPDDQNLLENKNKLEQALGMGGKPG

SEQ ID NO: 1804 - protein, 627 aa, Paenibacillus sp.
MTNTISLCMIVKDEESVLERCLDSVKEFVDEIIIVDTGSIDSTLDIARKYTDKIYSFEWINDFSAARNESIGYAASDYILVLDADEYLESGHELQKDLQEELDFYVFNIKNTTNQGTAFNHTAVRLFKNDFELYYENRLHEHLNIIDNHKNLISGTSNCLIVHSGYEDSNKLEEKKVNRNLPLMKLEVKENPTGYNLFNMGKTYFGLHDYMKAIEFFKRAYPLSKDRMYLPELLTKLAYSLAEIGQSDEALNILRDATSIYPNETEMKYIQGVIYKNAGYYKDAEVCFLRCLELGDQGTAVTEGSGSFRAHLELSELYELQGDLNESYKKKKQAMETKSSLEIIFNYLEFTLRMNQPADEIIQNIEKFYKMDNIQDLQNLMNMLYGLRHPLLHYYLEKFKIEADAHINVAAMIYSKDRQVMKRALDQSGDITKEENGDDLLLLAYVFKEINLITQLQPLMNLGNKELKGIRMLFEGKALPSSMSVSLERALFVLCEKLIIIEEFDLFQELAEKLMESKQNYKITLSNLLKKYNFDELAIDMLTTLYNNKNNNIEVMQLLGDLCFRNNYLEDAAFFYDYLKENNPTYQNYERYFDLTKNSNDQSETMQLQKEISKRYPTALWVGNIKN

SEQ ID NO: 1805 - protein, 597 aa, Clostridium sp.
MGHDISLCMIVKNEEENLERCLKSVQDLVDEIIVVDTGSTDRTVEIAEKYGAKIYYFEWCNDFSAARNESLKYASKDWILIMDGDDEFCSEDKEKFKSLIEKNLNEDTIYFFETLNYSGYSVTTTDITINLNPRLFKNNYGFHYEGEVHNQLVNYEKDVKGKTYDIRIYHYGYLNKNIVSKDKRNRNITLLKEQIKKGEDTKFAYFNLGNEYFALNDKKSALDNYYKSYNNFDPSTGYASRLIERIVISNYSLKNYDKALEFIEIGTRYYPEFTDLYYLKGLIFKDKNSPLIAIKAFEKCIEIGEPPSVLKSIYGVGGFRANYELSKIYMDLKDYDTAYKYSVDTIKSKPDFLVPLYNICHILKEKNFNIEDMKKILENFFTDFPREYPIIADLFYMEGYYDTALEYINKSEKAGTLSDDLKIFKVKSLLYSCKVNECIEYIDTIEEKNLYYFQIMMYKALCFIIKDKYDLAIVSINQFNKSNLSEYNKTTLKVYKEMMNLFTNKNNNVLSDDKTMLDFTPIILQVCEFMLINKEFNKFEKTLNLLNLISDQSVLLNLGKLYFKYGYEEMAKKEVIRSIQMFEVIDKEGVNILESLL

SEQ ID NO: 1806 - protein, 300 aa, Unknown
  Description of Unknown: Candidatus Curtissbacteria bacterium GW2011_GWA1_41_11 sequence
MATISVVISALNASQTLPRTLASVRWADEIIVIDNESTDDTVAIAKKFKAKILTKENNPMLNVNKNFGFTKAKSEWILSLDSDEEIPEGLAAEIKIAIGATDTAGYWIPRKNIIFRRWIRHGLWWPDKQLRLFRRGSGKFPGKHVHEYLEVVGITGELNEPYIHYNYSSISQFIGKMDTIYTESEVAKHIQSGYQISWMDALRFPISDFIKIFFAQSGYKDGLHGLVLAILQAFYSFIVFAKLWERSKFVDIELNFPIVTRELHDRGKEIEYWTKTVEIETELNPLARVWKRFVRKLYAS

SEQ ID NO: 1807 - protein, 240 aa, Unknown
  Description of Unknown: Candidatus Berkelbacteria bacterium CG_4_8_14_3_um_filter_33 _6 sequence
MEINANSNQKNMNLPITVIVLTKNEELHIKRFLDKIAFVVEQVFIIDSYSNDETLAIARKYKKIKIFQQKFENYATQFNWALKNCPIKTEWVLRLDADEYLENKLVKYLKNNLLKINQDVNGIYFRRKVIFRNQWIRFGGFYPTWLLRLFRYQKAVCETRHMDEHIKILDGTTMRVKKDIVDYNLNSLSFWTQKHDWYATREAVDYLLNIKKPEQTRYGGSQQDQKRRWLKNRLYNRAPL

SEQ ID NO: 1808 - protein, 252 aa, Unknown
  Description of Unknown: Bacteroidetes bacterium sequence
MNNLSVAIITFNEEKNIERCLNSVKNIADEILVVDSFSTDNTEDICKKFNVNFIKNKFSGHIQQKEFAKNTAKYDYVLSLDADELLDEELIHSIKLIKSNLTFDGYEMNRLNNYCGKWIKHGSWYPDKKIRLVNKHKASWQGKNPHDSLKLINRTSPGKLKGNILHFSYSSIEEHINQTNKFTTISAEVLFKEEKSINFFKIFLSTFGSFFKGFFLKLAFLDGFYGITICLINTFATWLKYTKLRQLIKDSK

SEQ ID NO: 1809 - protein, 276 aa, Unknown
  Description of Unknown: Candidatus Giovannonibacteria bacterium GW2011_GWA1_44_25 sequence
MNKIPCSIGILTLNSGRTLRRCLDSVKDFAEIVICDGNSTDNTLDVAREYGAKIVKQYDSDEPNLRCVKDKANVRQRNMDAASYDWYFFMDSDDALSRGVIEEIQKITADPTLQFFVYRMPTRLFLDGMEIKHEASYPSYQTRLINRKIKPYFKGKVHDRLVFDEEKYKVGALNSFYDFHWPKERVQNYWKYQKMYANWEADTAGGGPWGGFFYWCVYKRLRIIAGYLYRIPKMYLLYGFKDSMPPRIQLLTLWQHFYIMYLLIKKQILYVRDKRI

SEQ ID NO: 1810 - protein, 261 aa, Unknown
  Description of Unknown: Candidatus Omnitrophica bacterium sequence
MDRLSVVIITKNGEKRIEQCLESIKWVDEIIIVDDYSQDNTVGICRKYTEKVYFRKLDSFSVQKQFGVNLATGEWVLILDSDEILSPGLEEEIKDILKKGSSYDGFFIWRKTFYLGKWIKHSGWYVPIVRLFRRTKGKLDSRFVHEKILVDGKIGYLTEPILHYSYQSIDQHIKKLSIFTTYDAKEVLRRKINITFGNAFWYLLIKPFLVFVKKFIILRGFMDGIEGFIISVFTGLSVFLTYTKVWEYQEKKRSVKDGISR

SEQ ID NO: 1811 - protein, 257 aa, Unknown
  Description of Unknown: Parcubacteria group bacterium CG1_02_37_51 sequence
MKSLSLLMITKNSGELIDSSLKSVLGLIDEIVIVDDYSSDNTRAIAKKYKAMIYKRSSENLGKQRAYGLSKCKGEWILMLDADEIISQELKNEIISVVCRQLSVVGNISGYYIPYQNHFLGKPINYGGENYRILRLFKRASTHITENVVHEHVIVNGKVGFLTHKIFHYSYRNLSQTYKKFADYARREAYRKLSQGERTSFKKLILYPIHMFWARYVKDRGFKDYGLRILLDIGFAYMEFLIYFLMLFDLKKYKKSD

SEQ ID NO: 1812 - protein, 262 aa, Acetonema longum
MYLSCLILVKNNARTIRYALESVKKYVDEVVIIESGSTDTTLDIAREYTDQIFFREWDNHYGNQRNFGLSKCHGQWVFLLDSDEFVGENFGKVVSLLNNRYRTIAIPRYQIINLAKMLQITTRPHWFDWQTRLIKNDGTIRYEDKPVHEALANYRPRLRCNLANIFHLDFVVNDYSSRQQKVNYYERQYPGAGYPRMYLFEDFPYKTACVLEMPEPHVLELLRQNKEFLSYPDHSSIMTELQQKFQYHTRSLLTKARSAWGI

SEQ ID NO: 1813 - protein, 658 aa, Pelotomaculum propionicicum
MESKISLCMIVKDEAQNLKRCLNSVAGCVDEIIIVDTGSTDGTREVAREFGALVRAFPWNENFSEARNASLELATGEWILYLDADEVLAEESREELRRLAKDDNVEGYFIKIVNYLGSEGWVETCPDLVFRFFRNRREYRFHGAIHEQIADVILENSKKANYKVAEEIVIIHYGYLDRQIEEKNKKSRNLKIIQKELEQESDNRLLRYHYGVELFRAKRYAEAAEEFIKAANGIDPKTIYLPKLLRYVVISYQSAGLPEKALDVARLGLQFFADYADLYYYSGVLCLELKQYVLAGEYFQKAVSMPEQPAQYASFSGVRGFRAFYNLGQISEIFLNYEEALRHYILCLRDNPDFTPALENIIRILEPRKNPEYTKECLEKIFEFCTPRSRLILGEIYFRQGAYALALECLEGAAENMLLSPEARLWKAICLIQERRYLEALRIIDTYTRESSFYPLAKLNELLCFWVQGKKRKVRSISLELYALGLASDTENVIALFLDTPDKHKKSYKVTLGTDGVSLLLEIIARLLYLTEIERAMKLLNKIEPDSFSGCRLKISRLFYDYGYMEKAEALLREHLTSNQEAEAHFLLGEIYQKNGNYVEAEQHYRYALEKEPDHPRYYICLIHLYENLRKEILLEAVEKYPDSEVFKQLLEEARNNL

SEQ ID NO: 1814 - protein, 253 aa, Unknown
  Description of Unknown: Candidatus Pacebacteria bacterium GW2011_GWB1_47_8 sequence
MKTSSVPVSVIILTHRSDERFVRALASAQPAKEVLIVDFNSNNDWHQLQKQFHFKYTNQPTQIRNFSTERNRALQRAHHEWVFFLDSDEVIRGDSWGEIEHIIRSSEFDGVYVRRRDLFHGKMLRHGETGSTWVLRLMKKSASQFTRPVHEIAQVKGKTARSKIVLLHNAHLSLTEFLTDITQYAKLEAEYQTDAKLPLSLLGVKTVLYPKLKFLVNYFLKLGFLDGWRGVAYAVMMSLHSLFVRVFAYENRQ

SEQ ID NO: 1815 - protein, 364 aa, Bacillus foraminis
MVSVSLCMIVRNEEEVLERCLQSVCELVDEIVIVDTGSEDETVNIARNYTDKVYFFEWCDDFSKARNYAFSKATKEYIFFMDADDLLPESEQLKFKHLKETLDPSVDIVSMYTTMAFDPQGNPAFQYRRNRFVKRSRGYKWIGPVHEYLEVYGKTVYSDIGVSHIGSVKSEFAVKSTRNLDIYQKRLERGEIFTPRDLFYYANELREHQKYEESISQYESFLVCEDGWIEDQIKAYEYMSFCYGQLGKQEERLRSLLSCLEITEPRPKTACMIGDCLLEKGKLQAAAFWFKTATEFKRYIEDPSFYEPAYHTWYPHLQLVVCQWGLGNIEESVRHNDLAAQSLPNDPKVLYNKEFFNTLKEKSE

SEQ ID NO: 1816 - protein, 257 aa, Prevotella copri
MSNNKISVVINTYNASQHLARVLETVKDFDEIVICDMESTDDTCDIAKRYGCKIVVFPRGNYQICEPARQTAIDAASHKWVFVVDADELVPMQLKDYLYGLIAHEDVAQGYYVPRKSKFMGRFMHCFYPDYQLRFFIKEGTVWPAIIHADPIIQGRIDKLPSNNENLAFVHLADDSISSRMAKINQYTESEIEKKKDRNYGIGALFYRPFVRFFRAYIQKGGFRDGIEGFICACYEGIYQFVAVSKILEDRNRKNEK

SEQ ID NO: 1817 - protein, 255 aa, Unknown
  Description of Unknown: bacterium TMED264 sequence
MKISILIPTFNCESTIERTLDSVKWADQIIIIDSYSTDNTLNIIKSFDVILYQNHYINSANQKNWALKYCENEWVLQIDSDEVLEPNSENIFRNSIKNANYNVHCFMMPRRNHVLGKWLKNGGLYPDWQNRLFRTKFSKWDEKDVHSKIKVTGQIKKINTPIIHHGMPNLSKQLSNLNRYTRYETDYLIRKGKKYSFFKMLTGPFFVFVYRYFYLRGFLDGWRGFFHATYIAIYYFIIQCKLYEISILKLKKSPE

SEQ ID NO: 1818 - protein, 267 aa, Unknown
  Description of Unknown: Candidatus Gottesmanbacteria bacterium GW2011_GWA2_43_14 sequence
MSIAFNKDEKNIDLIIIVHNEEKNILNIVNKTYYDNLIILDSFSDDSTIEKLKLFKNKLYFKKFNDFSSQRNYALSKSNLNWILVLDADEELTEGAEKRIRELVKNKNVDGYWFPRRNYINDKTYLKYGYFYPDWQLRLFRNHRGYKYSGVIHAQIQIPEKKTRFIKDVEILHSSLRSKYSSWLAFFRLKNYINIEGNDIVKSERTTVTLFSGIILETARHFFRCFYRKQGYLDGYNGFRAAVIYGMYQGSIQMYAFFIRLRKVFIR

SEQ ID NO: 1819 - protein, 263 aa, Unknown
  Description of Unknown: Parcubacteria group bacterium GW2011_GWB1_52_7 sequence
MEKAPVSVEILTFNNEMTIEATLKSVLLFDEILVIDGGSTDRTLDIARHYGAKILAQDEKAKLDGRIADFSLVRNQGLGVAKHRWFLFIDSDEMLTPELAAEIRGIAAAEQPLFYAWNVPRKYVLKGAVIDCATTYPNMQMRFFHREHVGTFVKQVHERVLPNPGETVGALKHHMLVPLPPQRALWEKWQRYLTIEEKRWQGVSRRGLLVKIFNALKPIALYFVRLPWVLFCGGRRMPMFYEIAYQRYNLSVLLRLVRHFLWN

SEQ ID NO: 1820 - protein, 675 aa, Paenibacillus ferrarius
MSTVGIHIIMKDESEWLRQCLESVKDAEEIIVIDTGSQDSSIRIAKSYGAKVFFSRWEDDFSTPRNQALQIATTDWVFYLDADEILLSGLAAIKEQIDSSDSEAFTVILENLIGTSLQDHLLHRSIRLFRNNPNYRFQGIIHEDIGTSIVKLHPSSSIKDSEIRIRHFGYMPENIRKKDKIARNERLLQKALQTEPANPYYSYNLGITFCQSGKLNEAKDAMIQALMLARDDAPYRATLVKDLSKILLELREIKQVELLLLKETERYEDYPDLHYILGQSFQIQGLWEQAYEQFRKASTLQNNKYVTEAGASSFLVFYKMGEITQNLGSLEESARLFNQTLQHHSTYAPALLGISEVFHELDVPWHEIAALLKVKVHPSIPSEHYLLLDTLVQVGAFEEAIAITPISYLTDSLFLKNYCLALIHLGHLKEADHLLQNYIKEHPVSLELEILLQWRAICNWQLDESLQTDFFASLPEHLITLYQPINEFLSTGHMSTEFDNNSLSELATSITRQSIVLGQMQLIDKLYKLTGQFKLELTKMLYGYGYILTAAEHLISLSIVNQLDDEGLFDLGEILFDKGHYLKAAEMFESILLAERTYEKAKTAAAICYLHLAEASLSDALSVAPGAPSFKEDLQQIRSSIRLLNRTGWHTQWYGRQRRIFDGQKYDFAMHDRKE

SEQ ID NO: 1821 - protein, 255 aa, Unknown
  Description of Unknown: Candidatus Gottesmanbacteria bacterium GW2011_GWA1_34_13 sequence
MNETPISVVILTANEADNIQRAIKSVVWANEVILIDNSSDNTAELAKNIISDDRLQVINNNETENFSNLRNLGLTLAKNEWVLYLDADEEITVQLKEEIKTAINEKNYNGFFIKRQDYFLGKILKYGETGNQYLLKLGKKNSGNWIRRVHEVWQLKGDIGKLNNPLMHYPHPTIAEFLERINRWTTLNAQEFNKQNIKSDFFKIFLYPLGKFILNYFIKLGFLDGMSGLIMALMMSMHSFLTRAKLYQLQNKRPL

SEQ ID NO: 1822 - protein, 306 aa, Klebsiella pneumoniae
MNKPNLTVIILTKNEQLHLRRCLNSVINFCERIVIVDSFSDDNTLEIIKEYPGIVELYQHKFINHANQFQWGLDNSGVTTDWVMRLDADEYIESELQAEIQNKLNLIDKNKNCIFIRRKYFYKGKWIKHGAVYPLNLLRIWRNGQGRIEQRWMDEHIVVNNPQPEFFKGHIVDYNLNDMKWWIEKHIKYADREVVDLLNIKYQLFNRDEDVRKQGGFQARLKRKVKEDLYFKLSPSLRSLLYFLYRYFFRLGFLDGSKGWDFHLMQGLWYRSYVDIRYKELDALISDISSDREKLSVLSKSTGLSL

SEQ ID NO: 1823 - protein, 309 aa, Unknown
  Description of Unknown: Candidatus Berkelbacteria bacterium CG_4_10_14_0_2_um_filter_35 _9_33_12 sequence
MEINANSNQKNMNLPITVIVLTKNEELHIKRFLDKIAFVVEQVFIIDSYSNDETLAIARKYKKIKIFQQKFENYATQFNWALKNCPIKTEWVLRLDADEYLENKLVKYLKNNLLKINQDVNGIYFRRKVIFRNQWIRFGGFYPTWLLRLFRYQKAVCETRHMDEHIKILDGTTMRVKKDIVDYNLNSLSFWTQKHDWYATREAVDYLLNIKKPEQTRYGGSQQDQKRRWLKNRLYNRAPLFLRVYCYYFYRYLILLGFLDGLVGLQFHFLQCFWYRFLVDSKIYEIKKYQEKHRVGIIKVVKILYNYQI

SEQ ID NO: 1824 - protein, 251 aa, Unknown
  Description of Unknown: Bacteroidetes bacterium sequence
MSTKLSIIILTYNEADVLARTMQAAAQVADELVIVDSHSSDNTLNVAEKNGATKIEVRNFVNWADQRNWAMEQSKYPWVLFIDADEVLNEQLIQAILHWKKNLHTDEEDYWGLRRSHFFMGRAMRFSGLQSDVVVRLFHHTRRYNDCEVHEKINVPKPKPLPGVLEHYTYKNWDEWASKQRAYAKRSAKDHQDKTGRIGLYHTAAKPAFRFFKHFVLRLGFLDGRAGFWYSISMAQGVFWRYVELKKLRLS

SEQ ID NO: 1825 - protein, 253 aa, Unknown
  Description of Unknown: Flavobacteriales bacterium sequence
MRKVAAAIITFNEQKNIERCINGLLNCVDEIVVLDSYSTDRTKEICHQYKVRFIQEKWEGYAQTKNKLNDLIEADYIFSIDADEVPCKTLQSEILKLKELENDHVYILNRITNYCGQWIRHCGWYPEYKMRIFPKSKARWEGEFVHERLIFDKSLDVIHIKGHLEHYSYYNIKEHQERAKKYALLGAQQYYKQGKKSYFFQSSISALAKYVNILILKKGILDGKKGFQIAKISAAANYLKYEELKKLSRSKKE

SEQ ID NO: 1826 - protein, 308 aa, Bacteroides fragilis
MDIVHCIDNSYVAQCGVTITSVCVNNVNEVILFHILTTNLSIFNREMLKKIVDKYRQKIIFYNVDEYLLNKCPLREGDHVSLATYFRILMPDILPKSLNKVLYLDCDLVVCKNIKRLWDTDISTHSLGAVYDGGTDDIRTYNRLKYDIRQGYFNAGVLLVNLAYWREFHISNKLLKFIEQYPERLMFWDQDALNSVLIQTTKILPFKYNMLDAFYTKELALREEYLFEIEGALCDPTILHFSSPNKPWLKTCDHPLKSFFFEYLKRTSWNDKFPIYPFNMSLKSRLCLFLWNKGIVLSRKELKYRELS

SEQ ID NO: 1827 - protein, 232 aa, Pediococcus pentosaceus
MKNINVLLAADENYADQLQITIKTTLENLNKKTRVNFIVLSNNLSNSTKLALKKLAHGLHTVEYLDLDPSVFAFCPTNSHINKTAYYRILAPQLLAKRNIDRILYLDVDLLVRHDLTELYDAELNHNIVGAVIDTGQAFALNRLGVDPVVAANNIYFNSGILVIDIKKWNENHITEKTLNYIKHQSHLIIFHDQDALNAVLAGHVQMLHPKWNLQIRLFSENTVQLTKPTIN

SEQ ID NO: 1828 - protein, 549 aa, Pediococcus pentosaceus
MKNINVLLAADENYADQLQITIKTTLENLNKKTRVNFIVLSNNLSNSTKLALKKLAHGLHTVEYLDLDPSVFAFCPTNSHINKTAYYRILAPQLLAKRNIDRILYLDVDLLVRHDLTELYDAELNHNIVGAVIDTGQAFALNRLGVDPVVAANNIYFNSGILVIDIKKWNENHITEKTLNYIKHQSHLIIFHDQDALNAVLAGHVQMLHPKWNLQNSIVFRKHRPINEAYDQLINEAIKNPAIVHFTTHEKPWKTLSEHPYLDEYHEELNELEINRGVVNVISAANSSFVEALATSYISILENDSENQYNFYLLPDHLDQRDMLILGSVISRYDNASIKIVKVDEKLLENAVESDRILKSAYYRILAPELLPNINRAIYLDCDIIANTNLHDLWQTSLEGNVLAAVEDAGFHDRLEHMGITHDNSKYFNSGMMLIDLVSWRSQAVTQRVLDYINHHPEKLRFHDQDALNAILYDKWLHLHPKWNAQSNIVLDALVPPRTELLKLYAETRENPKLIHFCGHVKPWHAESKHPYTNVYLKYNKKLREPVRT

SEQ ID NO: 1829 - protein, 263 aa, Blastochloris viridis
MAASPLPVSIFLIAGNEADRIGRTLAAVKDLTDDLVVVESGSTDGTPAIAREYGARVVFNAWPGYGPQKRFAEELCRHRWVLNLDADEVMPPDLVAELRALFADGEPTCDAYEIPIAEVFPVESEPHRWAYWLAPVRLYRTDRGRYADSLVHDRVVLAKGARIGRLRGRVHHFSVRSLGEQIAKLNAYTDQQADDLDQRGVSLPTWRLFVEFPAAFFKAYVGRRHFVRGVYGVMTAANYAFFRHLRLAKHLERRMVRRARGGA

SEQ ID NO: 1830 - protein, 299 aa, Leptospira langatensis
MTETSKVRETPSPKKKKKKTEPQLSLDSNRERFLKKLSVAIITYNEEANIGDCIRSCRDIADEIIVLDSNSTDATKEISKSFPEVRFSSQNFKGHVEQKNDAISLCKNEWILSLDADERLSEELRSSLRDFLSSPDDPHCNGLKVSRLTFHMGRFIRFSGWYPQTKYRVIRKSKAVWAGENPHDYLVVQGKGKKVRGDILHYSFQDLSQQVDTINKFSSIVAWTRFNKKKRFSVLRTIIKPFGKFWEIYLFKFGFLDGFPGFAIAVSSAYSTFLKEAKVYELGKQLIDRPSNLRKDYGK

SEQ ID NO: 1831 - protein, 515 aa, Leptotrichia sp.
MKLSVGIITFNEENRIGKTIDAIKGIADEIIVVDSESRDRTVEIAKFKGAKVFVEKWKGYGPQKNSVLEKCCGEWILLLDADEVVSSELKEKIKMIINSSNPSSEVYKIKLRNIAFGRKIKFGGWDDYVIRLWKNGKVKISNREVHEKYQTKEKIEKINELIIHYTYDSIEEFLEKLNRYTSQSAKEYIKNKKNPSFIKIYSKMLFRFVKMYILQLGFLDGYEGYLLAKYSSIYTMTKYTKLREAYYNTLGKDTSLVITTYNWPDALKLCLESVLAQTVLPHEIIVADDGSREETANLVRDFQISNPFVKIIHSWQEDKGFRAGMSRNRAIAKATGNYVIIIDGDLILERHFVQDHIEKKENGFFIQGSRVIISKDKSQKIINGEKLNLWKNLFDKNFKNKLNMIRNSILSKILTKKDKNLKGIRSCNMSFFKKDLELVNGFEEKIEGWGREDSELALRLFNNGIKKKKLKFSALTYHIFHKENDRSHLKENDKLLSDAIKNKKMVAEKGLNQYD

SEQ ID NO: 1832 - protein, 261 aa, Unknown
  Description of Unknown: Alphaproteobacteria bacterium sequence
MHKISAYILAHNEAEKIADAVSSVLWADEVVVVDSGSSDRTAEIAQALGARVVQVEFRGFGDLRNQALANCRHDWIFSLDADERATAEARDEILALLASAPPHDAYLVPRRNYMMGRWIRGSGWYPNFRQPQLFRKECMRYRNEPVHEGYELLTTRPPGELRAAIWQFPFRNLDELIRKMNRYSSLGAAKLSDRHVSMAGALAHGAWAFIKHYIFKRGYRDGWAGFVIALGNFEGTFYRYAKRYEQTQSWSPPPSEPLRRP

SEQ ID NO: 1833 - protein, 517 aa, Helicobacter sp.
MCMQKISVCILVKNAQETLQECLESVRGFDEIILLDNGSTDSTLEIAREFQKSFGALRIESSKFLGFGALKHLAVSYARNDWVFVLDSDEVVESCVYQELESLEFARNHIYALARKNLYNKEWIKACGWSPDFVLRIFNKTYTRFNQNLVHESIIIPTDCQKLYLTSTIKHYAYRDIEHLLDKLQKYSTLWANEHIYNTKATPLKAYTRGLWSFIRNYFFKKGIAYGYKGFIISVCNSLGVFFKYMKLYELQKKPLSCSLVVTTYNQKERLALVLDSLKNLAVLPTEVVIADDGSTKDTRELIAKYQHDFPCKLQHVWQEDRGFQLSAIRNKAINQAQGEYIIVIDGDMILDSHFVDDYIKAARKGVFTQGSRVILDSKNTENILKSQDYRLAFQKKSLKSYKCHLLSKLIFSTSTLDSSVFDKQTLIKGVRGCSMGFFKQDFMRIGGFSQKFQSWGREDSEFVARFLFAGGEFRRLKFSAIAYHLYHDESPKGTLEANHALYLETIKNKSTFCKNS

SEQ ID NO: 1834 - protein, 301 aa, Mesorhizobium temperatum
MAIHVVILTLNESIHIARCIESCKNQVESVTVIDSGSTDGTIEIAEKLGAEVISHPWKNYATQLNFGLSALVTRGGWLMRIDADEVLDPATPCSLSETVSQVGDDCDGILVQRRIYFLGRRIRYGAIEPSWQLRLWRNGRGRCEQRWMDEHVIVSGNVQKSGVIISDINLNSLTWWTAKHNQYASREAIDLLNARFKFLRIDKLPASGSSPQARARRFLKEKVYLRTPAGVRTIAYFLYRYFVRLGFLDGRPGFYFHVLQGLWYRGLVDAKIFEIEELAKQKGVPIAKAIKDRTGFVVDEN

SEQ ID NO: 1835 - protein, 351 aa, Butyrivibrio sp.
MIAKNESKNIGKCIDSIMPLVKYFDGSEVVVVDTGSSDDTAEIAKSKGAVLYNFEWMGNFAEARNYACSKAVNDYILSVDCDEFLEDYSTELADKFMKTVMANPGKIGMSTIASTYVQNGEELRSRDKIGRFYNRKVYSFFGDIHENLRTIDRDDENGYFDLPLSFDHVGYDTPELRKSKAERNKKLLLKALNDNPEDPYVLFQIGKCCIAMEDYKEGTDYYEQVMEQTINPELSYIQDMMVSYGYGLMAQKRFPDALCLEGVTDLFEGNADYMFMMGLIYMNNALFDDATAAFLKATKAKIYSVEGVNSFKAYYNIGVIEEVRGNILKAKDFYKKCAGYRPANDRLKALG

SEQ ID NO: 1836 - protein, 285 aa, Unknown
  Description of Unknown: Oceanospirillales bacterium TMED91 sequence
  MOD_RES (174)..(174): Any amino acid
  MOD_RES (214)..(214): Any amino acid
MGVRVPPSVPNSQQRKDAPVSKVSCYIIAFNEANKIRPAIESVIEWADEVILCDSHSTDETASIAESLGARVVQIDFHGFGQLRNDAIAACQHEWIFSLDSDERCTPEARDEILSIVRKNEADGPVAYFMPRQNYLLGRWVKHSGWNPDYRQPQLFRQGHLSYTLEEVHEGFIXEGPIGHLTQSIWQFPFENLEQMLHKAQRYSTLGAQKLLRXQKRGGMGPALIHGLSMFLKIYLLKSGWRDGRAGFAIAIGGFIGAFYKYAKLAELQNDWTEPSMPKVGKPKS

SEQ ID NO: 1837 - protein, 255 aa, Rubinisphaera brasiliensis
MQTGSPPLISAAVICYNEEEYIGQCLESLRWCDQVVVVDSGSQDRTLEIAREFPNVEIDVRPFDNFINQKNHALDLCKHNWVVSLDADEVLIPELISEIQQLPFDKAGYRIGRRSFIGKQEIKHGTWSPDYQLRLFQKSLSRWGGTNPHETILIEGAVGHLKTRMLHYSYRTRQEYVERNTKYIHMMVDHLLSKGRTASVMEAYTHYVGNFIKAYFIRCGFLDGSTGLFLARKIAAGSFLKYRLLAERSRHTAQS

SEQ ID NO: 1838 - protein, 520 aa, Haemophilus haemoglobinophilus
MNLPITVTMLVKNAEKYLAQSLSALRDFPEIIVLDNGSTDRSVEIAKQFTNVKIYHSDFIGFGPMKNLVATYASYDWILNIDSDEILQPKLIEEISQINFDDSYKVYALLRINHYRGKPIKTCGWYPDFVKRLYNKKLVKFNDRQVHESLEIAENIQVVHLQHEFKHYSFDNSEALINKMQQYTTLFAEQQKYRKKGSVFSAVTHGISAFFKNYFLKKGILSGGDGFIISFANASGSYYKYIKLMEANQNLTTSLIITTYNRPDALEAVLASVLAQEILPNEVIIADDGSTEDTKKLIKKYQGIFPIPLKHAWQEDNGFRAAESRNRGLSMVESEYVIIIDGDMILHPQFIADHINAAEKNVFVQGSRVLLTQDKTTALLQFPEKYQSLKWYEKGLETRFEKRFTALHFPIVARMIQKNKQADSYKGIKSCNMAFFFSDALAINGFNNDFVGWGREDSEFAARFFNNGGKRKNLKFAGIAYHLWHQEKDRAALPDNDARLKQAIEDKLISCSNGLNQIKP

SEQ ID NO: 1839 - protein, 271 aa, Dyella sp.
MQTFPLTLVVITFNEANSIARCLDSVPFATEKLVIDSGSTDDTVAIAQAHGARVVHQDWLGFGAQRNFATTQCTHDWILALDADEYLSPELTAELEGRLAALMASNICAAYLRRATIFMGAPMRWYLPAMGEKMARLFHRDRARWADVRVHESLRFDGPSVTLKAAFNHENNPSLPQKQIKVLRYAELKCRDWLEKGKPVRMWQTPFVYLLAFIKDYVLRLGFLDGWRGFVIAETSASYAAYKRMRYYEMRRNPASVQHGADALIRHGIDR

SEQ ID NO: 1840 - protein, 256 aa, Hymenobacter sp.
MPAVPLSAVIITFNEEANIGRCLGALAGLADEVVVVDSGSTDRTVAICQEHGARVVVHPFAGYVAQKNFATAQARHNHVLQLDADEVLTEALRGEIRRVLAGWQHAGYSLPRLTNYCGHWVRHGGWYPDRKLRLYDRRLGAWQGQLLHERYEVQPGRTVGQLQADLLHYSYPTIESHVQQLNKFTTIGAEELAARGKRAGALQLWLKPVWKFWHLYLVRGGWLDGSAGLSIAALSAWGVFLKYAKLRVLTRKPATA

SEQ ID NO: 1841 - protein, 270 aa, Silanimonas lenta
MPALSVFVTTFNNARTLEACLASVAFADEIVVLDSGSRDETLEIARRHGARIEHQPFLGYGRQKQRALELCRHPWVLLLDADEALSPRAQAEVRALMAGAPEAAGYRFPRHEQRFWRMCHPGVRHNRFLRLFEAARGRISEEPVHAAPVVEGKVASLSGPLYHFGETSVRVKLAKVSAYAAGLVPAKRASGRRARPWMMLLYPPFVFLRAFLFKRLFLDGWAGFIAAVVMAQYAFLKHALWYEAESFEREAGRGMPEGAPPPPPPEHGRG

SEQ ID NO: 1842 - protein, 252 aa, Winogradskyella aurantia
MLKLSGVIITYNEERNIAECLASLINVVDEIIVVDSYSTDGTKAICQRFDATFIEQKFLGYIEQKNFALSQASYNHIVSLDGDEALSNTLQQSILDLKKNWSYDGYYCNRLNNFCGQWIKHSDWYPNKKLRVFDRRKGHWQGLNPHDYVALNEANTKIGHLKGDILHKTYQSYSEFNKKTEYFSTIAAQAYFDNGKKASVWKIIWNPTWAFFKSYILRLGFLDGFNGLVICVQTANITFLKYIKLRELYRQS

SEQ ID NO: 1843 - protein, 271 aa, Pseudoxanthomonas sp.
MPLLPVSLVVITHNEASNIARCLDSAPFVADKLIVDSGSTDDTIAIAQAHGARVVHQAWMGFGPQRNFASTHAAHDWILVLDADEFLSPDLAADLQRDLPGLMASGKAGAWLRRRTWLMGAPMRWYRPMVGERMARFYHRGRARWTDARVHESLRFDGEAAEFKAPFNHADNPSLAHKQLKVLRYSELKALDWRDKRRPVRMWLTPLVYLSAFFKDYVLRLACLDGWRGFIIAQTAASYAVYKRMRYYEMQRNPASIDAAHAKLAQHGLEH

SEQ ID NO: 1844 - protein, 254 aa, Mizugakiibacter sediminis
MSGAREPLSVVVITYNNADTLERCLAAVDWAEEIVVLDSGSSDATVEIARRHGARVAVHPFDDYGPQKQRAIGMATHDWVLNLDADEVLSPGTRAVIERALTAPRAAGYRLPRRERMFWTVQHRCSWRNAHLRLFDRRRGRMNDVPVHAAVEVDGPVRTLWRADFVNDGDGDIATRVDKINRYSSGMVAHKLARRQRFTGLRMVFYPPLFFLRQFLLKRYFLNGWAGFVASAIGAFYVFLKYAKLHEARRLGRR

SEQ ID NO: 1845 - protein, 268 aa, Methylomonas koyamae
MTETSAACVRTGPRPKLSVYIIAYNEADKIAAAVESVLWADEVLVLDSNSSDGTATIAAELGATVRQIPFTTFGKLRNDAIAACSHDWVFSLDADERCTPDAKAEIERILSAPDADVYYVPRRNWFMGRWIEHCGWYPDYRQPQLFRKQAMVFDDQAEVHEGFTVNGKIGYFDSAIIQVPFLNLEQLLHKMQRYSTLGARKLERAGKRPTMATALLHGVWAFFRIYVLKLGFLDGWAGFVLALGNFEGTFYRYAKAATANLKWTPDQH

SEQ ID NO: 1846 - protein, 255 aa, Hyunsoonleella jejuensis
MIKLSGVIITFNEEKNIEACLKSLKNVVDEIIVIDSFSTDNTKDICSKYEVTFIEQRFLGYIEQKNFALKKAKYDHVVSLDGDEALSEALQKSIIKLKSNWKLDGYYCNRFNNFCGQWIKHSDWYPNKKLRVFDRRKAKWQGINPHDNVVLSNKNTRVGFLKGDILHQTYQTYSEFNKKTEYFSTIAAQAYFDKGKTSNFFKMIFNPTWAFFKSYFLRLGILDGVNGFVICVQTANITFLKYTKLWELQRKANST

SEQ ID NO: 1847 - protein, 309 aa, Mesorhizobium sp.
MSNKGKIAVGIHVVILTLNESVHIARCIESCKDQVESITVIDSGSTDGTVEIAEKLGAEVVRHPWVNYATQLNFGISTLVAKGGWLLRIDADEVLHPAAPCRLSEAVSQAGGDCDGILVQRRIYFLGRRIKYGAIEPSWQLRLWRNGQGRCEQRWMDEHVIVNGNVQKSDIIISDINLNSLTWWSTKHNQYASREAIDLLNARFAFLKADKLPASGASPQARARRFLKEKFYLRTPAGVRTIAYFLYRYVIRLGFLDGRPGFYFHLLQGLWYRSLVDAKIFEIEELAKKKGISIASAIKDRTGFVVDES

SEQ ID NO: 1848 - protein, 236 aa, Rhodanobacter sp.
MPSLPLTLVVITRNEAAKIARCLDSVPFAAEKLVVDSGSTDDTVAIAQAHGARVIHQDWLGFGPQRNFATTQCRNDWMLALDADEYLSPELAEEMQQQLPALMAGDLAAASLRRHTLYMGQPMRWYRPAMGEKMARLYHRNRARWSDARVHESLRFDGRSITFKAPFLHDNNPSLVEKQLKVLLYSELKCRDWLDRNKPVRMWQTPFVFALAFLKDYVFRLGFLDGWRGYTIAQTA

SEQ ID NO: 1849 - protein, 391 aa, Cyanothece sp.
MNADAAHGRRPLLSLCMIVKNESANLPRCLSSARSHVDEMIVVDTGSEDDTVEVARQYGARVSFFDWCDDFAAARNAALDQARGEWILVLDGDEELSLTIDLRQLLQDSVGVLSYLTLFVNVYDGDRSKSVGVVRRLFRNLPGVRYIGRFHEQVIYPGEERGLGTNISTELIKILHYGYAPEVWTDKLANRNIPILESLRTQGEASLMVLTCLADMYTAVGEQEKSQDCYQAAYDRLLPYLLAGECPPETILLRFLLQKLTWQALEAEDYETARLCLQNGLHWLPDYPPLSYLAGLNLFYLGFPRGAIAYFEECLSLYRENRYTRAESFETAYMTSHPAFSLGYSWMKLKEWQKAAEAFKLCLSFDPNYGPALERLAEISPHLNTQASEET

SEQ ID NO: 1850 - protein, 271 aa, Rhodanobacter sp.
MPTFPLTLVVITHNEADHIARCLDSVPFAAEKLVIDSGSDDATVAIARAHGARVIHQDWLGFGPQRNFATMQCGHDWILALDADEHLTPELVVELQQRLPGLMAGEAPAVWLRRSTIYMGRPMRWYRPAVGERLARLYHRDRARWSDARVHESLRFDGAAPTLRAPFNHLNNPTLAHKQLKVLRYAELKCRDWLDQGRPVRMWQTPLVFVLAFLKDYVFRLAMFDGWRGFMIAHTAASYAIYKRMRYYEMVNHRRSVADATEVLHQHRLDR

SEQ ID NO: 1851 - protein, 464 aa, Cafeteria roenbergensis
MEGTSVARDILVSVIIPVHNSSAYLDECLESVAAQTHRPVQVVAFDDCSTDDSLSKLAEWKARIDRLDGMSCVVLSGAAQGQTRARGAGFGRNRCVEASSGSVLAMLDSDDAMEPRRLELQLELLLAEEAKGGAVALPVSAWGPGEASAASSSAPAPQPGAAANGASSSSSSSSSSSSSAPCAAASDDARAASPPLVLVGAQVTRVPAGSTAKYTAWINEMPAAELWLQQYREVTLVQPTWMLRRAAFLAAGGYGFPEDLLFVHCLWAAGGRPARVDEPLVRYRCTPGSVSWNIPRRALLAVKAAAFEVRELGLPGPLGAEGVGGGHGWEQLTPESQARAVECAARAAAEAAAPARPLAGGFSVWSAGRDGSQFMASLSPEALALVRCAGDVDPKKIEARFVAVTPGFQPGAAVVKVPVIPVAEMEAPVVTCVVLTSGSEFEKGLGAWMRARGALRGADVIHMA

SEQ ID NO: 1852 - protein, 313 aa, Pseudomonas endophytica
MSQKGTIKNVSLTAIILTYNEELHLERALKSITGIAEEVFIIDSFSTDRTIEIALTYGATVLQNKFKNQAQQFQWALDNVSVRSTWILRLDADEIIEPDLSAEIYEKIPKLTDDIVGINFKRKHIFMDRWVKYGGRYPLVMLRIWRKGYGRIENRWMDEHIIISGGKSITFKGGFSDHNLNNLTFFIDKHNKYATREAIEILNQRLNLFSRDHSVTVKSTSLQTAAKFFIKEKIYNPIPFTISATLYFIWRYIFQLGFLDGRSGLIYHFLQGFWYRFLVGAKVMELEHSISHLKDKKLIIEEISRITGHSLSE

SEQ ID NO: 1853 - protein, 302 aa, Chitinophaga sp.
MSIAVIILTYNEAKHIGRCLKSMRQITDEIYIIDAFSTDGTVAIAQGFGAKVLQHVWVNYAQQFQWGLDNCGSNAAWVMRMDADEYLEPALIQEINARITQMPEEVSGIYIRRKVLFKGKWIRYGGFYPHTLLRIWRNKIGSIEQRWMDEHIVLSEGKTVLFKEHIVDYNLNEIHWWVNKHNNYAIREMVDLLNIKYGLLHADKRLLEGEGTQAKTKRFLKEKVYAALSPGMRASFYFMYRYILRVGFMDGYYGFIFHFMQGYWYRLLVDVNLKEFELKLKGDTRKENMIALLKNDYNIVLQ

SEQ ID NO: 1854 - protein, 253 aa, Thiothrix caldifontis
MIKMSGLVITYNEAGNIQACLESLFKVCDDVVVVDSLSSDDTVTIAKAAGAKVYSQVFLGYGPQKNYGLQFCQHAWVLSLDADERLEADAIAEIQGLNLADSPYDAYEFRRKNLFHGKWIRCVSWYPDHVRRLFNREKTRFSDAACHEAIQSQQYQQLHSHIVHTSFVDYSQMLQKLDEYTNQYAAANMHRKRVSAFAPPLHGLFAFFKHYLFRRGFLCGFDGFTIALLNALGSYFKYAKLLEKQRYGSGALS

SEQ ID NO: 1855 - protein, 289 aa, Leptospira borgpetersenii
MGKSIPVKKKKAPEKRKTLPQTMGKKLSVAIITYNEERNIRDCIESCLNVADEIVILDSISTDKTEKISKSFPSVRFYKQRFKGHVEQKNDAISLCRHEWILSLDADERISPELENSILTFKQKPDEDILSGLQVSRLTYHLGRLIRYSGWYPQYRYRIFRKGKAVWVGENPHDTISIQGKGDKIYGDIIHYSFRDLTHQVNTINQFSSIVAYTRQRKGRRFSFFRTIYKPFSKFIETYFFKFGFLDGFPGWVIAVSSAYSTFLKDAKQYELEKKMIERPSNVKEGYGR

SEQ ID NO: 1856 - protein, 287 aa, Rhodanobacter denitrificans
MTAFLPDPGALASGPTTLPISLVVLTYNEAHNIARCLDSVPFAAEKLVVDCGSTDATVAIAAEHGARVVHQPWLGFGAQRNAAAALARHDWLLVLDADEFLSPELVAECRERLPAWLAGSVAAVGLRRHGLFMAAPMHHYRPLRGERKLRLYHRDRARWTEARVHESLRARGPTAMLDAPLHHRTTPSLLHKQMKSVFYAELKATDRHAAGKRPWIALTPLIFVATFLKEYLLRLAVLDGARGYISAHLSANAAVYRRFRLYEMQRNPASIAQARDWLIAHDLERDA

SEQ ID NO: 1857 - protein, 245 aa, Unknown
  Description of Unknown: Candidatus Aerophobetes bacterium sequence
MISVTILTKNSSATLLPVLQSTASFNEVVLIDTGSTDDTLDIAKVFCNVKIYKRPFKAFGALRIEAAQLASHDWVLALDSDEVLTPELAREILELNLDPSTIYGFSFHNFFKNKRIRHCGWSPDKHLRLYNKLSTNFSNANVHECIEKKNLKVKFLKFNVNHYSYQNMGDFLRKMQLYSDLFAQQHKSEKHSSFFKAWVHSFFAFFKTYILKLGFLDGKEGYIIAKYNSHVAWYKYLKLEEEGSS

SEQ ID NO: 1858 - protein, 264 aa, Curvibacter sp.
MPTISVYIIAFNEVEKVSAAIESVKWADEIILVDSYSTDGTAGVATKLGAKVVQVEFKGFGDLRNQAIQACSMEWIFSLDADERCTPEAAAEIKHLVASNGMHEVYHTPRRNYFMGRWIQHSGWYPNYRQPQLFRRGAMSYDLKPVHEGYVLHSKLPIGHMTSAIWQFPFKNMAEVMHKANRYSTLGAEKIQHKKISMWTALLHAKWAFWKHYLFKLGFLDGWAGLVIAIGNFEGTFYRYVKALEIQQGDAWRTPPQALKSSNE

SEQ ID NO: 1859 - protein, 272 aa, Pseudoxanthomonas dokdonensis
MDRLPITLIVITYNEAGNIGRCLDSVPFAAEKLVIDSNSTDATVAIAQAHGARVVQQPWLGFGPQRNFASTQSGHDWIIVLDADEFLSDELIAECAQKLPALLASAQSGAWLRRRTWFMGGPMRWYKPMVGERMARIYHRGRARWKDVPVHESLDFDRGSEEFRQPFNHLHNPTILHKELKVLRYAELKARGWQAKRKSQSMWQTPLVFVASFVKEYLLRLALLDGWRGFIIAQLSASYAVYKRMRYYEMQVNPASVELARQEMIKHGLERE

SEQ ID NO: 1860 - protein, 263 aa, Unknown
  Description of Unknown: Comamonadaceae bacterium PBBC2 sequence
MNNMPLPSLAIGILTKNESRLIGRCIESALFADEVIVLDSGSTDDTLDIAQKLGAKTFTSADWQGFAVQRNRLLEKVGSDYIFFLDADEVITPELKTELQSIVQSGASGVWKVRWTVVAYGHVLKHFKSNASMERLFPRALIDHYKGVVHEEAVLRGNGPVQRSVMKHRLLHHSRQSIRASLEKLTQYAMLGAAKRHAAGKRGGIGRGTLSALSSFLKTYILQGGFLDGGPGFLYCYFVALECFFRYVALKYDRDLLTEKVSR

SEQ ID NO: 1861 - protein, 252 aa, Thermithiobacillus tepidarius
MLALSVVYITRNAARCLRQSLASAKALAADLVLVDSGSTDETLNIAQDFGARIFQREWPGFGPQKQFAVEQARHDWVLVLDADEVLLPEAVPAIRAALAKERLPAGFRLPRRNFFHGKPIRFGDWGRDRVLRLVDRRQGRFSADAVHERWETAGPVADLHAPLAHYSFENYKAMLAKLDQYSDLNAAKLVARGRQVRPHEPLAHAMAAFFKGYVLRLGFLDGSEGAGIALTTALGSFMKYAKALEMQERNSR

SEQ ID NO: 1862 - protein, 261 aa, Unknown
  Description of Unknown: Rhodanobacteraceae bacterium Dysh456 sequence
MRREPLSVVVITFNNADTLDACLVAVDWAEEIVVLDSGSTDDTLAIARRHGARVAVHPFDDYGPQKQRAIDMATHDWILNLDADEILSPGTRAVIERALIAPRHAGFRLPRRERMFWTVQHRLSARNGHLRLFDRRRARMNDVEVHASVVADGPVKTLRAADFVNAGDADIASRVEKINRYSSGLVAHKLRRGQRFTGLRMVCYPPLFFLRQYLLKRYFLNGWAGFIASVTGAFYVFLKYAKLHEARRAVSTPGRRPAGGS

SEQ ID NO: 1863 - protein, 260 aa, Unknown
  Description of Unknown: Bacteroidetes bacterium sequence
MSLIILFCSMQKLSVVIVCKNGAKVIGETIKSFSGLTDDILIYDNGSTDGTKDIVRQSNARLVEGSWEGFGKTKNKANALARYDWIFSLDSDEAIDEELKENLLQEELADETKVFEFKFKNFLGDKWLRYGEWGDDKHIRLFNRMKIKWNDADVHESLLLPTDVEVISVPGYVLHKTAPDIATYEIKMESYAALNAEKYFKQQKGAGSFKMFFSAALSFIKNYFFKLGFLDGATGYHCARINARYTFLKYKKLNELWSKS

SEQ ID NO: 1864 - protein, 518 aa, Helicobacter pametensis
MKIVLSKISVTILAKNAQSTLRECLESVREFDEVILLDNKSTDQTQEIAKEFPNVKIYESEFIGFGALKNLAISYAKNDWILSLDSDEVLERALLEEIREMEFCKGKYYSFLRKNHYRGVWIKGCGWHPDWVKRIFYKHEIRFDDALVHEGLILGGCEEVRLRQGGILHYSFFNISDLLEKLQRYSSLWAMQNSHKSSSPFKAVMRGSWTFVRNYFFKRGFLYGYRGFVISVCNGLGAFFKYMKLYEESQATPKVSLIVTTYNQKERLALVLDSIKNQKVLPFEVLIADDGSTEDTKTMIEKYQKSFPIPIRHIWQEDLGYRLAQSRNQAILRANGEYLVIVDGDMILHPRFIEDHLAFATRGVFVQGGRILLDSKETDSVMQTKDLSAVLQKKSIKNHRLKCLSRLIFALSAKTKTHLRSDVILSVRGCNMAFYKQDAQRINGFNQAFRGWGREDSEFVARFLYAGGKMKKLKFRALAYHLHHEENSRDMLEENHQIYSNCLKHQKTWCDAGLQQME

SEQ ID NO: 1865 - protein, 297 aa, Leptospira fletcheri
MSEKKIESPRSTSKKRKKSNPATLVSSHPRFNKHLSVAVITYNEERNIGDCIRSCRDIAEEIVVLDSNSTDKTEEISRSFPEVKFRSQKFSGHVEQKNDAIALCKNEWILSLDADERLSDELKESLRIFLESPEDGALDGLKVARLTFHMGRFIRFSGWYPQTKYRIFRKSKARWTGENPHDYLVVDGKGKKISGDILHYSFRDLSHQVDTINKFSSIVAWTRFRKGKVFRLTRTIYKPFVKFWEIYLFKLGFLDGFPGFAIAVSSAYSTFLKEAKIYELSDHLIQRPSNLREDYGA

SEQ ID NO: 1866 - protein, 342 aa, Enterobacter ludwigii
MENGISVIIITRNEALTIGKALASVREFADQVVLVDTGSTDDTLRIAREHPQQPEIHQTPWQNDFSAVRNLAISLCKHAWCLVLDGDEYIDESCRPNVRRLIESKMGEDSGLLYAPLIDNLNGSLLRNNPRIFSRRETLRYTGRVHEYLRDSRGAGVACLHEIIIKHSGYLPDIYQQKNKYSRNKALLEMQISEEPDSFRWKYFHLRYMEIPSPEALSVLHEFGRLPMPFESDTEVYAFNAKSRLIQCLLEEGCWEEAQAQASELYRYYSDYDTTLLYIAATLRSARSVFENIIADCNEKLVKTSALMKHEYLHESTHPSLRDRLQDELTFLCSRLLNAEEK

SEQ ID NO: 1867 - protein, 270 aa, Unknown
  Description of Unknown: Planctomycetes bacterium sequence
MSSICCRVRRVRRERVPKSITGACRNYHPIPCSNRSPRCFAAGPFAPRECRQRIAHVGSLTTEREENAVMKPPITVLIPCKNEVHHIAACIASAKPIADEILIADSGSTDGTLELVRSLGDYRIIEREYVHSADFKNWAIPQAKNDWILVLDADERLTPELREEILTLFADGSPPQDGYRVRFAPYFLGRPIRHCGWNTTTSIRLFRRSVGRYSTRRVHADVIVESGKVGMLHHKIEHYTCTSLERWMEKRNRYTERGAEELFAAGRKVS

SEQ ID NO: 1868 - protein, 323 aa, Hydrogenophaga sp.
MRITAIILTHNESLHIERAIRSIQAFTDQICVVDSGSTDGTTGIAQRLGAEVCTHAFVNQARQFQWALDTLDIRGDWVLRLDADEIIEPDLAREIAEKLPRLPADVVGVNLKRKHIFMDRWVRHGGRYPLRLLRLWRQGHGRIENRWMDEHMVVWGGRTVTFDGGFADHNLKDLAYFIDKHNRYATREAIEVLNQRLGLFAQDGALNARGASHQAAFKRWAKERIYNRIPFTLSATLYFVWRYVFQRGFLDGRSGLVYHFLQGYWYRFLVGARVMELQQAVAHLHDKAAICAELSRLTGHKLVAQSDAPRDVDVGDQRLAPRH

SEQ ID NO: 1869 - protein, 276 aa, Methylomonas methanica
MTDSSPTDLPALPEKLSVYIIAYNEADKIADAIESVQWADEVLVLDSHSTDNTESIASELGATVKQIPFTTFGKLRNDAIASCQHDWIFSLDADERCTPEAKDEILKILATPDADAYYVPRRNWFMGRWINHCGWYPDYRQPQLFRKQALVFDDAAEVHEGYQVNGKVGYFKSSIIQIPFQNLEQLLHKMQRYSTLGARKLERSGKPVSMGTALGHGLWAFFRIYVLKLGFLDGWAGFVLAFGNLEGTFYRYAKAATAKQSWQPDNPPNSETGAPK

SEQ ID NO: 1870 - protein, 250 aa, Marinicella sediminis
MNKVSAVVTCFNSAKTIVKCLESLQWAEEIVVLDSFSEDDTVALVKQHPKVKFHQQSFKGFSEQKQDAINLATHDWVMLLDADECLTPASVKKMQRWKTREPKADGYNLPRIEWVFWHWAHPWVKRNEFIRLFNRTKAHMSRDLVHESIQVDGVVRKLYAPFKHYGETSIQVKLEKINRYSALAAQQKFDRGKRCSPFRLFLYPVFYFFRQYIIKRQVFNGVAGVINATLNSYYAYLKYARLYELQQKKD

SEQ ID NO: 1871 - protein, 271 aa, Dyella sp.
MQKLPLTLVVITHNEADNIARCLDSVPFAAEKLVIDSGSDDDTVAVAQAHGGRVVHQDWLGFGPQRNFASTQCSHDWILALDADEYLSPELATELEQRLPELMAGPGPAAILRRSTVYMGRPMRWYRPAVGEKMARLYHRDRARWTDARVHESLRFEGSAPTLDAPFNHANNPTLVHKQLKVLRYAELKCRDWLDKGKPVRMWQAPFVFLLAFVKDYVFRLAFLDGWRGFMIAQTAASYALYKRMRYYEMCNNPDSVRLASAALTRHGIDR

SEQ ID NO: 1872 - protein, 271 aa, Rhodanobacter sp.
MSTLPLTLAVITHNEAASIARCLDSVPFAAEKLVVDSGSDDDTVAIAQAHGARVIHQDWLGFGAQRNFASSQCRHEWILVLDADEYLSPELADELRQRLPVLMASDAPAAWLRRSTIYMGRPMRWYRPAVGERLARLYHRQRARWSDARVHESLRFEGAAPTLREPFNHINNPTLPHKQLKVLRYAELKCRDWLEKGKPVRMWQAPFVYLLAFLKDYVFRLAFLDGWRGFLVAQTAASYALYKRMRYYEMVNNPESVARAASLLTRHGIDR

SEQ ID NO: 1873 - protein, 253 aa, Desulfarculus sp.
MIKLSAAIIVRNEEANLPRWLAAVRPVAEEIVAVDSGSTDRTVEILEQAGARVARREWTGYADQRNYLADLCTGDWILMLDADEVLGPQSTESLLRFKAAPPAGCVAFALPSRVWYFGRWLRFGGFFPEWKVRLYKKGAARWVSDEVHERLQTAGARGRLPGLYDHYSYDSKADYRARSARYALAGARRMLAAGRRSGRVAGAWHAAWAFTYRYLIRLGFLDGKAGWWAAWLEAGYTWDKYARLADLRRGPKG

SEQ ID NO: 1874 - protein, 254 aa, Halomonas beimenensis
MIHGISAVIITRDAGPTLEQTLTALTPFDEVVVYDNGSTDDTREIASRFSNVRFHEGDFLGFGPTKRHAVSLAANDWILSLDADERPDDRLLQALRRWDTDPEANAAARIRRENLLLGHPVRHSGWGNDWLVRLFNRRYCNFNDAMVHESVALSGDTQCSRMEGKLIHLAVTDLSQFLEKVNRYSSLRAESSERTKHPAVIVAKALFAFVRTYGLRLGFLDGWRGLVIAFSNANGVFWKYMKAYAADHEKSQRP

SEQ ID NO: 1875 - protein, 304 aa, Unknown
  Description of Unknown: Flavobacterium chungangense sequence
MDKVSSLTAIILTYNEEIHLQRCLDSLKDVVKEVFIIDSYSTDSTREIAESNGAHFYQNPWVNYSLQFNWGIDNCSINTDWILRIDADEYLTPELQAEIKDNLPNLNTEISGIDVPLKRVFLNKHMKRGLGEIKMLRIFRKGKARLEDRWMDEHIEILEGTTVTFKNSFADHNLNNLSWWTAKHNSYSNREVVDLLDIEYNLINNNSHVKLSKQALMKRNLKIKYVKMPLFWRCFIYFIYRYFFRLGFLDGKEGFLWHFLQGWWYRTIVDAKIYEIKKECGTDVTKMIKYIKDIYKINLTADLK

SEQ ID NO: 1876 - protein, 271 aa, Dyella ginsengisoli
MRTLPLTLVVITHNEAHTIARCLDSVPFAAEKLVVDSGSDDDTVAIAGAHGARVVHQDWLGFGPQRNFATTQCAHEWILALDADESLSPDLVAEMERELPALMASDAPAAWLRRRTIYMGRPMRWYRPNVGEKLARLYHRDRARWTDARVHESLRFEGRAPTFTAPFDHANNPTLPHKQLKVLRYAELKCRDWLEKGKPVRMWQAPLVYLLAFLKDYVFRLAMLDGWRGFLIAQTAASYALYKRMRYYEMRQNPASVAEAEAVLKRHGVDR

SEQ ID NO: 1877 - protein, 261 aa, Unknown
  Description of Unknown: Bacteroidetes bacterium sequence
MELSAVLITYNEAHRLAPTLQALVGVADEIVIVDSGSTDNTQAIALSFPGVRWYERPFAGYGPQKNYANSLARGNYILSIDADEVLSPPLREAILAEKGRWRAAAYGMLRVAVYCGAFIRASDWYPDWKVRLFAKGAAEWDSAPLHERLVLAPGIKPLWLSGELWHYTYATVEEHLERNRHYARIAAQAAYAQGRRPAFGRALLKAGARFFKSLLLKGGWRLGWRGWSIAGIGAAAYFLQELYLAVLWDRPKAPWGKEGEN

SEQ ID NO: 1878 - protein, 260 aa, Prosthecobacter debontii
MPHPLSIAIISKNEEANLRRCLASAVDLAQEIIIVDSGSTDGTQAVAEEFGARFVSQAWLGFTDQKNLCNSLCTQPWILALDCDEELSPELRRSIESFFTDGSTEKYEAAWMARRVWFLGRWIRHGDWYPDKKVRLFRRDKGRWEGHASSQVHERLVVDGPHTTLEGDLYHYSFTSMGHYLDKHVGYTDVFAEHEQAEGRGWSLVHALFRPWWRFMRAYVLRRGFMDGFPGLWIAMSTAYFTFMRYSRAYEVKVRSNQPR

SEQ ID NO: 1879 - protein, 240 aa, Yokenella regensburgei
MVADDIVIVDSGSHDDTLRICASFGIKAHHHPYAMHGAQMNHAIAQAKNNWVLCMDSDEILDQSTVDAILALKAGETPPPENAWRLPRYWYVLGQEVRTLYPVSSPDFPVRLFNRRSASFNNRPVDDQVEGDIHTEILPGHVRHDTFYSLHEVFNKLNTYTTRLVKYNKIRPSIGRGVISAIGAFFKWYLFSGAWRRGKVGAVTGIYATFYSFLKYFKAWYQHQEQKKSVAETRTDSHLT

SEQ ID NO: 1880 - protein, 250 aa, Halomonas sp.
MPAGVSVVIITRNAASTLQNTLDAVQCFENVVIYDNGSSDDTFRIAASYPNVSLHQGDFIGFGPTKRHAVSLAKHDWILSLDADEVPSPELIESITTWVNNASPSDLGEILRENWMMGQPVHYSGWGNDWLIRLFDRRSHNFNNAMVHEAISVNSISRVQRLSGTIKHTAVTDLSQFLEKINRYSNIRAESGKLKHYSVLVIFFKAVFAFLRTYFLQQGWRDGWRGLVIAVSNANGVFWKYMKNFLKIKH

SEQ ID NO: 1881 - protein, 271 aa, Unknown
  Description of Unknown: Dyella sequence
MHTLPLTLVVMTYNEAKNIARCLDSVPFAAEKVVIDSGSTDDTVAIAQAHGARVVRQDWLGFGPQRNFATTQAGNDWILALDADEYLTPALAGEIAAKLPALMAGDTCAVWLRRATIYMGAPMRFYLPSMGEKMARLYHRDRARWADVRVHESLRFDGPAVTFQARFNHENNPSLPEKQIKVLRYAELKCRDWLEKDKPVRMWQTPFVFALAFLKDYLFRLAFLDGWRGYAIAQTAASYAVYKRMRYYEMRRNPASIESGAAALHRHGIDR

SEQ ID NO: 1882 - protein, 302 aa, Thermogutta terrifontis
MHRPPISVVIPCKDEEHHLAACVQSVLGWADEILIADSGSTDKTLAIAHDFCTAHPRLCRLIQREFISFGSFKGWAVNQCRHDWVLVLDADERMTPALRREIDKVLSKSDCPDAFLVGFDHYYLGYRIRHGAWNHKVVRLFRKSVANYDAGAIHEKVVVSTGRVGILQGRLEHWTCTCLDRWYQKKNRYSTVGALEKWKRGKRARLWDLTLRPITAFVKSFIVKMGFLDGMGGFLVAVDNAVTTFQTYLKLWAIAHPRTAELTRGSSAAENDAFAHLPKRSDVTFDTGIGADSSSRVELAHS

SEQ ID NO: 1883 - protein, 515 aa, Campylobacter sp.
MDFSKISVIIIVKNAESTLKECLNSLLCFDEIILVDNQSSDNTLKIAYEFKEKFSALHIKQSEFIGFGPLKNLALSYTTNDWVLSIDADEVLEKECIEELRKLELKEQNILALSRKNLYKGEWIKACGWWPDYVLRVFNKNFTKFNDNLVHESLILPPKALKIYLKNGFKHYAFNNISHLLDKMQRYSSLWAEQNMHKQSSVFLASLKGIWTFCRNYFFKKGFLYGYKGFIISVCNALGAFFKYMKLYEFSKEKPKTCALIITTYNEPKRLALVLDSVKNLSLIPDEVIIADDGSKEDTKNLIKGYQKKFPCPLKHSWQEDKGYRLSKNRNEAIKKAKSEYIIIIDGDMILEKDFIKDHLKFSQKNLFLQGSRTILNENESKKILEKKDFSLAFDKKGFKNKKNNLLAYFIYKFSKINKKIFKKKIIIKGIRGCNMSFYKSDWQAIGGFNENFVGWGREDSEFVARFLFNNGKFKRVKFSALAYHIYHKENTKNMLEINHQIYLDTIKNKKTDWR

SEQ ID NO: 1884 - protein, 537 aa, Neisseria dumasiana
MQTHKIPASAVMLVKNSERYLQEVLTALSDFDEVLLLDNGSTDRTLEIAARFGNVRVCKHEFTGFGPMKNLAASLAKHNWIFSIDSDEVPDAELIESIRDAVEHDDPQTVYTLSRLNHYNGRLIRACGWYPDILPRLYQRKYIQFSDRKVHESLVLPPQTNVRSLKGHLKHYSFQNAEGLIQKMQQYSTLYAEENRYKKDSSPFKALWHGAAAFIKNYLLKKGFLYGSDGLIISAANAQGSYYKYVKLYEHNRNMSVSLIITTYNRPDALALVLKSALAQTRLPQEIIIADDGSDRLTTEVVGKFTQASPVPVKHTWQKDDGFRAAESRNRAIAVATSDYLIIIDGDMVLDPSFIADHIVAAKKGRLIQGSRVILSKERTEAILNHPGLPLPELSFNSNGVKKRLSALRLTKLAKLLGKRGNRKHKGIKSCNMGFFRDDALAVNGFNNEFVGWGREDSEFAARCYHSGMKRHNLKFAGIAYHLWHNEAERAALPRNDALLQATLNEKKTRCERGVNEFLENPPAPDPQLELPIEENA

SEQ ID NO: 1885 - protein, 586 aa, Paenibacillus alvei
MRYQTISLCMIVKNEEHVLSRCLESVKGIVDEVIIVDTGSTDRTVEIAEQHDARVYSYKWENDFAAARNYALEYATCDYILSLDADEWLDNDSKALLLEPLEEDYYFLRIRNIIRAGVVETHSFIRLYKRAVGFEYEGALHEQIDIGKVAGAKGEHLPVYINHDGYTKINIEKKEKHMRNMGILEKEVKRDPSAFNYFNLGTQYKLVGQFDKAIEAYKIAYSSGANFVFSHKLIINLVQCLTIQKRYNDAIKIINDSIALHPEYTDFRFYQGSIYFEMKYFKDAERSFLTCLELGEVQNHLFTSVEGVGSYMAQAYLAQIYLEIGEKEKAQQHIVDSIKLNPIHVASLKIWLDMFLMSEPNDMLRQLLAVYTTSEQANVLLLALYQLRNPLFVEYINHVDSELDCEVKAWQLQVNGDLDEAKKIWLNTESISATSFRDVLYLAVVTRDELFYRNFEKNFNLRQKDNSFFRKVINGEDCSKLDINEEVRECFRDLCYDLLMLRNFDAIEGLIDNVKIPMLRFELASQLHKFQFTELALNVLCEPEKSVDQAAVFSLAADLLNELGDYGDSYHYLIQAIQKKEIMNII

SEQ ID NO: 1886 - protein, 261 aa, Limnohabitans planktonicus
MKTKTPSLCIGILTMNESRRIAKCIESAKFADQIVVVDSGSKDDTVLIAQSLGAQVHIHTDWKGFAEQRNRLLQYCSSDYIFFLDADEVITPELEKEIQTAVSSGLNGVWEILWLQIAYGKPLKYMKATGGVKRLFRTSNLFKFEGVVHENAVLHDTNTPVITCKSRLLHYSRETVYESLQKLAQYSQLGALKRANTGKKGGVLRGFASAFVSFIQLYIFRRGFMCGPQGFLFCFFIALECFFRYTMLHYDRSMLNKSFIR

SEQ ID NO: 1887 - protein, 271 aa, Dyella terrae
MTEFPITLAVITHNEADNIARCLDSVPFAAEKLVVDSGSTDDTVAIAQAHGARVVHQDWLGFGPQRNAAQAMCAHEWILFLDADEYLSPALAQELQEKLPALMASDIPAVVLRRSTVFMGAPMRWYLPSMGEKMARLYHRGRARWSDARVHESLKYDGDAPVLNGRFNHTNNPTLVHKQLKVLRYSELKCRDWLDKGKPVRMWQAPFVFWLAFIKDYVFRLGMLDGWRGFIVAQTAATYAMYKRMRYFEMRHNPESVALAEAALHRHGIDR

SEQ ID NO: 1888 - protein, 297 aa, Leptospira perolatii
MSVDSSKKQKKLVKGKKAKVANFSRTNQDRFLKKLSVAIITYNEEKNIGDCIRSCRDIADEIVVLDSLSTDSTKEICTSFPEVVFASQKFRGHVEQKNDAIRLCKNEWILSLDADERLSEELNESLRKFLESSASGNVDGFKVARLTFHMGRFIRFSGWYPQRKYRIFRKSKASWAGENPHDYLVVNGSGKKMAGDILHYSFQDLSQQVDTINKFSSIVAWTRSRKGKRFSVLRTIHKPIGKFIEIYFFKLGFLDGFPGFAIAVSSAYSTFLKEAKVYELGKGLIDKPSNVREDYGS

SEQ ID NO: 1889 - protein, 266 aa, Unknown
  Description of Unknown: Candidatus Hydrogenedentes bacterium sequence
MIRLPISVYIIGYNEEKKIKDCLESVSDIVDEIVFVDSHSTDSTVSIVREYTTKIYTRDFNSYTDQKNYAQSLCKNEWVLNLDCDERLSPEAREELLNKFPSIQENPEIVGISFPRLTFYLYKFLRHGGWYPDRKIRLVRKCCCAWEGKRLHEEMKCKGNIVPFQGDILHYSFDSVDDHLKTIMKFSEMGAQDLWDKGRRSSLCTMVARTFWTGFRKIFLEFAFLDGVAGIIMTGFSMAATWSKYSKLYLLQKKQILNQKGNSAVQ

SEQ ID NO: 1890 - protein, 271 aa, Dyella sp.
MQTLPITLVVMTYNEAKSIARCLDSAPFAAEKLVIDSGSTDDTVAIAQAHGARVVHQDWLGFGPQRNFATTQASHPWLLALDADEYLTPALATELQQKLPALMTSDVCAAYLRRATIYMGAPMRWYLPSMGEKMARLYHRDRARWTDARVHESLRFDGPSITLDARFNHENNPSLPEKQLKVLRYAELKCRDWLEKDKPVRMWQTPFVFPLAFIKDYVFRLGFLDGWRGYAIAQTAASYAVYKRMRYYEMRHNPASRESAANALHRHGLDR

SEQ ID NO: 1891 - protein, 289 aa, Lysobacter oculi
MTRTGRDVDGSCSMAAQVSSAAGFLYWRPLPADPAMSAPLPISGVVITHNEADRIGRCIASLVAVCDEVILLDSGSTDDTVRIARDLGARVEHRGWDGFARQKNAAIAMASKPWVLLLDSDEWLEADAHAELGSLFAGDIEQADVWTLQRRTHWLGQPMRFGSFAREPVHRLFRADLRHADVPVHEYLDVEGRVVKPSRIRLEHDTARSSAEYRGKLGKYARLWAEARAARGNTAWPGRGLLAAAAYALKNLILQGGALDGRSGIAFHREHMRYAALKYRLLRELARSR

SEQ ID NO: 1892 - protein, 290 aa, Leptospira elllisii
MGKSIPAKKKKASSPKGNPTLDSAGKKISVAIITYNEEKNIGDCIRSCLEIADEIVVLDSISSDKTESIARSFAGVRFFKQKFKGHIEQKNDAISLCKFDWILSLDADERVSPELKDSILKFKREMDGGSVNGFLVSRLTYHMGRFIRHSGWYPQFRYRLFKKGKAVWVGENPHDYISIEGNGGKFKGDIVHFSFRDLTHQVNTINQFSSIVALTRQRKGKKFSLLRTIYKPFSKFVETYFFKFGFLDGFPGWVIAISSAYSTFLKDAKQFELEEKFVERPSNLKEDYGN

SEQ ID NO: 1893 - protein, 531 aa, Helicobacter marmotae
MKIPISVSILVKNAEHTLKECLESLREFDDIIILDNGSTDKSCEIAKSFPQVNIKQSEFIGFGALKNLAMSYAKYEWILSIDADEVLEAQTLALIKANLTSMQTNQIYALPRKNLYNGEWIKACGWYPDYVYRIFNKTFTHFNDNIVHESLILPKNAQIITLQSGLKHYAYDNIAHLLDKLQRYSSLWAEQNTHKTSSPLKAITHGAWTFVRDYFFKKGILYGYKGFVISSCNALGTFFKYMKLYETQKDTPPPLCSLIITTYNRKEALAPVLESILHLRILPYEVLIADDGSKEDTKTLIQSYQARFPCPLRHIWHEDKGFRLSAIRNRAIQAAKGEYIIIIDGDMIVEQDFIKDHLAHAKAGVFLQGSRILLGEHITQTITQSPKHFDLAFCQSGIKGKLKDRLKAKRNALLASLILRFSCIKANVFDKKDLIKGIRGCNMSFYKQDCLAINGFNESFEGWGREDSEFVARFLFNGGQMRRLKFAAIAYHLYHEESKRELLATNHALYLQTLASRLTYCEHGIKHSDSI

SEQ ID NO: 1894 - protein, 522 aa, Haemophilus felis
MMSTLPISVTLLVKNAEKYLDACLSALQDFAEIIVLDNGSTDSTLDIATKFPNVKIHYHDFIGFGPMKNLAESLASNDWILNIDSDEILSQALVEELKSLDLSNKNKVYSFLRINHYRGKPIKTCGWYPDYVSRLYHRTLVKFNDKQVHESLVIPKRVDVVRLKHSFTHYSFDGATSLINKMQQYTSLFAEQQQFRKRTTVLSAVTHGVFSFIKHYFIKKGILSGADGFVISFANACGSYYKYVKLAEANQRLTTSLIITTYNRPDALEAVLHSVLYQTELPDEVIVADDGSTGETSAVIQRLQKDFPVPLIHSWQEDKGFMLAEARNRALAKVKKDYIVIVDGDMVLHPKFISDHKKAAKKGLFIQGSRVVLTEQKTQELLANGKTPRALKWYEKGLETRFEKRLSAIHFPLLTNFILNKEKQYKYQGIRGCNMAFFKEDAIAINGFNNDFVGWGREDSEFVARFFSHGGKRANIKFAAIAYHLWHNEAARDALPENDKLLKDAMEQKLTWCENGVDKFLE

SEQ ID NO: 1895 - protein, 308 aa, Acinetobacter cumulans
MPNKNLAVVILTHNESMHIQRSIESVKSIASEIFVIDSGSKDETVKIAEEHGAVVLHHPFVNYAKQFQWALDNAPITADWTMRLDADEIIEPDLQQEIQAKLHHLPSNIVGVNLKRKHIFMNRWVKHGGRYPLVLLRIWRTGHGRIEDRWMDEHMVISGGETVTFKGGFADHNLNDLTFFTDKHNKYATREAIDVINQKLNLFARDESLNTESASFQASIKRIGKEKIYNKIPFTIAAFAYFIYRYIFQLGFLDGRSGLVYHFLQGYWYRFLVGAKIMELEKAIEGMSDKKEILKEISRLTGHKLADD

SEQ ID NO: 1896 - protein, 266 aa, Nitrospira sp.
MKVSVYIIAYNEAGKIADTIKSVLWADEIVLADSASTDGTDRIAAEMGARVVQIPFKGFGHLRNRAVAACTHEWILSIDTDEQCTPDVRDEILALLAGSPAQDAYLVPRRNYFMGQWVAHSGWYPNFRQPQFFRKGAMTYVESPVHEGYELLTPKPVGRLKHAIWQVPFRNFEEVLKKANRYSTLGVLKIADKRVSMGQALAHGLWSFIKHYVFKKGFLDGWPGFVIAFGNFEGTFYRYAKRYEAQENWPLPTQPPLRRPGGSPSV

SEQ ID NO: 1897 - protein, 261 aa, Unknown
  Description of Unknown: Xanthomonadaceae bacterium NML07-0707 sequence
MTYCTAMHTQVPKLPLSAVVITHNEADRIGRCVASLLPVCAEVIVLDSGSSDDTVQISRDLGARVEHRDWDGFARQKNAAIAMASKDWVILLDADEWLEADAQQALRALFASELESADVWLLQRRTHWLGQPMRYGSFSREPIERLFRSHLRHADLPVHEYLDTQGQRVRASQIRLEHDTARNAREYREKLARYAALWAKARAGKRGGAVRGFLAAAAYAIKNLILRGGILDGRKGLAFHREHMRYAALKYRLLSEQNERH

SEQ ID NO: 1898 - protein, 518 aa, Campylobacter insulaenigrae
MDIKKISVIMIVKNAQDTLKQCLKSLKDFGEIILLINESSDESYDIAKQFQKHHSHLKIYHHHFIGFGALKNLALSYASNEWIFNIDVDEVVGEEIFSELSKIQVQTNQILLLARKNLYKNEWIKACGWYPDYVMRIFNKNHTCFNDNLVHESLIIHNNTQKIKLKSALTHYAFEDINALLDKLQRYSSLWALQNLHKDSGVLKALIRGGWTFLRNYFFKKGIFYGYKGFIISLCNGLGAFFKYMKLYELKLQKPHTCSLVITTYNQKERLALVLDSVKNLSILPDEVLIADDGSKEDTAKLIQVYQKDFPCNLKHIWQEDEGFRLSQVRNKAIKASKGEYIIVVDGDMILEKNFIGDHLKFAQKKVFLQGSRVILNEKESKELLEKNDFSLAFAKKGFKNKKNTFLAKCVYKFSKLNKIFFEKSQLIKGVRGCNMSFYKSDFEAIDGFNEKFIGWGREDSEFVARFLFNNGTFARVKFYALAYHIYHKENSKNMLESNHKIYLDTIKNKKITWKENE

SEQ ID NO: 1899 - protein, 254 aa, Campylobacter rectus
MLSVVILTLNSEKYLAEVLRSCEFADEVVVVDSGSQDATEQICSEFKNVKFHKQKWLGFSAQKQLGVDLARNHWVFVLDSDEVILEPLREEILQVLQRPGFCAYEVARANIFFGKEVRTMGLYPDYTVRLFDKTRAEFDGREIHEKVVLKSVAKTDEQTSADAANLTTAKNQIGRLKNHFKHYAYGSIEQFIAKQNRYSSLGAKGAKSSKFKAVLNPAWTFFKLFFLKGGWREGWRGYVIARLYSQYTFWKYVK

SEQ ID NO: 1900 - protein, 271 aa, Dyella sp.
MPTFSLTLVVMTYNEAKHIGRCLDSVPFASEKLVVDSGSTDDTVAIAQAHGARVVHQPWLGFGPQRNFATTQCSNDWVLALDADEYLSPELAAELEQRLPKIMASKLCAAYLRRSTIFMGERMRWYLPGRGEKMARLYHRDRARWADVRVHESLRFDGPSVLLKEVFNHENNPSLPEKQIKVLRYAELKCRDWLQKNKPVRMWQTPFVYLLAFVKDYFLRLAFLDGWRGFVIAQTGASYAAYKRMRYYEMRRNPASLQTATDALIRHGIDR

SEQ ID NO: 1901 - protein, 287 aa, Leptospira weilii
MGKSIPNKKKKIEKKQGTLSTGKKLSVAIITYNEERNIGACIESCLDVADEIVVLDSISTDKTEKISKSFPSVKFYKQRFKGHIEQKNDAIALCKHEWIFSLDADERISPELKNAILTFKQEPEDESLSGLQVSRLTFHMGRFIRYSGWYPQYRYRIFKKGKAVWVGENPHDYISIQGKGNKIHGDILHYSFRDLSQQVNTINQFSSIVALTRQKKGKKFSFLRTIYKPFSKFMETYFFKFGFLDGFPGWVIAVSSAYSTFLKDAKQYELENGMMERPSNVKEDYGN

SEQ ID NO: 1902 - protein, 281 aa, Methylacidiphilum sp.
MHVSVVILTYNSERTIIPTIESALAVSDDVHVVDSYSSDNTIKILSSYPVHIIQHPFEYYAKQRNWAIENLPLKKPWELHLDADEMLSPELIEQLKNLSLFLQNQIDGFYIPRVVKFLGKILKHGGIYPTWHLRLFRRGKGRCEDRLYDQHFYVQGQTAKLQAIMIDDIQMDLTEWIQRHNRWSDLEAQEIFVGGAQKKDESKWAAGSPINQKKTLKQFYYNFPLFIRPVLLFCYRYFIKLGFLDGIEGLIFYVLQTFWFRFLIDAKLWELSRKNKLLPNP

SEQ ID NO: 1903 - protein, 272 aa, Rhodanobacter lindaniclasticus
MPAFPLTLAVITRNEAAHIARCLDSVPFAAEKLVVDCGSDDDTVAIAQAHGARVVHQDWLGFGPQRNFAAGQCAHDWILVLDADEYLGRDLAEELQRRLPALMAGDAAAAYLRRSTVYMGAPMRWYRPSTGERMARLYHRGRARWSDARVHESLQFDGPAPTLRGSFLHTNNPTLVHKQLKVLQYAELKCRDWLDHGKPARMWQAPFVYALAFLKDYLFRLACLDGWRGFVIAQTAASYALYKRMRYYEMTRNPASVEQAANALRAQGASIE

SEQ ID NO: 1904 - protein, 299 aa, Bacteroides xylanisolvens
MKQSIAAVILTKNEEKHIVRCLKSLKGICDDVVVVDCFSDDRTTELAKEHGARVIQHEWKNYATQFNYGVYECGITADWIWRIDADEFLEGELGTAVKEAVSKCSNQVNGVYVRKRIDFMGHPLLHGGWYPSYHLKVFRRGHGECENRWMDEHIRLTDGTSITVNMGNQVDANLNNLTWWTDKHNGYATREMADMLMTEYAMDAKAREVVPKLFGTEEQRKRWLKIKYIKSPLFIRPFVNFTVRYILKGGFLDGKEGFIWHILQGFWYRMLVDAKVYELKKQCGWNEEMIKAYLKEKFS

SEQ ID NO: 1905 - protein, 259 aa, Hyphomicrobium sp.
MKRLPVSCFIIAKNEADRIEYAIHSVQSWVDEVVVVIDCASTDDTLAVARNSGCKVISQPWLGFGGQKRFGEDICRNDWLLNLDADEVVTLALQEEIRRLFEHKAPARRAYSIPIDLVYPGATAPRFWPRDHRYVRLYDRRVVRYRNSPIHDSVLTGDFAVGRLKASIHHHSIRSFAHLATKLDERTWLLVENAKSRTSLSLALRLPVEFQINFLKYYIFRHHFTGGWTGIKYSAIQSWYRLMKVYRLCITPRSRRNPT

SEQ ID NO: 1906 - protein, 511 aa, Campylobacter sp.
MKLSTKISVCILVKNAQDTIKECLESLQSFDEIILLDNQSSDDTLKIANEFKNKFGNLKIYSSEFIGFGPLKNLAISYASNDWIFSIDSDEVLELSALKELENLKLNPNNIYAMPRKNLYKGEWIKACGWHPDFVLRLFNKTKTKFNSNFVHESLEVGNLNVVKLKNGLRHYAYDNISVLIDKMQKYSTLWAKQNRYKSSTMTSAVLHGGWKFIRDYFFKSGFMYGYKGFVISFCNALGAFFKYAKLYELNHQMPSVSLVVTTYNNEKYLEQVLKSIESLDYLPNEVLIADDGSGKNTANLISKFKQNFPCELRHIWHEDRGFRASAIRNRAINSTKSEYIIIIDGDMVLDRNFILDHLKFAKKNQILQGSRVVLNESQTASIIGGGNVCEFKSFKSTRNAILSKLIYKSWAIKSDFFNKKDFIKGIRSCNMSFYKGDCMAIGGFNESFIGWGREDSEFVARFLFNGGELRRMKFAGIAYHLYHTENSREMLELNHQIYLDTIKNKRVNWQ

SEQ ID NO: 1907 - protein, 517 aa, Unknown
  Description of Unknown: unclassified Helicobacter sequence
MNLSKISVAILVKNSEKTIKECLDALKNFDEIILLDNLSDDNTLEIAKQFHNVKIYQSDFIGFGALKNLAISYAKNDWILSIDSDEVLDEDAIKSINDLKLDSHCVYALSRKNHYNGEWIKACGWYPDYVKRLFNKKEVSFNSALVHESLNVPKNFQEIKLKGSIKHYSFKDITQLLAKMQHYSSLWAQQNPHRFSSPMIAILKGFWTFIRNYLFKRGFLYGYRGFVISICNGLGAFFKYMKLYENSLTTPSVSLIVTTYNQKERLALVLDSILEQKLMPNEVLIADDGSGEDTKELILDYQNKFPIPLKHIWQEDCGYRLSKSRNHAISNAQGEYIIIVDGDMILSPFFIQDHLKFAKKSCFIQGGRIILNELETQSIMQEKNHKKALNKKIFKNQRNLILSKIIFYLSQKNKKNGIKKDKLLSVRGCNMAFYKEDAYAINGFNEDFIGWGREDSEFVVRFLNAGGEMRKLKFYALAYHLYHQENSRNMLKENHQIYIQSIEQSKKWCKNGLLKDT

SEQ ID NO: 1908 - protein, 513 aa, Pontibacter ramchanderi
MSQAISVTILTKNSQQYLADCLQALHRFAEIIVLDNGSADETLAIAARFPNVRIVEHPFIGFGPMKNLAAQHATHAWVLSVDSDEVLSPQLADELLALNLGDTRQVYSFLRHNFYGKKHIKACGWDNDYVLRLYHKGTTRFADLPVHEHILTEGMQVQRLQGTMDHFSFNSISQLIGKMDQYTTLFAREKRFRKNSSPAKSCFKWAFSLFRNYVMQRGFLYGYEGMAISFSNANGTFYKYMKLHEENQRLGISLVITTYNWKEALGTVLQSAFNQSELPREIIVADDGSRDDTRALVERLAKESPVPLLHSWQEDLGFRAAESRNKAIAMATGEYVVIIDGDMVLHPDFLKGHRRAARKGYFTQGKRVLLSPSLSQDLIQRGPKVISPISSGIKNRLNATNAPFLSSLFSKEKTGIASIKSCNMGFWMEDIIRVNGFNEDFVGWGREDSEFAIRLLNSGTKRQNLAFGGIAYHLHHQENSRQSLAANDILLERAISEKSTFCPNGIDKHLTTA

SEQ ID NO: 1909 - protein, 255 aa, Chthoniobacter flavus
MPLNLSIAIISLNEEANLRRCLQSAADLAKEIVVVDSGSTDKTLDVAREFGARVQHQDYLGQRDQKNVAVSLCTQPWVLLLDCDEELSPELKAAIIAFFEKSDAERYVGAKMARKVWFMGRWITHGDWYPDRKLRLFRRDKGRCGGNAAHDKVEIEGPVTTLNGDLHHYSFRDMRHYVSKINTFADAFLEKQKSEGARWSLAATLFRPWWRFFRAYVIRRGFLDGFPGLWIAVATAFFAFVRYSRKYEDEAMNGD

SEQ ID NO: 1910 - protein, 271 aa, Rhodanobacter sp.
MPTLPLTLAVITHNEAGSIARCLDSVPFAAEKLVVDSGSDDDTVAIARAHGARVIQQDWLGFGAQRNFASNQCSHDWILVLDADEWLSPELAVELQQRLPGLMAGDAPAAYLRRRTIYMGRPMRWYRPNVGEKLARLYHRGRARWSDARVHESLRFDGVAPTLRAAFDHANNPSLAHKQLKVLRYAELKCRDWLDRRKPVRMWQAPFVYLLAFLKDYLFRLAFLDGWRGFLIAQTAASYALYKRMRYYEMVNHPESVASAAALLHKHEIDR

SEQ ID NO: 1911 - protein, 271 aa, Rhodanobacter sp.
MPTLPLTLAVITHNEAENIARCLDSVPFAAEKLVVDSGSDDDTVAVAQAHGARVVHQDWLGFGPQRNFATTQCAYDWILVLDADEYLTPELAAELQERLTELMASTAPAAYLRRSTIYMGQPMRWYRPAVGERMARLYHRGRARWSDARVHESLRFDGIAPTLRAPFNHVNNPTLPHKQLKVLRYAELKCRDWRDKGKPVRMWQAPFVFVLAFLKDYLFRLAFLDGWRGFMIAQTAASYALYKRMRYYEMINNPESVAQAAHILTQHGIDR

SEQ ID NO: 1912 - protein, 257 aa, Unknown
  Description of Unknown: Betaproteobacteria bacterium sequence
MSDPLSPLALTVVVITRDAGAEIAACLDSAAFAAELIVVDSGSRDDTVEIARHSGARVIEQAWLGFGAQKNFAVAQARHDWILSLDADERVSRDLAASIGAALAKPRHTAYAMARCNRFLGRWLRHGEGYPDWNVRLFHRAHARWSDDVVHEHVIAEGSVGKLGGDLLHASAESLEAYLTKQNRYTTLQAEALYARGERFSALRFVFSPVLRFLRFYVLRAGFLDGTAGLAHIVIGCFNSFCKYAKLRALEQAQRAR

SEQ ID NO: 1913 - protein, 272 aa, Rhodanobacter denitrificans
MPTFPLTLAVITRNEAGSIARCLDSVPFAAEKLVVDSGSEDDTVAIAQAHGARVVHQDWLGFGAQRNFATTQCAHDWILVLDADEYLSPALAAELARRLPALLAGDAPAAYLRRRTIYMGRPMRWYRPNVGEKLARLYHRGRARWSDARVHESLRFEGAAPTFDAPFDHANNPTLAHKQLKVLRYAELKCRDWLDQRKPVRMWQAPFVYVLAFLKDYLFRLAVLDGWRGFLIAQTAASYALYKRMRYYEMVNHPESVASAADLLHQHDIDRR

SEQ ID NO: 1914 - protein, 262 aa, Piscinibacter caeni
MPTVSLYIIAYNEAEKIREAIATALWADEIVLVDSHSTDGTAEIARSLGARVVDVEFKGFGDLRNQAISHCTGDWIFSLDSDERCTPEVRDEVRAIMADPNALDVYLVPRRNFFMGRWIRHSGWYPNFRQPQLFRRGAMAYTLEPVHEGYRLLTDKPLGRLKNAIWQFPFRNLHEVIRKFDRYSDLGAAKVAPGRASMPRALASAFWAFVKHWIFKRGVLDGWPGFVIAFAYGEQTFYRYAKRWEQDAGWQVPVQPPVRRAD

SEQ ID NO: 1915 - protein, 670 aa, Paenibacillus cellulosilyticus
MRRAELPGVSLCMIVRNEAAFIEACLMSARPYVAEMIVCDTGSKDRTVEIAQSLGAQIVRWEWTDDFAAARNYALSFASQPWILVLDADERLEPAAMQVWERLLLADDQWGYYIRLISRLARTDAEQEESAVTDAVCRLFRNDERIRFAGIIHEECATAAAALQGGPLAIAPLTIRHEGYRADVMEERRKVERNLRLLSKALAQRPNDPLLRYAVGTELLSAGRWLEAAEWLHPLVGQLDDACGFASDVYLKLSHACRMAGRLDEAASVAEAGLQLYGDFPDLYEALAAVHIARDDARSALQVLQQASAVGEAAPYYSSVEGAGGYRTLYAAGAACEQLYEWQEAAAYYAAALRQRPGLERAWIRLLALYQAVEGEAAYGMKELWQAAVECLLHLNVRVRREEAAPGGGQRELERVRLRVAQLLLQLHEPDRCGPYIERLVEGAGGPGVQLLGWLRLQQGDLVEAERCWLAVEQQRLLGGEWAKLGVVLRCCASDGQGGTLAVSGEAQLLAGDWAGWLERVERAASVGAEEQSLPSMLQFGVLLHSVGWSRGGGDAEGDGSPTGLGGRAGYVWPGAPPRIGGPPFEAELAAGLLAAAVGRWREACDCFAAARSAAAQPAQGRAAASALAAAFAARASETLAGSEHGSLLPQALRSWNELRLIGLTALYPP

SEQ ID NO: 1916 - protein, 257 aa, Hymenobacter oligotrophus
MPAVPLSVVIITFNEEANIGRCLAALGDVADDVVVVDSGSADRTVAICQEHSARVVHHPFEGYVQQKNFATAQARHDYVLQLDADEVLTDELRAEIRQIKADWRAAGYTLPRLTNYCGHWVRHGGWYPDRKLRLYDRRLGSWQGHLLHERYELTPGQLVQPMRHDLLHYSYHSIEQHVAQFNRFSSIGAEELAARGKRAATWQLWLKPVWKFVHMYFLRLGMLDGFAGLSIAYLSACSVFVKYAKLRVINQQDAARS

SEQ ID NO: 1917 - protein, 299 aa, Chitinophaga sp.
MKISVIILTYNESKHLARCLESMRQVAEEIYVIDAFSTDDTLEIAARYNAKVHQRKWINYADQFQWALDNCDIRTPWVMRMDADEYLEPALVKEINSIEIPAKVTGIYIRRKVLFKEKWIRYGGFYPHTLLRIWRNAAGSIEQRWMDEHVVISGGETMQLKEHIVDHNLNSIHWWVNKHNNYAIREMVDLLNIKYRFLEEDKRLLGSESSQARRKRFLKEKVYSALSPGARASLYFCFRYFLRFGFMDGYRGFVFHFMQGYWYRLLVDVNLKEFEDKLQGDTSRERLIELLRKDYNIAI

SEQ ID NO: 1918 - protein, 522 aa, Neisseria animalis
MTPTPPIPATAAILVKNSEPHLAEVLDALADFDEILLLDNGSTDRTLEIAAQFANVRCCYHEFDGFGPMKNRAAELAKHDWIFSIDSDEVADEVLIGGIRAAVAENNPRKIFMLSRLNHYNRRLIKACGWYPDVLPRLYHREFTRFSDRQVHEALILPPESVKQVLPGCLKHYSFENAEGLVKKMQQYSSLYADENQYKKPASLSKALLHGGVSFIKNYLFKRGFMYGADGLTISIANAQGSYYKYVKLYERNRRLSTALVITTYNRPDALEKVLQSALAQTRLPDEIIIADDGSGEETAEVVRRFRQVSPVPVKHAWRPDDGFRAAEARNRAIAMAQSDYIVLIDGDMLLEPHFIADHIDRAHKGRLIQGSRVLLTETRTREILSENGLPKLSAWSKGIGKRISAVRCRFLSSYAGSRGSCQHKGIKTCNMGFFREDALAVNGFDNEFVGWGREDSEFVARCYHNGMKRHNLKFAGVAYHLYHHEAERDALPKNDVRLQTTLSNRTVRCENGIDAFLSEDR

SEQ ID NO: 1919 - protein, 291 aa, Xylella fastidiosa
MRMEREDHSPQAESAVLLPMSLVVMTYNEAANIARCLDSVPFVSEKLVVDCGSTDETVEIARAHGARVVEQAWLGFGPQRNFASEQATYDWILVLDADEFLSHLLREECLRRLPELLLDEGREKPLAAIWLRRSTWYMGAPMRWYRPMVGEHLARVYHRRRAFWTEVRVHESLCFDGRSAEFVAPFHHLHNPTLVHKQLKVLRYAELKALDWNSKARSARMWQAPLVFVAAFLKDYVLRLAILDGWRGFVVAQTAASYALYKRMRYYEMRRNPDSIQQARTQLCKHRLEHE

SEQ ID NO: 1920 - protein, 258 aa, Mariprofundus ferrooxydans
MTELSVYIIAYNEADKIADAVKSALWADEVIVVDSHSSDNTAEIAAALGARVVQLDFEGFGKLRNDAIAACKHEWIFSLDADERCTSEAAEEIRNIIADPASADAWYVPRKNWFMGRWIKHCGWYPDYRQPQLFRRGALSFEQADQVHERYHIHGSTGHMQTPIWQFPFKNLEQVLHKANRYSTLGVDRLENKGVRAGMGKALLRGLWSFFRIYILKRGFLDGWAGFVIAFSNLEGVFYRYAKLRERQQRWDLPPDRE

SEQ ID NO: 1921 - protein, 232 aa, Nitrospira moscoviensis
MKACLESVAWADELIVVDSHSTDKTAAIAREFTDKVYQVDFKGFGHLRNQAVSFCTHDWVFSLDSDERMTPELREEIRLVLDAGPKADAYFVPRKNYFLGRWIKHCGWYPDYRQPQLFRKGRFRYRDEVVHESFDCDGPVGYLTKPAIQIPFRDVDHFLAKHDRYSDLMARRMKEQGRRFAAHQLVTHPTGTFVKMYLLRQGFRDGMPGLILSGLYAYYTFVKYAKLWEQTR

SEQ ID NO: 1922 - protein, 272 aa, Dyella sp.
MAPLLPLTLVVITRNEAQKIARCLDSVPFAAEKLVIDSGSTDDTVAIARAHGARVVHQDWLGFGPQRNVAATHCSHPWILALDADEYLTPELAGELQRRLPALMESDTAAVILRRHLIYMGKPMRWYRPAVGEKLARLYHRDRARWSDVRVHESLTFNGRSLTLQAPFLHDNNPSLVEKQLKVLLYSELKCRDWSDKNKSTRMWQTPFVYAFAFVKDYVLRLGLLDGWRGYVIAHTAASYAIYKRMRYYEMRLNPASRDTAAAALTRAGLDH

SEQ ID NO: 1923 - protein, 263 aa, Unknown
  Description of Unknown: Dyella sequence
MAREPLSVVVTAFNSAATLDACLASVRWADEVVVLDSGSTDATLAIAAHYGARIETQPFAGYSAQKQAAIELARHDWVLLLDSDEAMPPGAAEAIHRVLEQPAHAGYLLWRREWIFWQWQSPRSRLNHYVRLFDRRRARMSRHRVHEEVEVDGSVGVLDIVMDHYGERDIAGRVDKANRYSSLQVADLAGRRARGLRLRMLTNAWAAFFRYYLLRGHYRSGWAGFIAARIHAFYAFLKYAKLYEATRVESKETRIPAAERKDG

SEQ ID NO: 1924 - protein, 259 aa, Acidisarcina polymorpha
MLDSGSSDETVAIAQEFGARVFVEPWRGYGPGVNSAIDKCTGDWIFTLDADEVATPELSAEIQTLLNHSGNGVVSQPIRTADQSSRLRHSEPQYDAYWIPRLNLILGRWMWHGGVYPDPKLRLFRRGTARLREDTEPHATPKWDGPAGRLKSHMLHYAYPNLAMYLEHMDRYSTASVPLMLRRGKTSQSLPEFVLNMFLNPLATFLYNYVFRLGFLDGREGFLFHLNHSVYVNWKYVKAWQAAKQIAIDAAEPSSTIQG

SEQ ID NO: 1925 - protein, 271 aa, Dyella sp.
MPTLPLTLVVITYNEAKNIARCLDSVPFAAEKVVIDSGSTDDTVAVAQAHGARVVHQSWLGFGPQRNFATTQCNNDWILALDADEYLSPELAAELQQRMPGLMAGNVCAVFLRRATIYMGAPMRWYLPAMGEKMARLFHRDRARWADVRVHESLRFDGPSVTFKARFNHENNPSLPQKQLKVLRYAELKCRDWLEKGKPVRMWQTPFVFLLAFIKDYFLRLAFLDGWRGFVIAQTAASYAAYKRMRYYEMRRNPASVETANDALIRHGIDR

SEQ ID NO: 1926 - protein, 292 aa, Acinetobacter soli
MHIERAIKSVQSIASEIFVIDSGSKDATVKIAQKNGATVLYHPFINQAKQFNWALDNAPITASWIMRLDADEIIEPDLALEIQQKIPQLDANIVGINLKRKHIFMDRWVRFGGRYPLILMRIWRTGYGRVEDRWMDEHVVISSGETTTFDGGFADHNLNDLTFFTDKHNKYATREAIEVLNHKYQLFNQDKSLNSDSTSFQASFKRNIKEKIYNKLPFTLSAFAYFMWRYIFQLGFLDGRSGLTYHFLQGYWYRFLVGAKIMELENAIEAMTDKREIIKKISNLTGHSLDTE

SEQ ID NO: 1927 - protein, 273 aa, Unknown
  Description of Unknown: Lentisphaerae bacterium sequence
MPAEPVPNLSAYILTCNNEETLAGALRSVSDLAEEIVVVDSGSKDSTLDIAKQYTDRIIHQPWQGFRDQYQFAQDQCRGEWVIFLDADEELSPQLGEEIRLELARNQQRPSHAQIAGYRIPRRTFFLDRWILHGAWSSDQEIRLYKKTLGRWEGGLHACVHIHDGAVATLRNFYYHFSYRNISEQIEKLNHYSTETAKEACSLGKTSIMNVISHPIWRFIKDYFLKAGFLDGMPGLVIAVNDAWYTFNKYAKSWELAYCQEERIKKIRDEERP

SEQ ID NO: 1928 - protein, 794 aa, Selenomonas sputigena
MKLSACVITKNEEENIGTWLTSMKKIADEMIVVDTGSTDRTVEMAKEAGARVFHHAWQNDFAAAKNCALEKAKGDWILFLDADEYFSPQTIAKVRPLLLEVEKSTKPIVGVICRLVNIDKDQGNRFTGAIFQLRIFRNSPDLRYEGKIHEHVVDAHRAEHEMFVTPKLVIFHTGYSQHIVRKKLERNLDFLRQKEEAEGESVDDALHYMDCYYGLGDFAKAVEYAQKAIASKIVYMGREGAEYWGLVRALLAQKRPKEELVPVLQEAMEKYPDLAEFPMEFGLLAWEERDYLLAEKMFRRGMACREKVPTSLRADNSLQMFPFVCLSLGKIEAMKGRPAEAFDYFLRAVKEYPYDTRIFLALYDALAGQKPADVIALLDTLYDKERDAPFITAALAMRELTHVALYYARFLPPEKRDEVLLYRAAGRTDAAAVELSARLKSFSSLLAEAKGETGVLPEEDAVSLLLAEPYKRHWRRKALPLVSIMIPTYNRPKFFELALQSALRQKYENLEIIVCDNGTDDRTEALIEKYLGDPRLCYHRNRTAKTKEENFAPFEHLAKGEYLQWLMDDDILLDGKIEKMMQAFRENPAARLVTSRRAQIDGEGRVQPNPCTEGVPESEADYSVFEGEAVGRETLLGCRNFLGEPSAVLFRRADLKHHYWRAESRGYKTISDVAMWLKLLEGGDCIFFQKPLSCYRRHEEQEGQQAEVILLSRLEWLRLIKEYFERRIYVATEEEYAQPLELLYGEYLEERDRFDRAAAGEMWREYEEAMRSTRRTLEKMKKKERAHGKREGKR

SEQ ID NO: 1929 - protein, 251 aa, Escherichia coli
MELVSIIIAAYNCKDTIYATVESALSQTYKNIEIIICDDSSTDDTWDIINKIKDSRIICIKNNYCKGAAGARNCALKIAKGRYIAFLDSDDYWVTTKISNQIHFMETEKVFFSYSNYYIEKDFVITGVFSSPPEINYGAMLKYCNIACSTVILDRTGVKNISFPYIDKEDYALWLNILSKGIKARNTNLVDTYYRVHAGSVSANKFKELIRQSNVLKSIGIKAHHRIICLFYYAINGLIKHCFSYRDKRNA

SEQ ID NO: 1930 - protein, 249 aa, Halomonas sulfidaeris
MLAELSAVIITRNAAATLARTLDALEAVGEVIVYDNGSTDETLDIARHYANVSLHQGEFLGFGSTKRHAVLLARYDWILSLDADEAPTVQWLESLADWLPGADLEQVVEVHRENQLLGKPVHHSGWGDDWLIRVFHRSRHNFNDAVVHESVMVNRTTQTVRLEGCLEHLAITDLGQFLDKINRYSTLRAQSDKLRVYPVAFILLKAMFAFWRAYLLQRGFLDGWRGLIIAVANANGVFWKYMKRRVRDL

SEQ ID NO: 1931 - protein, 511 aa, Campylobacter sp.
MKLSTKISVCILVKNAQNTIKECLESLKSFDEIILLDNQSSDDTLKIANEFKAKFNNLKIYSSEFIGFGPLKNLAINYASNDWIFSIDSDEVLEFQALNEIANLDLNPQNIYALPRKNLYKGEWIKACGWYPDYVLRLFNKTQTKFNSNFVHESLEAKNLNIIKLKNGLRHYAYDDISTLIEKMQKYSTLYAIQNRAKKSNISKAVLHSVWKFIRDYTFKNGFLYGYKGFVISLCNALGAFFKYTKLYELNSKKPSVSLIITTYNSEKYLEQVLKSVQNLDYLPMEVLIADDGSGVATKNLIERFKSNFPCKLRHIWQEDKGFRLSQIRNKAINSAVGEYIILIDGDMVLEPNFILDHLKFAKKKQFLQGSRVVLDESQTGFIIQGGDTSEIKNFKSKRNILLANLIYKSSAIKANFFKKRDFIKGIRGCNMSFYKIDCDEIGGFNENFIGWGREDSEFVARFLFSGGELRRLKFFGIAYHLYHAENSRKMLESNHQIYLNTIKEKRVKWR

SEQ ID NO: 1932 - protein, 299 aa, Leptospira wolffii
MTETAHSKEASPIKKKKKTKGISRTSDTIKERFSKKLSVAIITYNEEKNIRDCILSCRDLADEIVILDSDSTDKTREISISYPEVRFSSQKFKGHVEQKNDAISLCKNEWVLSLDADERLSEELKESVRKFLESPEDRELNGLKVSRLTFHMGRFIRFSGWYPQTKFRIFRKNKAKWIGENPHDYLSVEGQGKKIPGDILHYSFQDLSQQVDTINKFSSIVAFTRWKKKKRFSLLRTLVKPFVKFVEIYLFKFGFLDGFPGFVIAISSAYSTFLKEAKVFELGRNIIERPSNLREDYGK

SEQ ID NO: 1933 - protein, 256 aa, Hyphomicrobium sp.
MSRLPISCFIIAQNEADRIVRTIRSVEPWVDEVVVVDSGSTDDTVSVAQGAHARVISQTWLGFGRQKRFAEEQCHHDWVLNLDADEVVSPELRTKITELFRSGEPAREAYGMPIHVVYPQRSKPRIWARDHWCVRLYNRQVVRFRDSHVHDTVVTDGHAVGRLTAPIHHFSIRSFDHMRAKLDRRMSLAAEHASITSPALTLARLTIEFPLNFYKYYIVRRHITGGVMGVRYAALQARFRAAKVYRLWRRHRRPHA

SEQ ID NO: 1934 - protein, 271 aa, Dyella soli
MPTFPLTLVVITHNEANAIGRCLDSVPFAAEKLVIDSGSTDDTVAVAQAHGARVVQQPWLGFGPQRNFATTQCQHDWILALDADEYLSPALASELEQRLAELMASDICVAYLRRATIFMGAPMRWYLPSVGEKMARLFHRDRARWTDARVHESLRFDGPSVLLKAPFNHENNPSLPQKQIKVLRYAELKCRDWLEKDKPVRMWQTPFVYLLSFIKDYLFRLGFLDGWRGFVIAQTGASYAAYKRMRYYEMRRNPASLDSATDALVRHGIDR

SEQ ID NO: 1935 - protein, 252 aa, Halomonas sp.
MPIPASVSVVIITRNAAATLRQTLDSVQDFDDVVIYDNGSSDDTLKIAADYPNVTSYEGEFLGFGPTKRHAVSLAKHDWIVSLDADEALSPILVEAILAWVDKALPNDLGQVLRENWMMGRPVRHSGWGNDWLIRLFNRQCHNFNDAMVHESIALSQHSRVQRLTGTITHTAVTDLSQLLEKVNRYSTIRADSGKLKAYPVPIVFIKALFAFIRTYLLQRGCLDGWRGLVIAVSNANGVFWKYMKNYLKTNR

SEQ ID NO: 1936 - protein, 270 aa, Rhodanobacter sp.
MTLPVTLALIARNEAAVIGRCLDSVPFAAEKLVVDSGSTDDTVAVAQAHGARVVHQDWLGFGPQRNFATTQCGNDWILVLDADEWLSPQLAAELERALPALMASAAPAAYLRRNTVYMGKPLRWYRPGVGEKMARLYHRDRARWSDARVHESLQFAGAAPVFKAPFNHANNPTLVHKQLKVLRYAELKCRDWLDKGKSARMWQAPFVYVLAFLKDYFVRLAFLDGWRGFLIAQTAASYALYKRMRYYEMTRNPASVAQADAALREHRLED

SEQ ID NO: 1937 - protein, 271 aa, Rhodanobacter sp.
MPTFPLTLVVITHNEVENIARCLDSVPFAAEKLVIDSGSDDDTVAVAQDHGARVVHQDWLGFGPQRNFATTLCANPWILALDADEYLTPELAIELQQRLPELMASKLPAAYLRRSTVFMGAPMRWYRPAVGEKMARLYHRDRARWSDARVHESLCFDGTVPTLRAPFNHVNNPTLVHKQLKVLRYSELKCRDWNDKNKPVRMWQTPFLFLLTFVKDYFLRLGFLDGWRGYLIAHTAAVYAVYKRMRYYEIRQNPESLPRAATALTRHQIDR

SEQ ID NO: 1938 - protein, 266 aa, Thioflexothrix psekupsii
MTVKISAYLIAFNEARKIKAAIESVLWADEVVVVDSFSTDNTADIAQQLGATVVQVPFSGFGELRNAALAACAGEWIFSLDCDERCTAEVREEILTVIANDTPPHELYLVPRRNFFMGRWIRHSGWYPNFRQPQLFRRGAMSYSLDAVHEGFVSHSQLPVGQLQQAIWQMPFENFHEVIRKANRYSDLGAVRLQQRQVTMGMALRHGLWAFTKHYVFKAGFLDGWAGFVIALGNFEGTFYRYAKAYEKQQHWSLPASSPLRRSDES

SEQ ID NO: 1939 - protein, 256 aa, Hymenobacter sp.
MPALLLSVVIITFNEEANIARCLQGLGNIADEVLVVDSFSTDRTMAICQAHGVRVVQHAFEGYVEQKNFATDQARHNYVLQLDADEVLTDELRQNILAVKNNWQHAAYSLARLTNYCGTWVRHGGWYPDRKLRLYDRRLGRWQGLLLHEYYEVQPGQTTGALAGDALHYSYASVAQHVSQLNRFTSITAQELALKGKTRVTLFQLILKPLWKFLYGYVFRLGFLDGFAGLSIAAISATGVFLKFAKLRTGTQNARA

SEQ ID NO: 1940 - protein, 260 aa, Desulfobulbus propionicus
MNKLSVYIIAYNEADKIEAAVNSVLWADEIILADSFSQDDTAAIAERLGARIVQVPFQGFGDLRNQAMAACSHEWIFSLDSDERCTPEAQQEIRSTLQAPQADAYYIPRKNFFMGRWIQHSGFYPDYRQPQLFRKGALHFKNDPVHEEYEVRSDKPVAYLNNAIWQLPYKNLEEVVHKANKYSTLGAEKLEQRGKTGGMAKALGRGLWSFFHMYILKKGILDGWPGFIIALGNFEGTFYKYAKLHERLAKWEPPASPPLR

SEQ ID NO: 1941 - protein, 290 aa, Leptospira gomenensis
MGKSIPAKKKKASSPKTKPALDSAEKKISVAIITYNEEKNIADCIRSCLEIADEILVLDSISSDKTESIARSFPSVRFLKQKFKGHIEQKNDAISLCKFDWILSLDADERISPELKDSILNFKKEREETGINGFLVSRLTFHMGRFIRHSGWYPQFRYRLFKKGNAVWVGENPHDYISIQGKGAKLKGDIIHFSFRDLTHQVNTINQFSSIVALTRQKKGKKFSLLRTIYKPFSKFLETYFFKFGFLDGFPGWVIAVSSAYSTFLKDAKQFELEQKFVDRPSNVKEDYGS

SEQ ID NO: 1942 - protein, 287 aa, Vulgatibacter incomptus
MRIGGFVIHGNNRSTIGACLDSLLAVSDEVIAIDSSSTDGSAEIVKSKGVRSLDIPWQGYGIARAAAVRELEGCDYVFFLDSDERLAPGAVEIFQEWRRSNPTLPYYRLALRDWADLPTGSFVLRTEWKTRIMRRDIANWQPEMIVHETLPDRECAPITAVIDHQFVTSIQTLVDKQDWYARLWAVQAHAEGKRADPTFLKRVGHVIRNCVVKGGLARGGLASVRLAWAVSRYHARKHQYLRLVQNGGLPEMVTAYREKRFLDLYALRNTPAGGAKPAPGQEPRPTA

SEQ ID NO: 1943 - protein, 599 aa, Helicobacter macacae
MNNAGKISVCIIVKNAQKTLAECLESVRDFDEIILLDNGSTDKTLQIAQEFNATYKNLRAKQSEFIGFGALKNLCVSYAKNEWILSLDSDEVLELDALNEINALDLEPNQIYALPRKNLYNGEWIKACGWYPDFVWRIFNKNFTRFNDNAVHESVMIPPTAQKIHLKGAIKHYAFANIDSIIAKMNRYTSQSAQEKLKNGRKTSFFSAFARLHFVFFKDYFLRKGFLYGYKGFIVALLNALGAFFRYAKLYELSKDKKEPKVIAFDRRLGVGDIISSIPAFYITKQLYPQATFILITNKIGASLCRNFDFIDKFIIEGVDFEIKDFAKVVDENEVEVLLLGHRSSANIKLAKQSKCPKIITWRHLHSIFSQRFIHPKHIKRSQRLEILRCLDLVRMIDAPKYDKNIDKFELKSLPIQIQTDRKNKIFVDEFLSDAKKYEKIIAISPFGISSAKYNLAIDDWISLVKNLAKKFDKALFVFMNFRGSGYDFKPFMEENIKVFVNNDDLLNLVELTSRVNLCISLATGNIHIADNLGIDTLGFFAYTDEFLFPCGNYGGNFEVLYLPKDWEKDYEYYKNSFYQKAQKCVEKTLLGHKNKKEK

SEQ ID NO: 1944 - protein, 203 aa, Unknown
  Description of Unknown: Proteobacteria bacterium sequence
MHKVSAYIIAFNEAEKIADAVASVLWADEIVVADSGSTDATAEIAQGLGARVVQIPFHGFGDLRNRAIAECRHEWIFSLDSDERCTREVRDEILGILAGEPPHDAYLVPRRNYMMGRWIRGSGWYPNFRQPQLFRQGAMRYDDGPVHEGYQLLTARPLGSLRSAIWQYPFRNLEEVIGKMNRYSSLGVRKLAGKRVSMGGALG

SEQ ID NO: 1945 - protein, 433 aa, Unknown
  Description of Unknown: Oribacterium sp. KHPX15 sequence
MKISQAMIVKNEEKNIGKALGCVKGVAFEQIVVDTGSTDDTVRIAEEAGATVYRFKWIDDFAAAKNFAIDKCKGDWIVFLDADEYFEDASNLCEVISKAEEKKEYVIASKLLNLNDEGKVIGTITQPRVFKNHVGIKYEGKIHEHLKNDQPTDIYDATDELIIYHTGYSETVYNEKNKDKLYKTMLEKAIAENPGDSDLYGYLGDIYAKNKKYAKAEELYFKSIKYMDDKVTEESERRGDTLRHLLMILGEDKKRTGDILKIYNYARAILPHDADFSCVVADHYYRFKKYIKAADYYKEAIDIYDKYGSFQRSDHVEAYFPKICSKMLDSYYQEKEYTKVVEESGYCIGKQKYNAEYLGYLMSAFKALRQNGNVELKTQDEIKIINDLYDLGTIKDKAFVFVNSYKTDDKEVFEHVISLCSAAELEAFKQQLL

SEQ ID NO: 1946 - protein, 528 aa, Helicobacter jaachi
MSNIPISVTLLVKNAQDTLAQCLQSLQAFDEIILLDNQSSDDTLKIAQDFNQTFKNLRIYQSEFIGFGALKNLAISYAKHDIILSIDADEILESSALEWIQSHLDSMQPNHIYALPRKNLYRGEWIKACGWYPDYVWRIFNKQFTRFNDNIVHESVIIPPNAKTIKLPYGLTHYAYENIAQLLDKLQRYTTLYATQHTHKSASPLKATIRGLWSFVRNYFFKKGFCYGYKGFVISLCNALGSFFKYMKLYEANKPSPSDCTLIVTTYNQKERLALVLDSIKALNPLPKEVLIADDGSAQDTRELIESYMPHFPCALKHIWQEDRGFRLSAIRNLAIKAAQGKYIIIIDGDMILESHFIKDHLRAAQRGVFIQASRVILDAKTTQHIMDSHNFRKAFAKKDFKATRCALLSALIFKTSKINARFFAKKDFIKGIRGCNMSFFKADCVDINGFNEAFVGWGREDSEFVARFLFHGGQLKRLKFAAIAYHLYHKENTRDMLASNHAIYLDTIKHKSHFCAQGLKHTTSQGE

SEQ ID NO: 1947 - protein, 266 aa, Unknown
  Description of Unknown: Candidatus Nitrospira inopinata sequence
MKVSAYIIAYNSADRIADAVNSVLWADEVVVADSHSTDGTDRIAQALGAKIVQIPFEGFGHLRNRAVEACQHEWIFSLDTDEICTPEVRDEILALLSRTPAHDAYLVPRRNYFMGRWIKHSGWYPNFRQPQLFRKGAMQYMELPVHEGYELLTDKPVGRLRHAIWQIPFRDFEEVVKKANRYSTLGAQKLDGKRVSMGAALWHAMWSFLKHYIAKRGLLDGWPGFVIAFGNFEGTFYRYAKRFEQQEQWAIPKQPPLRRPDHLSSG

SEQ ID NO: 1948 - protein, 255 aa, Desulfobacter postgatei
MSPFSAGKLSVYIIAYNEADKIEDALKSVVWADEVVVADSFSTDDTAKIAQDYGARVVQIPFEGFGQLRNDAINACSHNWVFSLDADERCTQDAKQEILQIINDPDSLDAYYVPRRNYFMGKWIRHAGFYPDFRQPQLFRKGALKFMPDAVHERYEVLSDRKCGYLSSSIFQIPFKDLEEMFRKMNRYSTLGAQKLDAANQRSGIFNALAHGVWAWFSMYILKLGCLDGWPGFIISLSSFESTFYKYAKLHLKQK

SEQ ID NO: 1949 - protein, 279 aa, Unknown
  Description of Unknown: bacterium BMS3Abin08 sequence
MKAKMSKLKDGLSVVVIAKNEENILNRTLRHITGIADEIVFIDTGSHDNTVEIAGKFRCRTFEFQWCDDFSKAKNFGVEQARYKWILNIDCDEVLYDKNAKLLIEKACRINNKPAYIIWQDNLYDNGGVGQVKVMRLFRNDPGIRFRNHVHESICESVYRNWPGYKPEVVDIHLRHYGHLSFNATGKHERNIGILRKWIESDPDNIYANYKLAMTLFETGRIEESLPQFEKTFDVISEVKDKNTYPFIGDFMNFYYRILVDSGFAEKACGLRGIVEAWV

SEQ ID NO: 1950 - protein, 255 aa, Hymenobacter sp.
MRAVPLSVVIITFNEEANIARCLEAVRGIADEVVVIDSFSTDRTVEICREHGAQVVQHAFAGYVQQKNFATAQAQHDYVLQLDADEVLTEELRQSILAAKQNWRGSGYTMARLTNYCGTWVRHGGWYPDRKLRLYDRRQGQWMGLLLHERYEVSSGEPVGMLAGDALHYSYNSVEQHVAQLNRFTSIAAEELWIRGKRNVSLFQLVVKPWWKFAHGYFFRLGMLDGFAGLSIATISAWGVFLKFAKLKTKNSGAK

SEQ ID NO: 1951 - protein, 262 aa, Amphiplicatus metriothermophilus
MARDAKPPVSAYIRARNEARMIADVARAALQVADEVVVVDSGSTDDTARLAAEAGARVVRQDWLGNGHQKRFAEEQCRHDWLLDLDADEIVTPELAAEIRALFDGGEPPRPVYRTPMAIAPPVGEPWTRFGLAKRCKLYDRRVVRAPAHAAWDQFAVPAGVKTGRLKNPIIHHAFADTAHLVDKLNRNSSTRARELAPKPMPVLALRVFFGLPFYFARRYLLDGLFRGGVYGFSFALLSAWGRWLRDVKMFERRKKEAERRK

SEQ ID NO: 1952 - protein, 262 aa, Parvularcula bermudensis
MTDHAAARPPLSCYIRTKNEARLIGEVVEAALTVAREVVIVDSGSTDDTVARAQAAGAQVYDVAWRGTGRQKRAAEDLCHYPWRLDLDGDEVLSPDLAKEIAALFEGEGPSAAVYALPMVIAPPIGPIWWRVDPDQRNKLYDARVIRMPDSAAWDQLDIPKTMKVPKLRHPIIHHAFTDIGFLLRKQERNMTQRAKSAPLKPLWQLRIRIVLGLPVYFLKRYVLKGLFLKGIYGFAFSLTIAYGRWLKDIKMYERHRLGEGR

SEQ ID NO: 1953 - protein, 252 aa, Arenimonas caeni
MATPLPLTGVVVTRDEAARIARCLRPLLAVCSEVVVLDSGSTDDTVAIARSLGAQVEHQEWLGYASQKNTAISRASQPWVLLLDADEWLEPAAVDALRALFADGAVETADAWRLRRRAHFLGHRMRGGGFAREPLPRLFRRHLRYEIQPVHEQLDTRGQRVATSRIRIEHEIARCPAAHWRKLEQHARLWAEDQAARGRVALPGRGELAALAYVLKHLVLRLGVVDGLPGLRFHWLQARYARLKYALLRELA

SEQ ID NO: 1954 - protein, 263 aa, Parvularcula sp.
MTNPETRPPISAYIRTKNEARLVAEVVRAALQVAREVIVVDSGSTDDTVRLAEDAGAKVISMDWLGTGKQKRAAEDLCEHPWLLDLDADEVIPAKLAAEIAALFQNGEPAHKIYALRMIIAPPVGEPWRHVDPDHRNKLYDSREIRMPDSAAWDQLDIPSGTQVPKLKTPIIHYAFTDIGFLLTKQERNMTQRAKSAPLKPLWQLRFRMIFGLPVYFLKRYILKGLFLKGAYGFSFAMTIAIGRWLKDVKMYERHHFEKKDGK

SEQ ID NO: 1955 - protein, 251 aa, Aquimarina sp.
MVKLSGVIITFNEERKIETCLASLQGVVDEIVVVDSFSTDATEEICKKYNVKFVKQKFLGYKEQKNFAIHQATHNHIISLDGDEALSPELQKSLIKLKSNWTHEGYFMNRYNNFCGQWINHSDWYPDKKLRAFVKGKGEWKGINPHDSYKLYDPKNCGKLKGDILHWNYPTYSAYNIQIEKFSSISAQSYLELGKKASLWKILFNPSWAFFKAYFLRLGFLDGVNGFVICVQTANLTFLKYIKLRELTKKK

SEQ ID NO: 1956 - protein, 384 aa, Selenomonas ruminantium
MNGGWNIVFKGGQLVQDIKLSVCYMVKNEAENLPISLASVKDAADEIIVVDTGSTDNTKAIAIEYEARVFDFPWQDDFSAPRNFAIEQAKGEWILFLDADESFPKPLDRMELLNYLAGVSAEVVLLKLHNVDTLAEQHKFNTDWVPRIFRRRADLRYRGRIHEHISKQNGDLQVVYAPQRFYFLHTGYAECISEAKCRRDLQIMQQVISEGDWEPVYDYYLTDCYYGIHDYEQALAHAQSFARSGTVVHGGNGHTYRMILECMRALGLPDADMLPWAEEACRMYPDLPEFYAEQGMILCGLGRLDEAQMLLHTALRRYDTDTAETCHASYFSPEVAAKVAARLGEIADLHGEKEKAAVYFVQALDYCSTNKKVLEKAKKFLKST

SEQ ID NO: 1957 - protein, 554 aa, Helicobacter fennelliae
MIDVKINNAKKISICILVKNAQGTIKECLKALKDFDEIILLDNESTDSTLEIARGVSEEWTRDSRIVGNLEHEDSKDSKNSAKPAKPATIRIFSSPFLGFGALKNLAISHARNEWVFVVDSDEVIEQGIYAELETLDLSCVRAIYALPRKNLYAGEWIKACGWSPDFVLRIFNKSYTHFNENLVHESVILPSDSKKHYLKTALKHYAYDDVAHLIDKMQHYSNLYAKQNLGKPSSPTKAFVRGTWSFVRNYFFKKGILYGYKGFIISVCNALGTFFKYIKLYELNTHTHTICSLIITTYNQKERLALVLDSVRALNPLPFEVIIADDGSKEDTRELIESYARDFPCALKHIWQEDKGFRLSEIRNKAINASKGEFIIVLDGDMIVDSYFVGDYLKVSRKGVFVQGSRVILDSNITKKILESKNYHLAFTKKPLKARRCKILSKFIFKRSVLKAKVFDKKELIKGVRGCSMGFFKEDFARIGGFSEQFRSWGREDSEFVARFLFAGGEFRRLKFSAIAYHLYHDESPKTSLESNHQLYLETIKNKSKSCENLSEH

SEQ ID NO: 1958 - protein, 254 aa, Hymenobacter swuensis
MPAVPLSVVIITFNEEANIARCLEAARSIADELLVVDSFSTDRTVAICQELGARVVQHTFEGYVEQKNYATQQAHHHHVLQLDADEVLTEELRQSIGQTKTNWQGAGYTLARLTNYCGSWVRHGGWYPDRKLRLYDRRLGRWEGLLLHERYELAAGQPTPLPLFGDVLHYSYDSVEQHVQQLNRFTSIAAQELWLRGKRHVSLFHLLLKPWWKFVHGYFLRLGFLDGFAGLSIAVISAWGVFLKFAKLKTKSTA

SEQ ID NO: 1959 - protein, 260 aa, Halomonas sp.
MISANIIAFNEEANIADCIASARQVCDDVVVVDSGSQDRTVAIATELGARVVHQAYLGDGIQKNVALEHVKYDWVLSLDADERLTPEMVEAIRQLELAATEHDAFAFRRRNMIGSRWIQVCGWYPDYCIRLYNHRHARFADVKQHAKVIAANPKRLDADMIHHSFDNLGQLFAKPGRNFSGRAAKIMFQKGKRANAFSPFAHGLNAFVRKYVLQRGFMGGVDGMTVAVSAGLNSYLKYAKLLEYQRDPKVLEAEDFNKVW

SEQ ID NO: 1960 - protein, 266 aa, Mucilaginibacter gracilis
MIPVSVVIITLNEAHIVGQTIAKAQLISNDIVVIDNGSTDDTVQIARRNGCRVYQKAWDGYGANKNKGIELAEYDWILSLDADEIPDDKLIASLHQLVLCDCNQVYDIKFRSYIGKKQVRFGKWGRDHHVRLFNRTQVKWMAAQVHETLLIPKGVKRERIKGNIHHYSVKDVAELQTKSETYAALNAVKYYGEGKEASMLKLYVSPVFNFIKNYLFCLGFLDGKAGWQIARTTFKHTHLKYLLLQKMNNSKVAKKVYIQKKFAIEY

SEQ ID NO: 1961 - protein, 281 aa, Pontibacter ummariensis
MQPYNSGFPVSCYILTYNSARYLPQILQALEEAVEEVVLVDSGSTDATEAIASQYGARLVYRKFDNFIQQRNFGLEQCRHKWVLSLDSDEVPSADFVAQLQQLKKRLGNEEGPEAYRMERHWVLFGQEVRTFYPISSPDYPVRLFRKDVVTFGKGSNFVHEKPEGFTKAEVLAGAVHHYSCDSVEELYRKLNLYTSLAAKDMGRKGKKASLAKLIFSPVAAWFKWYLKKGGWRDGNVGFILGRYAYDYTYQKYLKLYLSSRAASELPKEHKQAIPGQELKA

SEQ ID NO: 1962 - protein, 517 aa, Neisseria sp.
MTSKIPATATMLVKNSERYLSEVLTALDGFDEILLLDNGSTDRTLEIAAGFKNTSIRKHEFIGFGPMKNLAARLARNDWIFNIDSDEVADTELMESIRAAVAENRMQKVFSLSRLNHYDGRLIKACGWYPDIIPRLYHRRFTQFSDRQVHESLKLPENTETQILAGRLKHYSFENAEGLIRKMQQYSTLYAEENRYKKPASPAKALLHGGVSFVKNYFLKRGFAYGSDGLIISAANAQGSYYKYVKLYERNRHITAALVITTYNRPDALELVLKSALAQTRLPDEIIVADDGSAQDTAEVVDAFKRISPVPVKHSWRPDDGFRAAESRNRAIAAASSDYIILIDGDMLLDPSFIADHLKLARKGRLIQGSRVILTEERTAALLENSSLPALSCFSTGIRKRTSALRLRLPAKIVGSHGNRKHKGIKTCNMGFFRDDALAVNGFNNEFVGWGREDSEFVARCYHAGMKRHNLKFAGVAYHLWHHEAERDSLPQNDALLQQTLFEGKIRCEDGIDAFLK

SEQ ID NO: 1963 - protein, 271 aa, Rhodanobacter sp.
MSTFPLTLVVITHNEADNIARCLDSVTFAAEKLVVDSGSDDDTVSIAQAHGARVLHQDWLGFGPQRNFATTACTHAWILALDADEYLTPELAAELQQRLPDLMAGSMPAAYLRRSTIYMGRPMRWYRPAVGEQMARLYHRDRARWSDARVHESLRFEGNAPTLQAPFNHVNNPTLPHKQLKVLRYAELKCRDWLDKGKPVRMWQAPFVYVLAFLKDYVFRLAFLDGWRGFIIAQTAASYALYKRMRYYEMVNHPESVSRAAHILTHHGIDR

SEQ ID NO: 1964 - protein, 219 aa, Leptospira interrogans
MAKSIPAKKKKQTQKKGILQESIGKKLSVAIITYNEEKNIKECIESCLEIADEIVVLDSISTDKTEMISKSFSSVRFYKQRFKGHIEQKNDAIALCKYDWILSLDADERISTELKNSILSFKQKQDDETLNGLQVSRLTYHMGKFIRHSGWYPQYRYRIFKKGNAIWVGENPHDYISIQGKGSKICGDIIHYSFRDLSHQVNTINQFSSIVAFTRQKKG

SEQ ID NO: 1965 - protein, 512 aa, Flammeovirga sp.
MTDKKIKNITVAIIVKNAEPTIEKCLKSLDAFEEIILLDNGSTDQTLEIAAQFDNVKIHHSEFIGFGPLKNLAASHAKNDWVLSIDSDEYPTEQLIDELSNLKLQDNQVGKVHRLNAYKGKIVNGCNWNNDKIIRLFNRTATRYHDVQVHESINLENVKVVNLKGKLLHDAFDNASELLQKLQYYSDLYADQHYRRKNSGPWMIVFKTFVSFLDNYFLKRGFLYGWRGILISMSNTMGVFYKYFKLFERNKSVSNSLVITTYNKTQELDLVLQSVASQTVLPDEVIIADDGSTSETKELIDSFRDRLNIHHVWHEDSGFRLAEIRNKAIAKASKDFIIMVDGDMILGKDFIKSYILKVKKGRYYQGSRVMISEEASETLKKENKSSMSFFSKGIKNHLNAINSPLLSSLFSKRKKTDIGTKGCNMGFWKEDIDRINGFNEDFKGWGREDSEFVVRMLNSGIKRINFRFGAVAYHIYHEERSRGNLGVNDELLQSAIDNKLAFCENGIQKYYE

SEQ ID NO: 1966 - protein, 290 aa, Leptospira barantonii
MGKSIPTKKKKTAKKTQTPDSTSGIKLSVAIITYNEEKNIGPCIESCLDIADEIVILDSVSTDKTEKISKSYPSVKFYKQKFKGHIEQKNDAIALCKFDWILSLDADERVSPELKNSILTFKQKKDDETVNGFQVSRLTFHMGRFIRFGGWYPQYRYRIFRKGSAVWVGENPHDYISIRGKGNKIYGDIIHYSFRDLTHQVNTINQFSSIVAYTRQRKGKKFSSLRTIYKPFSKFMETYFFKFGFLDGFPGWVIAVSSAYSTFLKDAKQYELEKGMVERPSNVKEDYGRG

SEQ ID NO: 1967 - protein, 526 aa, Helicobacter canadensis
MKKIKISAVLIVKNAEATLQECLDSLQNFDEIILLDNGSSDNTQKIAQDFNVLHKNLKIYTSEFIGFGALKNLAVSYASNDWIFSIDSDEVLESNTFELLAKLFSNLEDFPPSCTLIAMPRKNLYNGEWIKACGWYPDFVTRVFCKNYTRFNDNIVHESIVIPKDAKVLKLDSGLKHYAFNGISHLLEKMQRYSTLWAQQNANKASSPLKAIIHGSWTFFRNYIFKKGFLYGYKGFVISVCNGLGAFFKYMKLYENTIQKPKSVSLIITTYNQKEKLALVLDSVRDLSVLPTEVLIADDGSKEDTRELIESYARTFPCPLRHIWQEDRGFMLSAIRNQAIKAAKGEYIIIIDGDMILHPLFVADHLAFATPKVFLQGSRVILDSPASQAMLEARQNNQIKAYESAFNLGGFKAKRCRILARIIFEFSHLDSKFFDKKDFIKGIRGCNMSFYKSDCEAIKGFNENFVGWGREDSEFVARFLFNGGVFRRLKFAAVAYHIYHPENTRDMLESNHKIYLQTIKEKKILW

SEQ ID NO: 1968 - protein, 259 aa, Unknown
  Description of Unknown: Verrucomicrobia bacterium 12-59-8 sequence
MSRLPISISIISLNEEANLRRCLASVADLAQEIVIVDSGSTDRTAEIAAEFGAKFVHQDWLGYTAQKNHCLKLCSQPWILALDCDEELTPDLLNSIQNFFKSDAFVRFDGAWMSRLVWFMGRWIRHGDWYPDRKIRLFRRDKSQWAADGGGQVHERLDVAGPCTTLQGDLLHYSFKNIQHYLVKHVQYSNVFLETQRSKGKHWSLLHTVFRPWWRFTRAYFLKLGFLDGFPGLWIAVATAFFTFDRYSRMYESAAEGRK

SEQ ID NO: 1969 - protein, 271 aa, Rhodanobacter sp.
MPTLPLTLAVITHNEADNIARCLDSVPFAAEKLVVDSGSDDDTVAIAQAHGARVVRQDWLGFGPQRNFATTQCSHPWILVLDADEYLTPALSAELQQRLPALIAGDAAAAYLRRSTIYMGAPMRWYRPAVGERLARLYHRDRARWTDARVHESLRFDGSAPTLRAPFNHVNNPTLPHKQLKVLRYAELKCRDWRDKGKPVRMWQAPFVFALAFLKDYVIRLAMLDGWRGFMIAYTAAGYALYKRMRYYEMVNNPESVASATDLLNKHHLDR

SEQ ID NO: 1970 - protein, 277 aa, Luteibacter sp.
MASHSLTLVVITYNEAHTIARCLDSVPFATEKVVVDSGSTDDTVAIAQAHGARVVHQDWLGFGPQRNFATTQASHDWLLALDADEFLSPELAAELESALPSIQASGDAAAFLRRRTIYMGAPMRWYRPAVGEKMARLWHRERARWTDARVHESLRFDGAARTLRAPFDHVNNPSLVEKQLKVLRYAELKCRDWYDKGQSPRMWQTPFVFLLAFIKDYVFRLAMFDGWRGFIIAQTAASYAVYKRMRYYEMRHNPASRESAATALHRHGLDRGSETPT

SEQ ID NO: 1971 - protein, 289 aa, Leptospira adleri
MGKTIPAKKKKTEKKTGTAPFTKGKKLSVAIITYNEERNIGECIESCLEIADEIVVLDSNSTDNTEKISKSYPNVRFFKQKFKGHIEQKNDAISLCKFDWILSLDADERVSPELQSSLRKFKEEEGFEERNGFQVSRLTFHLGRFIRYSGWYPQFRYRIFKKGNAIWGGENPHDYISIQGKGGKLSGDIIHYSFRDLTHQVNTINQFSSIVAMTRQRKGKRFSVLRTIYKPFSKFIETYFFKFGFLDGFPGWVIAVSSAYSTFLKDAKQYELEKKLIERPSNVKEGYGS

SEQ ID NO: 1972 - protein, 262 aa, Dyella jiangningensis
MKREPLSVVVITYNNADTLDACLNQVDWADEIVVLDSGSTDDTVAIARRHGARTAVHPFDDYGPQKQRAYDMATHDWILNLDADEILSPGTRQEIERALTAPRHAGFRLPRRERMFWTVQHRWSWRNGHLRLFDRRRGGMNDVEVHSAVEVRGPVRTLWRADFVNDGDGDIATRVEKINRYTTGMVAYKLRKRQRFTGLRMVFYPPVFFLRQYIGKRYFLNGWAGFIASVTGAFYAFLKYAKLHEARELAARDLKKGSRTKA

SEQ ID NO: 1973 - protein, 311 aa, Leptospira interrogans
MTEKEFILPLEKEPIPGINQTDGKINSSQEKKQTQKKGILQESIGKKLSVAIITYNEEKNIKECIESCLEIADEIVVLDSISTDKTEMISKSFSSVRFYKQRFKGHIEQKNDAIALCKYDWILSLDADERISTELKNSILSFKQKQDDETLNGLQVSRLTYHMGKFIRHSGWYPQYRYRIFKKGNAIWVGENPHDYISIQGKGSKICGDIIHYSFRDLSHQVNTINQFSSIVAFTRQKKGKRFSILRTIYKPFSKFIETYFFKFGFLDGFPGWVIAVSSAYSTFLKDAKQYELQKEILERPSNVKEDYGRH

SEQ ID NO: 1974 - protein, 517 aa, Helicobacter cinaedi
MQKLPISVTILVKNAQSTFSECLSALVDFDEVIVLDNGSDDGTLDIAKKFANVKIYQSEFIGFGALKNLAISYATHEWILSVDSDEILESSTLEQIRLALSSMQPHHIYAMPRKNLYNGEWIKACGWYPDYVWRLFNKTFTRFNDNIIHESVILPKNAKLIKLTSGLKHYAFRDISHLLDKLQRYSSLWAKQHSFKRSSPLKALTHGLWTFVRNYLFKKGILYGYKGFAISVCNGLGAFFKYLKLYELGQTPPTCSLIITTYNQKERLALVLDSVKNLAFLPNEVLIADDGSLKDTKELIENYQKSFPCPLKHIWQKDDGFRLSEIRNKAIKAASGAYIIIIDGDMILHPHFVKDHLHFAKKGAFIQGSRVILNEKNTQEIMDSLSYHLAFKYGDMKAKKIPLLAKMIFATSTIKASYFDKRDFIKGIRGCNMGFYKADCVAINGFSEEFIGWGREDSEFVARFLFNGGEMRRLKFSAIAYHLYHKENTRSMLESNHAIYLRTIQNKSTFCQKGLKS

SEQ ID NO: 1975 - protein, 742 aa, Lactobacillus agilis
MSDEYQAGLDALQAGKVQLAKELFAASDDERASGELAKLATRQKDQLISACLITKNNQRTLAECLASLYRYNFEIVIADTGSTDKTVEIARQFTDKVYHFDWVNDFAAARNFAASKASFDYILTLDSDERLVGGSKEELQDFFINTDTKKTVGLYKVVNILSSGKKQNQVINNVIRVYDRRYCKYYYRIHEQVGLIADESALLDTKVLKFRTIHYGYQDEKLLQKKSQRNVELLLAQLAVTPDHVYFIYQLAKSYYILKNYQQSFEYFAKFFLIQKNYRLQWVRDGIDAYLKLCIKTKRYDKALECVNLCQEQCQDSFDMLCIFATVYVVTDNDEQAIRALKKALTLASPDKGEFGWTTADACKDLAKIYERQGRWVLAKEMLTKVGDEKLKLNLDQQLTVVVLVDEETTKLTACLQSLAVLRANYLILVRGTNPQTITLARQYSQAVYHFSGQEDELGNYCLTKLTTDYGLIVHANEKLLGADPDVLKQITSKKAAIVGRVRIKVPVKGDEFGRQTHELRLLVKSYSKFNGPNLTDISSRKPRQLLKQVELPLILAKNLTYEAYYQSEVAKQTRLKASLKQKPNPTASFELAESYYHFENYEAASQAYLDFLSGPLELAKEETLTAVTNLISALIEVKDYQGAFNIVTTFNPYYQGLSDFQFAAGLAYMNIGQFADALTAFENARKLANSDSLGINTYLSYYQQGVIHEAMGNKQQALGAYRLAGKYELAKAGVERLLRKK

SEQ ID NO: 1976 - protein, 271 aa, Dyella jiangningensis
MPTFPLTLVVITYNEANSIARCLDSVPFAAEKLVIDSGSTDDTVAIAQAHGARVVHQDWLGFGAQRNFATTQCSHDWILALDADEYLSPELAAELERRLPELMASDNSAVILRRATIYMGAPMRWYLPSMGEKMARLFHRDRARWKDVRVHESLVFDGPSVTLHARFNHENNPSLPQKQIKVLRYAELKCRDWLEKNKPVRMWQTPFVYLLAFIKDYFFRLAFLDGWRGFVIAQTAASYAAYKRMRYYEMRRNPASLESAADALIRHGIDR

SEQ ID NO: 1977 - protein, 272 aa, Unknown
  Description of Unknown: Verrucomicrobia bacterium sequence
MPFPLSISIVAHDEERNIARCLESATDLAEEIVVVDAGSNDRTREIAAGFDAKVIHQEWLGHRDQKNVALSHCTKPWVLALDCDEFLSPDLWTSISSFFREGLPEKFDGAWCNRKTWFLGRWIRHGDWYPDRQLRLVRREKARWGGSPEHDKIDIHGPTMGLAGDLCHDSFPSMNRYIEKINIYSDVFLQRQNQLGKRWSLIQNVARPLWRFFRAYVLRRGFLDGYPGLWIAVATAFSTFVRYSRQYEEESRQKNASCDSPLISRPDRPEIS

SEQ ID NO: 1978 - protein, 254 aa, Thiothrix nivea
MANISGLVITYNEATHIRACLESLLKVCDDVVVVDSLSTDGTAEIAQEMGATVRARPFLGYGPQKNFGLPFCRHVWVLSLDADERLDADAIADIRSLDLDNSAHDAYEFRRKNLFHGKWIKCTSWYPDHVRRLFNRDKARFSDLQCHEKVETGNSKQLASHIIHYSYRDYQHMLHKLNQYSSQYVEDNVGRKKPISAWSPPLHGLFAFLKNYFLKRGFLCGFDGFTISLLNALGSYMKYAKLLEKQRYGSKGEQ

SEQ ID NO: 1979 - protein, 422 aa, Streptomyces hygroscopicus
MPGATSHVPLLSVVIPTYNRAALLDRTLGTLARQTTALEDFEVVVSDDGSTDTTRDVVRSYEDRLRIKYVFQEDLGYRVASARNGGARLASAPLLAFLDTGVLAGPQYVQSVLAAHAGPAPAKVVLGCCYGYDPRNPHPELHSLVEEFPPEEAVRRVGDAPWFQDMRLPEFTAVDFDLSRMHMPWLWFWTLNVSLPAADFWRVGGFDEDFTGWGGEDIELGYRLHAHGIPMTVSRESWGIEAPHERTHEANVSSLMLNCDRFVRKHPSLLPELFWAVTNRGIFGSVETERLRFEEWASQARGQQVLDEIAIGLDTLPPSQHTQRVAVFGSGTEGLPITPRQNVELFLCDYDEGVLARQESRDDAAVSTWHLSGLRTPWPDQHFDLVIITSRMDGPRQAWGEAFTKEAHRIASSVVEPSLRGD

SEQ ID NO: 1980 - protein, 266 aa, Unknown
  Description of Unknown: Litoricolaceae bacterium sequence
MSKVSCYIIAYNEATKIRPAIESVVEWADEVILCDSHSTDDTAKIARELGARVVQIDFSGFGALRNGAIAHCRHEWIFSLDSDERCTPEARDEILSIVRQNNQSGPVAYFMPRNNYLLGRWVKHSGWNPDYRQPQLFRRGLLSYTLEEVHEGYICDGPVGHLTQPIWQFPFENLEQMLHKAQRYSSLGAQKLLKKNKVGGMGPALIHGLSMFLKIYLVKSGWRDGRAGLVIAIGGFIGAFYKYAKLAELQNDWTEPTMPKVGKPDS

SEQ ID NO: 1981 - protein, 311 aa, Pseudomonas panacis
MKRETVSVIILTYNESLHIARAIESVRAFSDEVLVVDSFSSDDTCEIARRHGALVVQHAFVNQAKQFQWALDNLPITGNWTMRLDADEIIEADLAAQINTRLPTLDQGITGINFKRKHIFMGRWVRHGGRYPLKMLRLWRTGQGRIEDRWMDEHISVAEGRTITLEGGFADHNLHDLTFFTHKHNQYATREAIEIINSRLGLFAVRHELNEGHSSFQAKLKRLVKNRVYNRVPFTLSSTAYFLWRYIVQLGFLDGRSGLVYHLLQGYWYRFLVGAKVLELETAIAHLDDKDSIVRELSKLTGHNLTLPIPK

SEQ ID NO: 1982 - protein, 253 aa, Hymenobacter wooponensis
MPAVSLSVVIITYNEERNIARCLEAARGVADEVVVVDSFSTDDTVSISQQLGARVVQHAFEGYVQQKNYATAQATHNHVLQLDADEVLTAELRQSILAAKQNWQGAGYTLARLTNYCGSWVRHGGWYPDRKLRLYDRRLGQWEGLLLHERYEVAPGQSVGVLTGDALHYSYDSVEQHVQQLNRFTSIAADELWLRGKRRVSLFHLLLKPWWKFVHGYFFRLGFLDGFAGLSIATISAWGVFLKFAKLKTKAAA

SEQ ID NO: 1983 - protein, 255 aa, Acinetobacter sp.
MIPCSVYIVTLNCGAWLQDTLESVKDFTEVVILDSGSTDDTYAIAKSFSNTRIAHQDWLGYAAQKSLALSQCHQDWVLNLDGDEVLSPELKAEIEQTIKADQIDALITPINDVFLGVPNSKHTKKHAKVRFFRKSKGHYDLENKVHENVIIDGQSVRAEGDIYHYGESSIFVKVEKNNQYSNLKAAEKFQKGKKPSLLKLSLVMPVTFLKSYFIRRSCLNGWRGFVNSMINAFYAFLKEAKLFEQYQNAKKEQDK

SEQ ID NO: 1984 - protein, 250 aa, Leptospirillum ferriphilum
MRLPLSVCILTYNEEANLSDCLASVRELADEIVILDSGSQDQTSRIAEKFGARFIVHPFDDFGSQYNRLFSLATHEWILNLDADERLTPELAQSIQDVFSKKNNLMEFQGFSFNRLNYFIGKPIRHSGWAPDPLVRLFRKDSGEMERRKVHVQILVRGKIGTLAGNFLHYTYRSLDSYLQKSIQYARLAAMEMKKNGRTPSLFPLFTHPIAMAFKMYILKKGFLDGKEGVFLAILYSYYTFLKYLYLYYL

SEQ ID NO: 1985 - protein, 263 aa, Unknown
  Description of Unknown: Methylobacterium sp. 17SD2-17 sequence
MDAPTQPDRALPVAVSCTIIAQNEADRIVRCIESVKGIAREIVVIDSGSTDETVALAERHGAVCHFNPWTGYGQQKRFAEDKARHDWVLNLDADEWLPEPVRAELIDLLSRPIPPEIHGFAFTISHVYPGHARPRPLADYHTYVRLYDKTRCRFPESSVFDEIKLAPEHRGRVRAPVYHQSIRSLGHLIAKNKAYFRLQAREVRKPRLPTLLRIFVEPVTTFLKYYLVRRHITGGVYGFLVASTIAGLRTYRLALFLKGRREP

SEQ ID NO: 1986 - protein, 255 aa, Unknown
  Description of Unknown: Acidobacteria bacterium sequence
MSLSVAIVAMDEEANIGRTLASVRWADEIVLVDSGSKDRTREIAHEHGARVVEEPWRGYVAQKQYAIELCTKDWVLLLDADEEVSPELTEEIREALANPGDMNGFWLPRQNLFLGRWMQHGGFYPDPKLRLFRNGIGFVTGHDPHDRCELQPEVAQRSRQFRNALVHYTYPTLSYYIAHMNRYSSLGAELAVSQGRQSFSVADIVIRPLATFFYNYVVRLGFLDGGEGLLMHLYHAVYVSWKYAKAWEMTRIKSH

SEQ ID NO: 1987 - protein, 254 aa, Unknown
  Description of Unknown: Comamonadaceae bacterium sequence
MNLSVILIARDESANLKACIDSVATADECIVAEYGSQDDTLQVASDAGATVIVTADWPGFGPQKNRALQAARGDWVLSIDADERVTPALMAEIMQAIRSGDADAYEIPRLTQFCGRWIHHCGWTPDRVLRLFKRDAAVFSDDLVHEKLVMKSSTPMVRRLKNPLLHYSYPTPAHYWRKLERYSHDWAVQRHARGQTTTMTRAALSGCTAFLRSYVFRLGFLDGAMGFAVCTMQAQSAFGKYFELYCLERQNEKS

SEQ ID NO: 1988 - protein, 263 aa, Unknown
  Description of Unknown: Candidatus Eisenbacteria bacterium sequence
MTRLSVVIPTQNNEDTLPAALASVAFADEIIVLDSGSVDRTRDIALGAGARVVERPYRSDGDQRNAGWAEAAGAWVLALDSDEALDSTLAEAVRGVASKDPNAGDPVAYALRFRCHFLGFPLDHGGLDRDVHVRLGRRERTRWESALHSSLIVDGPVGRLPGVVDHFTATELPGRLRKLAAYAADRAERMRASGVRPSVPRALWEPSRFFLGRVVIRGGWRDGLPGVVWWWLQSTEILLAYLLLYRRSRPGSEGPRSTGSRPA

SEQ ID NO: 1989 - protein, 263 aa, Desulfotignum phosphitoxidans
MAKLSVYIIAFNEQDKILDAVQSVAWADEIIVADSFSTDRTAAIAQDIGARVVQIPFKGFGDLRNQAISACTHDWIFSLDADERCTRAAREEISRIIHDPDSKDAYYVPRRNYFMGKWIRHGGFYPDFRQPQVFRKGALRFENDAVHERYEVISQQPCGTLKSFIHQIPFKNLEEIIHKANRYSTLGAQKMFEAGKRPGMASALLHGVWAAFSLYVLKLGFLDGWPGVIIALGNFEGTFYKYAKCHLQSKNLASFLDTDLPEN

SEQ ID NO: 1990 - protein, 277 aa, Unknown
  Description of Unknown: Desulfobacterales bacterium CG23_combo_of_CG06-09_8_20_14_all_51 _8 sequence
MTKVSEKTYSLSVIIVAMNEADRIIPCLDSVAPIADEIIVFDSGSQDRTVEICRKYTDKVFVTPDWPGDGPQKQRALGKAVCQWVLCIDADEVLTPELREEIHAVLISWPVEKGFKLKWLPVIFGHKLYHGRSARAPLRLFQREGAGFSTAVIHGKLTLAPGRIGKLKGRLLHYTHRDFEHYLYKNRLYAWIGAKNRFEAGKTGFGLSGAAFRALLTFIVVYFLRLGFLDGRVGFLVAVMYSQSSFNKYAGLWTLRQESAMKQAAAMKKKAGDSGDR

SEQ ID NO: 1991 - protein, 262 aa, Luteibacter sp.
MAQRSPDATRLPISVCVIAQNEADRIVACLTSASFCDDLVVVDGGSTDDTVALAESAGARVIHRPFDGFRTQKDFAVAAARHEWVLCLDADECVDLGLRAAMEKRFAEGFGDTAAFRIVRRNRFLGKVMKYGNAGSDRVVRLFDRRKAGWHGAREIHESVVVRGETRAIDGWLDHDPYRSLSAMLAKQERYAHLMAEEAFAKNKRTGLAQIVLSPMFRFLKGYVFRGGFLDGWRGLVYALLRVEYVRRKYLKQYLLQKGFKP

SEQ ID NO: 1992 - protein, 386 aa, Mobilicoccus pelagius
MPADVFAQAQNGLRTNDGQVIDPQLRHRRDSPMSDRSPRLSLAMIVRDEERCVARALDSARPLVDEMVVLDTGSVDATPRLAREHGARVESFEWPEDFSVARNATIERCTGDLVLILDADEWIEADDADTLRRWTAAATPGTAGLVTVASETESEGRQVTSHTESVRLLPRSCRYVGRVHEQPQGYAQTEPVPGVVLRHDGYLPEQSRRKQGRNERLLLRSLNDDPGNPYLLFQVGRERQIAGDFAGACAAYEQALPGITDSTPWRDELRARLLFSLEREGRHADALRSAQEILRSPDVSAEVLLAAGNLFVDLAGVHPQKHAAFLQMARRAWLTCLEVGDPTDGRDHTPGCGGHLAATNLAALSTGLGDEEGARFWTKRADELRR

SEQ ID NO: 1993 - protein, 270 aa, Phycisphaera mikurensis
MKLSVLICCADAADTLPAALASVTPWADEVLVVDSGSEDATPRIAADAGARVVEEPWRGYSEQKEFGITLTRNPWTFVLDGDEEADPVLQRELCSLGDGFERSVDLAWMRRKNYVFGRWVRAWSPDWQSRLFHRDRVSWTGHVLHDQREARRPGAVRRLRGHLLHKRVSTAGFEDYFSGARLDARLMMQARQMHAAGKRTRFFDLAVRPPATVFKQLVLKRGLLDGSFGWMMAQKTATTTQLKYAALRAVEMDAAREREAPRAQPGSSQG

SEQ ID NO: 1994 - protein, 284 aa, Paenibacillus sp.
MDSVKGVLGGPGSYPISVVIIAQDDEVRIAKAIASCRRFADEVVVIDGGSKDGTVRLAESLGCRVFVNPWPGYAKQREFGVERAVHDWVFLIDTDEVVSEELAEDILQRKPGLTDRTTAYSLYRIGDFLGRWLDKGEYLVRLYNRKAYGIRNSLVHEMPDVEEERMVRLNGVLWHHGFRSINDHVARFNKYTDLEAQTAYASGKPFKLSRLLVRPPARFVQKYVVQGLFKKGMSGFAVSVFWVMYEFMVGFKHYELVKSGKATRENAAVPAEKESKGERGYAVQ

SEQ ID NO: 1995 - protein, 656 aa, Thermosinus carboxydivorans
MVRTISLCMIVKDEEANLARCLNSVRGAVDEIVVVDTGSTDRTRAVAELAGAKVISRKWQDDFSAARNASLELATGDWILFLDADEELAPGSADVLRRVITDECEGYFMKVVNFIGAADNIETVPDLVFRMFRNKPEYRFRGAIHEQIVDVILEKNKQAIFKVAEGIVIRHYGYLQQHIIAKDKINRNLSIITRECANDPDNKTLRYHYGVELYRAERYLEAADELAKVAAAVDSGVVYYPKLLRYIALAYYGAREYELALAAITKGLQLFPDYADLYYYGGIIQLEQQAYAGAWEWFQRAIATPEQPAYYASFAGCRGFRAYYQLGALAEMFGDEEEALRYYILSLRDNAEFALSLKAIVRILNPRKYPEYAMRAIEKICEFCTADAYRLIGMICFAEGAYELALNYFEKIDSSSIEAYTEVLKAICLIQQQRLMEAIRILDKMPPGHPQFPLAQFNKIVGFWLLKNRKKVRSLCDEFLAAGLSADASKVVAMLKDSLYTRRSVPLQVLGKEGIDLVKDIVLRALDRRELALAQGLLARLDKTVQKEYALELSHVFSKYEYWDIALEYAELYLQEHDDSAEAWFHLAEILVQTNQFERGSLCYHRAITIDTRRPQYYVKLIKLYQAMRRKLLGDAAQQFPQMPIFKQLLEEAPQE

SEQ ID NO: 1996 - protein, 275 aa, Unknown
  Description of Unknown: Methylobacterium phyllostachyos sequence
MPAAGATGALPLSIFLIAHNEADRIGATIRAVRDLTDDLVVVDSGSTDGTLALAESLGARVIHNPWPGYGPQKRFAEEQCRHVWLLNLDADEVVPEALAREIRALFAAGEPPRPAWRIGIAEVFPGEARPHPLAYTLTPVRLYRKDRGRYAASPVHDRVALEPGVTAGRLKGVIHHFSVRSLGDQLDKLNRYSDQQADDLEARGVVIPSWRVFVELPGNFLKAYLGRRHFVRGTYGFLTAMNYAISRHLRIAKHVERRRLAAARQDRVDPPGPTF

SEQ ID NO: 1997 - protein, 267 aa, Cupriavidus oxalaticus
MTDTRATISVIIVAMNEAHDIGDCLASVRDWATEMIVFDSGSTDGTQDICRSYGARVFETDWPGDGPQKNRALDQATGEWVLCLDADERVGDELRAEIFAVLEGRAPDPSHVAYSMPRRSSFCGRFMKHSGWWPDRITRLFRRGKGRFTDVRTHTHIELQGTTGRLRHPIIHISIPTLHEALDKNNVYSSEGAKTMYEQGKRSSLAKAIGKGLWAFLRTYIFRLGVLDGQEGFMLAVANAESTYYRYLKLMLMCKAADKAARQVYTA

SEQ ID NO: 1998 - protein, 269 aa, Luteimonas terricola
MPTPISATVITFNEADRIGDCLAALAFCDEVLVVDSGSTDATREIAAAAGARVLVRPFDGFRSQKQFAVEQATHDWVLSVDADECVTPQLAASIQAERARGFEGAAGYRFARCSEYFGRYLRHGNAYPDRKLRLFDRRRGGWRGDREIHETASVDGPVRTLAGDLLHHPFRSFEHQLAKGRQYAQMMAEHANARGRRATLGKLVLAPAWRFWRGYLLRGGFRDGWAGLVYAYVTADTARQKTVRLWLLQRAAGDVSSAPGPNNRSGGAA

SEQ ID NO: 1999 - protein, 259 aa, Pseudovibrio sp.
MSQVLPPISILIRCFNEADRIGRTLESVKELGQEIIVIDSGSTDDTVAIAKSHGAKVVYNPWKGFGPQRSFGETQCSFDWVFYIDADEVVTPGLRQELTQMFAIGEPVHACYLVRNTMVLPGDSKPRLFADFRKVPRLYNLKHARIKLDPSYDRMQLDDGYKMGTLRNPQHHYSFRTWAHALSKLNYTSELAAETQKQKPIWLLRLRLVTELPVEMFKYLFVRRFIFAGWKGFAFAATQSFSRFSRILKMLEKQQNVQH

SEQ ID NO: 2000 - protein, 285 aa, Eoetvoesia caeni
MTTTRGADSALDGEAAEAGSTRLRQLQNDAAPFTAAKATLSVIVITKDEARHIGDCLDSVSFADEIIVVDSGSTDGTRDIAQAKGAKVHITEDWPGFGPQKNRALDLATCDWVLSIDADERVTPELKQAILRELAAPRAQAYKIARLSNFCGRWIRHSGWWPDHVLRLFKRTTARFTDAAVHESVKAQGQGAVLEGHFLHYPYADMDAMIGKVNRYSTDAAQMMHARGKTTSIPGVLGHAFWTFVRIYIIRRGFLDGKEGLILAITAATGSFFRYSKLWFLNKSK

SEQ ID NO: 2001 - protein, 276 aa, Stenotrophomonas panacihumi
MSSSTAPSERPRLSACIIAFNEADRISDCLASLAFCDDVLVVDSHSTDATVALAQAAGARVLQRPFDGFRSQKDFAVTQAAHDWVLCLDADERVSDELRASILAARDGGFAGQAGYRFNRLSDYFGRFLRHGNAYPDRVLRLFDRRRGGWRGKREIHEAASVDGPVATLRGDLIHYPYRSLEQQLAKTQRYARMMAEHEHARGKRASWSKLVLAPAWRFWRGYVLRAGFLDGWRGLVYAYVRANYVRQKSIMLWLLQHGQPVGDPPRAPDQPRRNG

SEQ ID NO: 2002 - protein, 308 aa, Unknown
  Description of Unknown: Rhodopirellula sequence
MSHLTSVSVVVIAKDEAHIIQSCLDSLSWADEVVVVDDYSSDHTPSIAERAGARVITHRFDTFAGQRNWALKHARLRNEWVLMLDADEACTPAFTEAIENALNSVNDDTAAFKMCRKTMLSGRWLRYSDGYPVWIMRLVRNGRARFEDSGHGEVPVPSVDGRVQTIVEPFVHQPFSRGIQHWWDRHIRYAQREAWQECQEAANLDFRALVARDPSQRRAALRAFSRRLPCRAAFRFCYQYLFKRGFLDGAAGLQFCRMMACYEQMIVTKKWELAQSMLAESCVDRHKALLPTNPPTNQAVDEPRVHAV

SEQ ID NO: 2003 - protein, 266 aa, Unknown
  Description of Unknown: Sterolibacterium denitrificans sequence
MTPSPLASQGEAVPAPLLSVVVITKNEAHCIGACLEAAGFADEIVVLDSGSTDDTLTIAAAHGARVHVCADWPGFGPQKNRAVALAGGRWILSLDADEIVTPALAAAIKQAVSPDAAQDIAGYWIERRSLYCGQLIRFGDWRNDRVLRLFRRGAGRFSDDVVHERVICDGRTATLAGYLRHDSMTSFAELREKTERYARLGAAKLCARGKGGFFSACLHGGWSWLRGYLLRGGLLDGRAGWIIAGQNARGTFLRYLWAAREKNRAA

SEQ ID NO: 2004 - protein, 358 aa, Roseateles depolymerans
MSSAPRPTRRVVLVVIARDEAAHIARLLDSVSPWVDGMLVLDTGSRDATPQIAAACGARVEHFDWCDDFSAARNRALTLAGGDWHLLLDADEWLLEGGEALLALRDQPTDFVGTLALDDRFDDGRPRSAQSRLSRVLPGSVRYAGLVHEQPEHTLPVRALPLRVAHDGYLPERLAAKRGRNAVLLERSLQQAPGDAYLWYQLGKDHAVYDRADAAEQAFARAAALPHPMGAWWLDLVPRRLFALKQLKRHADGVMLAEAEMAACGESPDFFFALGDLLLDFAADEPAQAEALLPMIEAAWRRCLEIGERPDLPGAVAGRGSHLAAHNLALVLELLGRAADAAELRAAHGLAQPVGAPA

SEQ ID NO: 2005 - protein, 266 aa, Stenotrophomonas acidaminiphila
MSSSRPPAISACIIAFNEADRIGDCLASLAFCDEIVVVDSYSTDATVAIAQAMGARVLQRPFDGFRSQKQYAVEQARHDWVLCLDADERVGETLKASILQARANGFGMAAGFRFARLSDYFGRFLRHGNAYPDRVLRLFDRRRGGWRGTREVHEAASVDGPVQRLAGDLVHYPYRSLEQQLAKTQRYARMMAEHDFARGRRATLTALVLSPAWRFWRGYLLRGGFRDGWHGLVYAYVRANYVRQKAIMLWMLQHGLPVSTPTATQD

SEQ ID NO: 2006 - protein, 263 aa, Unknown
  Description of Unknown: Desulfobacteraceae bacterium 4572_130 sequence
MISAYIIAFNEEEKIGAAVKSVKWADEIIVVDSNSTDKTVEIAESLGAKVVQIPFKGFGDLRNKAMQACTYDWIFSLDSDERCTKEAEQEIKKIVIDKDSVDAYYIPRKNFFMGKWIKHSGFYPDYRQPQLFKKGTLVFKNDPVHERFEIKTLKPVGYFKNHIYQIPYKSLEEILSKANRYSSLGADKLDQAGKKPAMYKALLHGIWAFFDHFIMKLGFLDAWPGFIIAFSNFEGTFYKYAKLYENKKCPNPVTHLNEKIEKN

SEQ ID NO: 2007 - protein, 261 aa, Oleomonas sp.
MTDKLPLSAFIITLNEEDRLGPAIESLLPLVDDIVVVDSGSTDGTVALATRLGARTVHHDFAGYGPQKRFAEAQCGHDWVINLDADERVTPELAAEIRGLFAGGAPAQGGYHLPILQLYPHQTRPTPGAFEYDPVRLYDRSRSRYSDSPVHDRVVLGEGVSAGRLKGGLLHQSIRSLSHLIEKSNAYTDKQVADMLAKGRRVPALRLAVEFPLAFAKAYVGRRYFLMGAYGIIVSTTFAYFRFMRLAKLYEANLLRRRDKP

SEQ ID NO: 2008 - protein, 271 aa, Unknown
  Description of Unknown: Rhizobiales bacterium YIM 77505 sequence
MNAALPLSVFIIAKDEADRIGDTIRAVRDLTDDLVVVDSGSTDGTQSIAEALGARVIFNPWPGYGPQKRFAEEQCRYDWLLNVDADEVVPPPLAAEIRALFSTSEPPRPAYKLGIAEIFPGEEKPHPWAYTLWPVRLYRKDKGRYSPSLVHDRVDLAPGVKPGRLKTVIHHYSVRSLGDQLDKLNRYSDQQARDLELRGIEIPTWRIFFELPANFLKAYIGRRHFVRGVYGFLTAMNYAISRHLRVAKHYERRKLAKAGEGRAAAPGRAPW

SEQ ID NO: 2009 - protein, 530 aa, Selenomonas ruminantium
MPVSPARMGNRAGMPDAGGGSRFDAARSASLSSVDSAEGKAMKMRISACVIVKNEAENIGRWLESMQAIADEMIVVDTGSTDETVAMARAAGAKVYSFAWGNDFAAAKNYALEQATGNWILFLDADEYFTPASQAKVRPLLMRLEPHLKIEGVLCRLINIDTDDNNRIMTTLVQLRMFRNRRNLRYSGKIHEVLTLTKGRPLELANEIEIYHTGYSTHIVQAKLRRNLKIMEERIAANHGRTELLDDRYFMDIWYGLGDHAKAIAYAKRLLAHEELALDLRGRAYETWASCCIDDKHPAEETEACLAAAIRDCPQLAEFPLMRGLWHFDRREYLQAEQDLQAGLALTKDYPKDTVAGVMNNAARLLPSVYWRLGLLAQWQGDAARAQECYWQGLQQNRYHGGLLVTFWHFLQQQGIEAADCIAVLNVIYDKQADAAFLAQQLARQNGGLVYIYYAKQAGSSERPVLDCLAAGRPDGAAQLASKQLAFLYRLGLAAGDSKPSLMTALLPVGCEDIERAAQQMLKDMRDKDL

SEQ ID NO: 2010 - protein, 284 aa, Paenibacillus wynnii
MESVTSVLGGPGSYPISVVIIAQDDETRISSAIQSCRLFADEIVVIDGGSKDGTVQLAESLNCRVFVNPWPGYAKQREFGVERAIHDWVFLIDTDEVVSDELAADILERKRGLTDITVAYSLYRIGDFLGRWLDRGEYLVRLYNRKQYGIRNSLVHEMPDVSEDRTVRLEGVLWHQGFRSINDHVSRFNKYTDLEAQTAYASGKPFRISLLLLRPPARFLQKYFLHGLFKKGISGFAVSVFWVMYEFMVGFKHYELQSKNSLAQHNAEGQAEKEKKGERSYAVQ

SEQ ID NO: 2011 - protein, 262 aa, Hyphomicrobium facile
MPKVPISCFIIAKNEGDRIAQTIRSLRPWANEVVVIDSESTDNTVSVALAEGCRVITQPWLGFGAQKRFGEDQCRNDWVFNIDADEVVTPELAQEIIATFKNGNPKFVAYGLPIDLVYPGAEAPRPLARDHWYVRLYNRRFIRFRNSNVHDAVVTDGVAVGALKSPIYHYSMRSFADMKRKLDERTWLMVENAGSTSQGVLASRLIVELPMNFFKYYIVRRHWTGGLVGLRYASIQAVFRFLKIYRVLRSDKTKTSARDVTA

SEQ ID NO: 2012 - protein, 320 aa, Unknown
  Description of Unknown: Deltaproteobacteria bacterium sequence
MPCAGSIASSSSRNRRPRRCSRRCAPICTSREPTTPRTACPSASWWPRWAGARSSPAIPRIIPPPISSPACAGSSRYSVRLSATVIAQDEERDLPDCLASLRGFCDEVLVVDGGSRDRTREIARAAGARVLERPFDDFARQHEFARTEARGEWVLSIDADERASLELTRAELGGAHAAYSLPFKNHYRGVWMRHGGFWPDRHVRLFRRDACRYDLSRPVHEKLLVDGSIGDLDSPILHYTYASLDDCLGKMGRYGERAALALHAAGRRAGAWDVAARPLWRFLRSYFFQLGFLDGPAGAAMAWGKAFEAWVKYARLWELS

SEQ ID NO: 2013 - protein, 253 aa, Unknown
  Description of Unknown: bacterium P3 sequence
MERISAVIITQDEARNIGRCLESLRGVADEVIVVDSGSTDDTGSICRASGARFVPHPWEGFSGQKNYADSLAQYPWILSIDADEALSDDLRTTLMDLKKNGFAADTVYTLCRLNNYCGRWLRHGGWYPDEHVRLWRNGVARWDGVVHEQLQYVCPVRRQRLKGILLHYTYYSVDEHVRRTAKYASLAGEKAFEQGRRCGMGAVVWKPVGTFLKNYLLKGGFRDGSMGFVSARVSAFYTLIKYTRLFEKSKSKD

SEQ ID NO: 2014 - protein, 269 aa, Bosea sp.
MAPLSIFIIALNEADRIGRTLEAVRGLSDDVIVVDSGSTDGTQDVAKAHGARVIFNAWPGYGGQKRFAEEQCRHDWLLNLDADEVLPPDLAAEIAALFQRGAPPLDAYKLRIAEIFPGEKAPHRFAYALAPVRLYRKSKGRYSPSPVHDRVDLVPDARIGKLKGTVHHFSVRSLGEQMEKLNAYSDAQADDLDARGITVSGFRLVTEFPANFIKAYIGRRHALRGIYGFMTAMNYAFYRYLRAAKHWERRLRRNSGIDAPKSGGDSAGG

SEQ ID NO: 2015 - protein, 279 aa, Paenibacillus sp.
MNHMSSVPVDNRISVVIIAQDDEVRIAKAIQSCASFADEVVVIDGGSKDNTAQVSEALGCRVFINPWPGYAKQRTFGIERAQYDWIFLIDTDEVVNQELARDLVEKKATLHDPAKAYSMYRIGDFLGKWMNKGEYLVRLFNRRIYGITNSLVHEMPDVAEEQTIRLNGVLWHYGFRSISDHVMRFNKYTDLEAETAFSKGKSFKIMNLLFRPPARFCQKYFVQGLYRKGIAGFAVAVFWVMYEFLVCFKHYELTKRSKQVTLKNEEPAEKKGETSYVVQ

SEQ ID NO: 2016 - protein, 263 aa, Cohaesibacter sp.
MTSSRRKLPVSAFIITFNEEDRIATAIRSVVDWVDEVIVVDSGSTDRTCEIAAAAGANVSHNDWPGYGEQKRHAEDLCRNDWLLNIDADEEITHTLRDEIVALFDPLPDTDICKFEILDIFPHEAHAKSWGYGYWQYRLYDRHKGRFSDSSVHDTVRPLPDARIQTLKGKVNHRSMRSLSISVEKMNRISSMQRDDMLKRGRKISLWRVLTEFPLAFLKGYFLRRQFIYGFWGIVLAYNYAFSRFLRVAKMYEAELIEKNNSE

SEQ ID NO: 2017 - protein, 671 aa, Kineobactrum sediminis
MIQSKRGRQLLAALFLAGVGGSLLAPTMLSWATLLLAIAGLWLMHRQVLGRQGWEKPRELRLIHFGCWFFVLVYVLFWIASGFDYNALKELDGPARLIFFWPLVVAITWAKVRADTVFAAFAVAALGAIANVVADIWLGSVEVFAGIPRAGLAINLIALGNLALLSAALTLVGALYWFRAGHARLGWAAAVLAFLALAAALQTQTRSNLVALPVLLLLMLPLVSARYRLPVVAAGLAIIAIASLSSDRLVRTVTDMRAGQLDPPIESRLEIWDLSWGLFVDQPLTGAGLNGYTRAVERAIATEQVTAPEFVARCCRDHTHNDLLQSLATRGLAGGLSWLLLLSLPLLVFARYVRSRDITSAHLAVAGTLFPVGFFVFGLTEAAFSRTLFVTWYLVGVAAIAAALFLALNRACHRQRTVSLSAIVITRDEEAHIGACLQSLQGVVDEIVVLDSGSTDNTVAIAREYTDSVENTDWPGFGVQKQRALERATGEWVLSIDADERLSPQLAAEINHVLNAPDADAYKLPWAVTIYGTRLDFGRSGRAPLRLFRREGVRFSDALVHEKILLPEGRKVRTLRSRLVHYTHRDFGHALLKGAQYAWLGANEKYRQGKKVRTLVYPTLRGLLTFVQVYVLRLGFLDGSVGFLSAVLYAQVSFNKYAGLWTKARPRYGAE

SEQ ID NO: 2018 - protein, 277 aa, Chelatococcus asaccharovorans
MSISVLILTLNEENILPACLASVAWSDDVVVLDSFSTDRTVEIAKAAGARVYQRTYDNEHTQHTYGLKEIPFKYPWVYIPDADEITPPDLRDEMLAAVADPDCPEAGFRVRFKVIFMGQWLKHSSLYPTWVMRLVRPEKAHFEREINSVCVVDGPVGRLQAHFTHYSFNKGLNAWYEKHNRYSWHEARESLMSLERGSFRMSDLFSREAPRRRRAMKELSFRLPCRPTLRFLYMYFVRRGFMDGWAGYVYCRLLVAYEYMIVIKIAEIRRRRRGLPV

SEQ ID NO: 2019 - protein, 295 aa, Unknown
  Description of Unknown: Marinibacterium profundimaris sequence
MILTRDEARHIGRALASVSRIARRIVVVDSGSTDDTIRIARAAGARVLRHPWTNYATQLNWALDQLPPETGWVLRLDADEIVTPPLAHEIARQLPLQSPDTDGIYVSRRMTFMGRPIRWGGVFPVRVLRLFRHGRGRCEARWMDEHVLVSGPTGDFGGEILDDNRNTLGWWTDKHNAYAAREVVDLLNLEHRFLAHETIAGLQRGRPSGVKRWIKEHLYARLPGGWRAGAYFLYRYVVRLGFLDGREGAAFHVLQGFWYRYLVDAKLYQVRRHMRETGADAPTAIAEVLGIRVLD

SEQ ID NO: 2020 - protein, 514 aa, Sanguibacter antarcticus
MASTTATPTISAVLIVKDEEDVLEASLAALGWVDEIIVYDTGSTDSTRDLAGRHTPHVIEGYWDDDFGAARNRALEHATSEWALIVDADEIFEGDTAHLLRRLAADEANLFLVAVETVDGDTPRPEGPNVTARIFRRSEYRYAGRLHEQVVPIDPSTRPVLEPVLHVCIKHSGYTDAAIAKHDKRARNLTIAQRDLDEALARETPPVMLDILRTNLARALGMAGEHEASLALATVVRTNGVVPAVGLTDLAVSAVGSALALELDDVVDEWLTVWQHADSSPVWARATRVRILAGRGDLQGALDLLDQLPTTSVDSSGRRFHKHELSGIAVSALAATGRRRAAARAARESALAGYASVGPTILSRIFVQADRLDSYIRDLPDQVWREHAVWCVHEATPDSIAFLMAMAAVRPDDLTVLLCLAKIAPSLGLEDLAVSAAALRRVGLAEHCPLVTVSRSGDVEPQLRAIASAMAVGIYEDDRAVPGLEAALAAVAPQDEAELLRQLEIVTPGLVTAS

SEQ ID NO: 2021 - protein, 263 aa, Unknown
  Description of Unknown: Alphaproteobacteria bacterium sequence
MQKISAYILAFNEAEKIADAVSSVLWADEIVVADSGSTDRTAAIAQSLGARVVQLPFHGFGDLRNRAIAECRHEWIFSLDSDERCTAEVRDEIFALLSSPPDHDAYLVPRRNYMMGRWIKGSGWYPNFRQPQLFRKGAMRYDHDPVHEGYELLTERPLGRLQSAIWQLPVRNLEEVGNKMNRYSSLGMRKLSGKRVSMGGALGHGLWAFIKHYVFKHGYRDGWAGFVIALGNFEGTFYRYAKRYEEMKAWSAPSTAPLRRPPL

SEQ ID NO: 2022 - protein, 255 aa, Luteibacter yeojuensis
MTQRPISLCVITQDEADRIRDCLASASFCDDLVVVDGGSRDETQAIAREMGARVIEHRFEGYRSQKAFAVAQAKNDWVLCLDADERVGDELRAAIEQACDGGFTGAAGYRFYRRNDFFGRFMRHGNAGADKVLRLFDRRRGGWRGPREIHESVSVDGEVKMLAGHLDHFPYRSLAELMGKQERYAHMMAVEEFAKGKRATLAQIIISPMWRFFRGYVLRAGFLDGWRGIVYALLRVEYVRRKYVKLYLLQHGQKP

SEQ ID NO: 2023 - protein, 269 aa, Marinobacter halophilus
MKLPLSVYYITLNEEDRLPESLEKVKDWADEIIVVDSGSTDSTRRIAESAGARVVHRDWEGFASQKAYAASLCANDWVLDLDADEVLSDELVTNIQALFSQPAPVDVAGFRMRWVLSQPNPDHPFRHDKTKKILRLYNRSRAAIHSETNSNDDRPRVHRGKVLDLKGDVLHRTLISLEQMEKKYCQLSSEQARFLMQKGRRISTPRLMVEFPLKFLKYYLVHRQILNGWFGFSVAITAANRNFMRLAKAKELQMIERLEGKSQRSEHSR

SEQ ID NO: 2024 - protein, 299 aa, Rhodobacter azotoformans
MLTVVILTRDEERHIARAISSVAGIADRILVVDSGSSDRTAEIAKGLGAEVLHNAWRNYATQFNWALDRLPDSTQWIMRLDADEIVSPELAVQIAATLPRLGPEVEGIVVGRRMAFMGRVIRHGGLFPIRVVRIFRHGKGRCENRWMDEHVIVRGAVCDLPGELLDDNLNSLTWWTEKHNSYASREVVDLLNLEYGFMASDRTADMCTGQARTKRWLKERVYARLPGGLRAFAYFLYRYVMRGGFLDGREGLAFHVLQGFWYRFLVDMKLQEVRRLMRSHDIDIATAIRRVLNIEVATQ

SEQ ID NO: 2025 - protein, 267 aa, Unknown
  Description of Unknown: Planctomycetes bacterium sequence
MSASPARTPISACIIAMDEEERIGACLDALSFCDEIVVVDSHSTDRTRELAAAKGARVIERDWPGHVAQKEFAVRAATHEWVLCVDADEVVSQELRGEIEALRGALSNAGPAGYDFPRCTYYFGRWIRHGTWYPDRQLRLFDRRRGHWGGRDPHDRVELDGSRAALAGELMHWPYRDLSEHLATIDQYTTIMARGLHERGVRAGWSDLLVRPLVRFLRFYVLKLGFLEGWRGLWLACVAAHYVRLKYAKLLLLQSPPAPPLSSRPRS

SEQ ID NO: 2026 - protein, 467 aa, Unknown
  Description of Unknown: Peptococcaceae bacterium BRH_c23 sequence
MKTQKTVSLCMIVQDEEDCLLSVLQSVQGLTDELIIVDTGSTDRTPQLALAAGAKLFHATWTNDFSVARNFALQQATSDWILVLDADEVLESIDPETFSALLTNDQIEGYFLQIRNILDSSQIESSDQVVRLFRNKPIYRFEGAIHEQVTPSILRTNNGNGLASAPLTIHHFGYLKDRLQTKEKFTRNSEIIKKELQQNPNNPFLLYCLGLEYYQQDSISKGLNQLSKALVHMSGHEGYFEDVLLNMALGYLRLEEITPLSDFLSKALRMYPDHADFLFLRGTANFRQGNYPQATEDLEQSLSIGTIKLATSYQVSCLLGDVHHSSGNLQQAYEAYICALESSPTSSYPWQQLLSLIQKGYPIDDLLDYLWKYSRQVTGCPNLAANQLSSPESSQALLYEYAHKLVTLALKEIHFCSVIIEENDMGSTYFNLKNQVESTIQDALLIFCHIFMDSKVTIGFQGKEHIE

SEQ ID NO: 2027 - protein, 283 aa, Unknown
  Description of Unknown: Rhodanobacteraceae bacterium sequence
MSERPPISACVITLNEADRIDACLASLEFCDEVVVVDSGSADGTRERAAARGARVIEHAFEGFRAQKDFAVSQARHDWVLCLDADERVTPALRASIEAARAEGFAGAAGYRFARATEYFGAFLRHGNAYPDRVLRLFDRRRGGWRAGREIHEHAVVDGGVVTLAGDLEHVAYRSLDDQLARYRRYATMMAAHLHASGRRAHLANLLLNPFWRFLRGYVLRAGFLDGWRGFVFACMEADYVREKFARLWLLQHAAIDADRHNDASHSDGDGVDRSGTAPSSGQS

SEQ ID NO: 2028 - protein, 277 aa, Sulfitobacter sp.
MSISTLIMTLNEEENLGRCLDSLKWCDDIVVLDSCSTDRTVEIARAAGARVVQHAYESELEQRMFGLTQIEFRHNWVYTPDADEVTPDDLREEMLAISADPTRREAIFQARYKNMFMGRWIRRSSLYPTWITRMVRPELVRFERKVHSRCVSDHPTGRLKSHFIHYSFNKGLSAWYDKHNRYSSVEASLALSQGNHPRIAWEGLVSGDPADRRASIKAIAARLPFRPTLRFVYMYLLRGGFLDGWAGYTYCRMIASYELMIEIKTEERRRRDEGLPI

SEQ ID NO: 2029 - protein, 265 aa, Solimonas aquatica
MLSARPPRRHRLSALLICRDEADRIEACLQSLAGWVDELIVLDSGSRDDTVAIARRYSTQVYETDWPGYGAQRQRALEKASGDYILSIDADERATPELRAEIDALLAQAQPACGSWQLRWEFWFLGARIRHGRFESPQTRLFRREGLRWPPLPVHEAPILPPGPTGLLQARLPHHSFRNLRHAYEKHSEYAWLIAQQKYAAGKRASLGMAMLRGGWELFVQLLLRGLWRDGAPGLQLALLLAHYAFLKYAYLASLSLESPPVSGT

SEQ ID NO: 2030 - protein, 258 aa, Unknown
  Description of Unknown: Methylobacterium sp. sequence
MPPLPLSIFIIAKNEADRLPRVIEAVRHLSDDILVVDSGSTDGTQEAARALGARVIEREWPGYGPQKRFAESQCRHNWVLNLDADEVVPPDLADEIAGLFASGEPAAEAYEIRIAEIFPGEAAPHRFAYALAPVRLYRRDRGTYSASPVHDRVDLQPGARVARLRGTVHHFSVRSIGDQIGKLNAYSDQQVADLAARGKSTATARVFLEFPIAFLKAYIGRRHAVRGTYGFITAMNFAFYRWLRVAKDFERRNRERMP

SEQ ID NO: 2031 - protein, 273 aa, Lysobacter spongiicola
MPAPADARTPGPLPKLSATIISFNEADRIGRCLASLAFCDEIVVVDSGSTDGTRELASAAGARVVERPFDGFRSQKQFAVEQASHDWILSLDADEALSPELQASIRAEQQRGFDRAAGYRFARSSEYFGRFLRHGNAYPDRKLRLFDRRRGGWRGEREIHETATVDGAVATLDGDLLHWPFRSFEHQLAKGRQYAQMMAEYAHARGKRASLSKLILAPAWRFWRGYLFRGGFLDGWAGLVYAYVTSDTARQKTIRLWLLQRELATRTGEGPDQ

SEQ ID NO: 2032 - protein, 253 aa, Unknown
  Description of Unknown: Flavobacteriales bacterium sequence
MKQVTLIIPTLNAADSLTRCIGSCRGLYDELLLVDSLSTDATCAIAEGMGARIIAREYENSASQKNWAIPQAAHPWILLLDADEWLSPELHAEIAAWRASSAAEPHDGYWIYRANHFLGRRVRFSGWQGDKVIRLFQRDRCRYAPKQVHSEIEATGRIGRLKHRMNHNTFVDLPSWEAKLRRYAEWQAGDYHARTPRVTPYHTMVKPAWRFFKHFVLRGGILDGYVGYKVSAYAAWAVWLRYDVLRRRRTSSE

SEQ ID NO: 2033 - protein, 281 aa, Unknown
  Description of Unknown: Gammaproteobacteria bacterium 2W06 sequence
MGQALSLSVAIITKDEEPNLPRLLDSLEPLQPAEVVVVDSGSTDSTVVIARDHGAQVIETDWPGHVEQKNRALAACHQPWILSLDADEPISPELAANIRNLLEKQGQNQKAGYEVSRLTWYLGDWLRHVWYPEWRLRLVKNGAAQWTGHNPHDRLEVDGPTGRLSGDIHHYSYADIDDHFRRSIDYARIGAEALAARGRPFRWHKMIFSPLARFIRLMIFRQGWRDGWRGWIIAWSSMFSAFLKYAFLYEIERGRRNSGGNFDGNFGTGTKPTPTSDKNNG

SEQ ID NO: 2034 - protein, 258 aa, Halomonas halocynthiae
MTPITGIIITLNEADNITECIASLKPVCDEIIVVDSNSQDDTAVRATAAGAQVISQSYLGDGPQKAFAVPQAKNDWILALDADERLDDDAIAAIHQLALDDPKTAYRFRRRNFAGHHWVKAAGFYPDPVTRLYNRTTSGYLPKKAHSSVKAPKEVDLNAHICHFTYRDLSHWITRINQLSSRDAWAMKERGKKPSNWRPALHAINAMLRKLIFKGGIFQGADGMTVAITTAFHAYMKYAKLNELYENERAAKHNDSTD

SEQ ID NO: 2035 - protein, 273 aa, Granulicella mallensis
MRPSIILLAFNSADSLPATLASVDGLSDDVVVVDSGSTDDTVALAERAGARVLHHPFKNYGDQRNWAIDNASIRYAWQLHLDADERLTPELRDEIAALPEQTELSGFYLPRLLQFMNRILRHGGMSPTWHMRLFRNGAGRCEMREYDQHFLCTGATAQLRNVMIDDLRMPLTEWTARHNRWADAEVRELMRGENEGRIQGKATGNVLEKKRYLRGLYNDAPYFVRPICLFFYRYIVRAGFLDGMEGLIFYTLQTFWFRFLIDAKLYEARKRLG

SEQ ID NO: 2036 - protein, 274 aa, Xanthomonas arboricola
MSSSTAPDEWPRISACIIAFNEADRLRDCLRSLAFCDEIVVVDSGSTDATVTLATAHGARVLQRAFDGYRSQKAFCVTQASHDWVLCLDADERVSDALQASIIAARDGGFADAAGYRFARLSDYFGRFLRHGNAYPDRVLRLFDRRRGGWRGKREIHEAASVDGAVVTLAGDLIHYPYRSLAQQLAKTQRYAQMMAEHEHARGKRATWSKLVLAPAWRFWRGYLLRGGFRDGWHGLIYAYVRANYVRQKTIMLWLLQHNQPVQDPPRADERRGD

SEQ ID NO: 2037 - protein, 451 aa, Brockia lithotrophica
MDEGVRLSEVPKREAFLLSVAMIVRDEAEKLPRALTSVRDFADEIVVVDTGSADDTSEIAAAHGAQVFSFPWRGSFAEARNASLERCRGRWILVLDADEWLTTESGPALRELLEREKRTPCCEAYQVRIVNLVADAMGEPRRLAHFAVRLFRNNPAYRFTGRVHEQILPSILQHASSRHSYVVGTAPIELLHDGYKHVAKDKVMRNLELLEREWAEDPANPFTAYNLGVEYLRLKDTERAVEFLERSIALSPPRMAYLPLAYRYLAHAYASKGDLSNALKAATRGTETFPDAPDLWHLRGDLAWRAKDVPAARQAYLAAYALGNPPPGYPHEEGLGTYRTAFALGRLNEEEGNAEGAVTWYMRALRHRSNDAKVLAALFRLVARTWGEEALPRFVLTHLRAQDEDAWEFLVRLLKLLGHTRQAQALRRELRKREVKTAEKGGSGKPENSVP

SEQ ID NO: 2038 - protein, 285 aa, Cellulomonas sp.
MSGDVPVSVIVLTRNEEATLGNSLRRLERFDDVVVVDSGSTDRTAEIAVEHGARVVPFTWDGGYPKKKQWSLEHAGVRHDWVLLLDADEFPSPALVDEIAALVRSGRVDEHGAYDVALLYRFAGRYLRHGHRVTKRSLLDRRRCAFPEVGDLDAPGIREVEGHYQPETTGTVGALRHRVVHDDRDPVASWFDRHNRYSDWEAYLRRHAALRADVAARRTAKGALFDRVPFKPLAFFVYAFVARRGFLDGRAGFDYAVALATYYWQIGVKVRELERADQAVARRAG

SEQ ID NO: 2039 - protein, 262 aa, Labrenzia alba
MTERLPLSVFIIARNEADRISRPIESVIDWVDEVIVIDSGSTDDTISVAEKLGARVISNDWPGYGPQKRFGEDQCRNDWLLNLDADEEITPDLAQEIRSKFDDGSYIQADGWRIMIRDMYAHESEPASWAYGYHQIRLYDRRKGRFSASIVHDTVRPDEGTRIDNLSGIMAHRSIRSLDFQVGKYNRYSGMQVEDMRSRGRKLSRARLVTEFPVSFFKAYFVRKYRKYGWWGFILAMNYAHARFLRVAKAYEVELNDRQKRS

SEQ ID NO: 2040 - protein, 271 aa, Herbaspirillum sp.
MNTPPETAAVRLSVILITKNEVHNIKACLNSVDFADEIIVVDSGSTDGTVELARAAGAVVIETTDWPGFGPQKNRALEAARGEWVLSIDADERITPELADEIRQAIEQRASADACDISRRSWYCGRFIKHSGWTPDYVTRLFRRGKAKFTNDIVHEHLVVEGSTQRLKSVMLHYSFRDFSQVLQKIDNYSTLSARQAYARGRRASVGQAVLHGMWAFMRTYFLRLGFLDGANGLALAISNAEGSYYRYLKIWLLDQQDPLASSSANTVDRR

SEQ ID NO: 2041 - protein, 763 aa, Paenibacillus curdlanolyticus
MLLGVHLIVRNEAERLGGCLDSVWPWADELVIVDTGSTDATVQLAASYGARIVTSAWADDFAQARNIGLGQARTRWVLVLDADERVGAETDWANVRKMLLASGETAYRVMIENALGGAEGDEQPLLRSEAIRLFRADLGYQYVGAIHEQLAAMDGSGRLRDVDGPLAAIRLMHTGYSPALMAQKRTAERNGRIIREQLVERADDPFYWYNLGVTCCQQGEAAEASVAFARARMLAAPDAPYRPSLILDSARAMLAQGKEEEALALLGDGVQRYPNYADMQLLHGRLLERHGAWDEAKQAYFAAIAAGAGEGSEPETALTGGPAAIRPAAYITEAGAGGYQACTAFANLARRRGDRQTAAHYFERALVEQPGWQEALDGLAELLHEAGAEDAAIARTIVAYAGEEVQAAYEECREQQRGHGMSAADGKRTEAGHGDIRRQERAAAVAQALTGIGAYSAALPLWRLAGVPFGANGAVDTEGATAGGSVAVGESAKQPLHGVSRQELYAACLIRSGQYREAATWLYEQAYENNRCLSHSLGLDAALCCWMEGTRLSEYADLFLEEGTLALCMLAERVLLGHSEEAGTDMSGGESNTELAELMDRAVSHGLLRLALRWAAAREEAFAVSLHRHGYTEAAAERLLQRMAEGRLAAPGYAALGEMLYDRKLYGEALALFERAIETAPADERARLGAAAACMQLATEALIEREADRSAAAWLQEDRRRLASSAARLEGLGWRTVRTGAQRRRMRSGGAHEADFLMHDRQE

SEQ ID NO: 2042 - protein, 255 aa, Frateuria terrea
MSRVPISACIITFNEADRIDDCLASLAFCDEVVVVDSGSTDDTRARAEGRGARVLQRPFDGFRSQKAFAVAQAQHDWVLCLDADERVDATLRGRIEAAREHGFDDAAGYRFARLSEYFGAFLRHGNAYPDRVLRLFDRRRGGWRGEREIHEAVSIDGPVRTLEGNLEHHPYRSLSEQLAKQERYAQMMAEYQYARGKRAGLRHILLNPWWRFVRGYVLRGGFLDGWRGLLYALVRVEYVRRKFLKLWLLERGYRP

SEQ ID NO: 2043 - protein, 250 aa, Rubrimonas cliftonensis
MIADVVAAALGVADEVVVVDSGSTDGTQRIAAASGARVIDQPWLGNGLQKRAAEEACRHDWLLDLDADEIVSPDLATEIRALFAKGPPPEAAYALRLVTQPPYGALWADFSVASRVKLYDRRKLRMPEHRAWDQLEMKGARAGRLAGDLIHHSFTGIAQAADKLNKVSTARAREARLKPYPVVICRVLAALPFYFLRHYLLRGLWRAGVYGFAISMNSAYGRWLRDVKMLEAHYRAGRGPGAQAAGKSPR

SEQ ID NO: 2044 - protein, 252 aa, Unknown
  Description of Unknown: Gammaproteobacteria bacterium sequence
  MOD_RES (54)..(54): Any amino acid
  MOD_RES (69)..(69): Any amino acid
  MOD_RES (252)..(252): Any amino acid
MLSAIIITKNEQDRVGRCLRSVAGIADEIIVVDSGSDDDTVAIAKTYTDKVYVXAWPGYGLQKQRALEXATKEWVLSIDADEVLTPELADEIKSVLSSSPTEVSFKMQWAVMLFGRRLDHGRSARFVERLFRREGARFSDDIVHEKIILPKGKISNLKNRLLHYSNRDFKHLLDKMSLYSNLGAEKRHKAGRYGGGLIVAALRSILVFFQIYILRLGMLDGGRGFLMAAIYAQYTFNKYAGAWAIRENKNAX

SEQ ID NO: 2045 - protein, 608 aa, Acidimicrobium ferrooxidans
MLVRVCDHERVGADGAAWVLVPGESVPPDQIAAAPAVVIVVEDALVDARSARRLVELASQGVVAVPRSPSVVGRGHVLLTTGDDVGTVEGREALAERVSKHFAGLTEDLELVPTLAVAVPGAWAARALDERWTTVHELFARLVDSRPAELAFDAVAVARRPVEGLVPAAPRRRPLVSACMIVRDEAVWLADAIDSLAGFADEVVVYDTGSTDATVDVARRHGARVIEGTWDDDFGAARNRSAADARGEWIVWLDADERLGGDLATARARLADPLAQWEGYSVRIRNLTGVGLTWADHFAMRLFRRAAGAWRGALHETVWSRDHARPLNAHPASELHLVHLGYLDVVMRQRGKGERNLRVASHNESASEPLEALVHEIRSRLLAGEHATVVALVEDRVLPAPPGPLRKLGLLAGFESALALGSFDVARTFVDALATQPDVPAAFALEASARLAATTGDLEGALRDLAGIDTRVEDVDGLVVDPERLAGLTARCLAGLGRFDEASDVVVAALARGTVDVDLREVVAWFDHANRPLADLESAIHPEQRQLIAASVLPAAELAERLFWAFVEANPACTVWLAAGELAARRVGGPVHERWRRLLADAGLVPSA

SEQ ID NO: 2046 - protein, 259 aa, Niveispirillum lacus
MPDKLPLSVFIIALNEADRIGPVITAVRDWVDEIVVVDSGSTDGTQDVARSLGAHVIHHDWPGYGPQKRFAEEQCRHDWLLNLDADEVPAPELEAAIRALFADGRMPAHQAYRIRTVMVLPHQRRPHRFAPRHNYIRLYDRRHGRFANSTTHDAVEMHSGSVRALAPIIMHYSIRSHSDLINKLNRYSTAQADEIVSRGKGRRYGALRSVTEFPINLFRYFFLKGYWVFGLYGLELAAIIAFFRFARIAKVREILQRTS

SEQ ID NO: 2047 - protein, 262 aa, Bosea sp.
MPPLSIFIIARDEADRIGRTISAVRELSDDIIVVDSGSTDGTQAVAEGLGARVLFNPWPGYGQQKRFAEEQCRHNWMLNIDADEVVPADLATEIAALFANGEPAADAYKLRIAELFPGENAPHRFAYALAPVRLYRRDKGRYSPSPVHDRVDLLPEARVASLKGTIHHYSVRSLGEQMAKLNAYSDAQADDLDQRGETISVFRMVAEFPANFIKAYIGRRHALRGIYGFMTAMNFAFYRYLRAAKHWERRLQRRGRAKSDNV

SEQ ID NO: 2048 - protein, 263 aa, Marinobacter gudaonensis
MKLPLSVYYITQNEELRLPESLAKLSGWVDEIIVVDSGSTDRTRDIAEAAGARFVHNDWHGFACQKAFAASLCRNDWVLDLDADEVLSDRLVGNIQALFSRPVAEDIAGFRMRWVLSQPDARHPFRHDKSKWILRLYHRKRAAIQPEQDSNDDRPRVMAGRVLDLKGDVLHRTLISLEQMERKYCQLSSEQARFLAKKGRKISSARLFVEFPLKFLKYYLIHRQILNGWFGLSVAITAANRNFMRLAKARELQMLASFDDDAK

SEQ ID NO: 2049 - protein, 351 aa, Lactobacillus agilis
MQVSVCIITRDESQKLARCLESLKSLQGLVAEVLVLDTGSSDDSIQVAERFGAQVYQQAWRGDFAWARNYLASQAKCDLVLFLDTDEWVAGVDIPALEALLGQVDLQQTVGRIVRLNLNQTSQTQSLEPRLYLKSYFNFGGKIHEQVNRRDEGPVYYQDIPLVIKHDGYASQELLLAKAQRNLDLLLAELVKQPDDPYLLFQVGKSYYSQKNLELARKYFEASLKLKPAYSLGYVFNCLECLVLILLATEQVTAAQRWLATYPEYEHDGDYIYLQALSFFVEKNYDFAKKYFNLALKQPIVKVAGRNDFLAHYYLGLVYKEEGALELAKQHLSLAADKFSPAKEELLQLLQ

SEQ ID NO: 2050 - protein, 273 aa, Unknown
  Description of Unknown: Candidatus Curtissbacteria bacterium GW2011_GWA1_41_11 sequence
MKLSVVLAVFNEEDVLATCLESIKGLADEIIIVDGGSTDKTVEIAKKYGAKVFVTDNPPIFHINKQRAVDRAKGDWILQLDADEVVPEALSIEIRTVIPAIEPGSRQEKDWIPGQARNDNGFNGYYVSRKNYFLWYWMRKGGQYPDYVVRLFKRGKGSFPQKSVHEQIVVDGPIGYLKTPLEHRPYTSFAEYWQKAHTYAMLRAREMAGVKLEVTPETFVQYYFLRPTKTFLNLYVRHKGFVDGIFGFLFALFSAYQEPLAFRKYIQYGKNFN

SEQ ID NO: 2051 - protein, 318 aa, Unknown
  Description of Unknown: Peptococcaceae bacterium CEB3 sequence
MTNKPAPGGTNNILNPNLSLNLKLSLSLCLITRDEEQSLPACLESIRDLAAEIIVVDTGSRDETIQIAAAAGARIFHFPWSGDFSAARNYALSQAHGDWVLVLDADERLQVVEHTTLRGLLDNEGADGYYLEIQNSLAPGLVSHDKAVRLFRNKPCYRFRGAIHEQIAPSILEYGGPERLACAPLVLLHEGYTPEKMKLKRKSERNIEILERELRLQPDDPFLLYCLGLEHYQNNQVGQGLAHLENALTHMPGGEGYLEDAVLYTALGYFCLGHRQKLESFIAQALLMFPEHPDLLSLRSLSRLNPRGDCPPGEPPAS

SEQ ID NO: 2052 - protein, 274 aa, Unknown
  Description of Unknown: Rhizobiales bacterium sequence
MSDRLPISAFIIAKNEEDRIPNAILSVRDWVDEIIVIDSGSTDNTVKTAEALGAKTYFNEWRGYGPQKIYGENLCRNKWVLNIDADEEATPETIAEIKALFAKGEPEKKAFSMRTNCVFRFEDKPRRFAVSMIHGRLYNRDYAGFKDSTVHDSVVLRDGGKLELLKNGLNHYIFRSHHHTIEKVNFYSSMQAEDLFRKGRNPGVLKLIFTPLWAFFKAYILRGYILYGLDGVVRSHIYAFSRLIRVAKAREKFQEAEYNKRKAEQTSKGGASEI

SEQ ID NO: 2053 - protein, 251 aa, Arenimonas malthae
MNEAGRLGDCLASLSFCDEVVVVDSFSTDDTVAIARAHGARVLQRAFEGYRSQKQFAVEQAAHDWVLCLDADERVDATLRAAIEAERAAGFADAAGYRFARLSNYFGRFLRHGNAYPDRVLRLFDRRRGGWRGNREVHESASVDGLVKTLRGDLLHFPYRSLEQQLLKTQRYARMMAEHDFRRGKRATLAKLVLAPAWRFWRGYLLRGGFLDGWHGLVYAYVRANYVRQKTVMLWLLQQGQPVADPPQDRP

SEQ ID NO: 2054 - protein, 265 aa, Marinobacter guineae
MKLPLSVYYITQDEELRLPESLAKVSGWADEIIVVDSGSTDRTREIAEASGARFVHHDWQGFACQKAFAASLCRNDWVLDLDADEVLSDELVSNIRELFSKPVDSDIAGFRMRWVLSQPNPRHPFRHDKSKKILRLYNRTKAVIEGEKDSNNDRPQVKAGRVLDLKGDVLHRTLISLQQMERKYCQLSTEQARFLAEKGRKISNARLFVEFPVKFLKYYLVHRQVLNGWFGLSVAIIAANRNFMRLAKARELQMLAALEKDRTTD

SEQ ID NO: 2055 - protein, 263 aa, Unknown
  Description of Unknown: Alphaproteobacteria bacterium CG11_big_fil_rev_8_21_14_0_20_39 _49 sequence
MQKLPVSVFIIAKDEEDRIPRPIKSVIGWVDEVIVIDSGSSDKTMAVSASLGAKTVFNEWKGYGPQKVFGETLCKNQWLLNIDADEEITPELRDEIIELFKDGEPECKAYHVKIKVLGTFDNKPHRFAPYHNQLRLYHKDFAGFKDSTVHDSVVPKDDTDCPLGQLKNIVRHRSFRSYSHAIAKINRYSTMQAEHMYKKGRKPSSVRIIFEPFIGFFKGYFVKGRFLLGIDGFIESLIYSFGRVLRLIKAREMWKKHHMKKLD

SEQ ID NO: 2056 - protein, 666 aa, Ammonifex sp.
MADRISLCMIVRDEEQNLSRCLESVAGAVDEIVVVDTGSTDDTRQIASEFGARVHSFPWNDSFSDARNASLERATGDWILFLDADEELAKESRDVLRRLTAEGTAEGYFVKIINYLGGEGWIEPCPDLVFRLFRNRPDYRFRGAVHEQIVDVILEKNSQARYQVAEDLVILHHGYLNRQIQEKDKKHRNLELIRRELAAAPENRLLRYHYGVELYRAERYEEAAAELIRAANGIDPQTIYLPKLLRYIVLAYHAARRPGEALEIVRLGLGLFPDYADLYYYGGLISFEQKDYARAYDFFQRAVSLPEQPAYYASFHGVRGFRSYYYLGQLAEIFLNEEEALRCYITGLQDNPHFTAALESIVRLLKPHEDPVYARDCLEKLCDLCTPEAVLLMAQVLFRQSAYLLALEHLERVTGQGEVPAEILLWKAICLVQQRRYLEALRIIEDFGPGHSLYPLAKLNKILCFWLQGNRRRVRALVEELFALGLSADTGAVVGLLRDSLSRRRRVPEVALGKEGISLLLDIVMRVLDLGEKDRAKSLLAGLSPECLGKNARDVGQLFYRYGYLEAAEDYLRLYLKNDPGCAGTCFTLAEIKCREGAFLEAADFYRRALTLDPGEPRHYIGLIRLYEKTRREILREAVKRYPDVPIFRELLEEQFVQQGHTPADG

SEQ ID NO: 2057 - protein, 366 aa, Streptacidiphilus anmyonensis
MGHVSLSMIVKDEAESIVEVLGDASAFCDELVVADTGSTDGTQELARAAGARVVDVPWTEDFAAARNASLDACTGDWIIWLDADDRVPPASQQAFSRVLAALDGDVDAVISPYHCAFDESTGAPTFTTLRERVLRRAAGLRWSGAIHEVVDITAARTRSEPELVVEHRRTEAQAAKDEGRNLRILERLYAEGDRSPRTLYYRANELRDLGRHEEAAAAYAEVLETEQPAWERYFALMSRAECLQAVDRGAEAAEVALRAVLLDPTRPEAWMVAGMIPYEQHDWARAVPFFSAATAARTRPAEGFVRDRDHGWAPWDFLSVCLGNSGRHEEALHAGVRALRGNPQADRVRGNLGWFVSELPVTDSIG

SEQ ID NO: 2058 - protein, 253 aa, Flavisolibacter sp.
MRPEISVVIVCKNEEHIIGKTLQSVQSFAGELLVYDTGSTDGTLAIAKEFGARVVQAPWEGYGRSKQKAISLAVNDWVMNLDSDEVVDEEAQQQIRQLPLTDEKICYRFRFRNFLGQKALRFGEFGFDSHIRLFNRRQVLWNDAPVHEKLQQAAGVREQSLKGRILHYTMKDTAEFVQKSVNYALANAASYFERGKRATWVKQYLSPLVMFVKYYFIRLGFLDGWAGLFSARMAALYTYLKYARLRELQERER

SEQ ID NO: 2059 - protein, 249 aa, Herpetosiphon aurantiacus
MLLSVAMIARDEERHIGAALASIGDLADEIVVLLDPRTRDRTAEICLQAGARVVEAIFESFPAQRNRALAECQGQWVLFLDADERITRNLQHEIRQLLQGQPEYAGYWIPRFNRYWGRALRGGGWYPDHQLRLLQRSKAQYETSRLVHELVILDGLKGRLTQHLEHINIESWAELREKQQRYAQAEAATLYRNGVRVKPQNYILQPWRAIWRRYITWGGYRDGLLGMLLALVMGWYEFKMYLALAKHRA

SEQ ID NO: 2060 - protein, 410 aa, Sulfobacillus thermosulfidooxidans
MGQLTLAMIVRDEARWLPSCLQSVKGIVDEMVVVDTGSRDDTPRIARQFGARVIEIPWRQDFARARNVSLDYVKTPWVLVLDADEQLHPDDAPLIRMALQTDKFHAYDLWQVSLLSDAQDVAWARVTRLFRNLPGIRYEGRIHEQVASNVVRHGYQLASLDARLWHFGYLRDIWTEKAKAERNYNLLQRAVREEPGNGYLWWQLAQSAISLEEWNMVQEATKKALDAGTLPDSLVPVAWLTLGKGAAGQGVWTVAAAAFARAEQTALPNPFADAVFYRGEVHRANRAWAAAEQAFSQALTIGDTTPIPLHEQGTGSYRAWHGLASTYWARGENDRAAATALVAYRHYPAYRPLWLLIRQIFGNYTPREFAQVIPNVAADLPGLVRSQAWFPGDLVDQEIALGWENLPVLP

SEQ ID NO: 2061 - protein, 270 aa, Unknown
  Description of Unknown: uncultured Stenotrophomonas sp. sequence
MSSSSTSPPPVRLSACIIAFNEADRIGDCLASLAFCDEIVVVDSFSSDTTVAIAEAAGARVLQRAFDGFRSQKAFCVEQASHDWVLCLDADERVDATLRAAIEAERDARFARVRGYRFARCSEYFGRFLRHGTAYPDRVLRLFDRRHGGWRGDREIHEAVTVEGPVALLPGDLLHHPYRSFLQLLDKKQKYARMMAEHEFDRGKRANLGKLIVSPTWRFFRSYVFKRGFLDGWPGLIEAFVSANYVRQKTIMLWLLQNGQPLADPPRTRP

SEQ ID NO: 2062 - protein, 406 aa, Austwickia chelonae
MDTRLSIAMIVRDEAENIQRALDSVRALGELVAEVCVYDTGSVDGTAELAEAAGARVERGSWDDDFSRARNAALDMCRTEWVLMMDADEVVQADEMLFPALLELGVREGIHAFHVLQVNTGDDGTATDSVLQTRLLRPAAARYVGRIHEQVDARHGELVSESAPQDVIRLHHSGYAHAERTAAKLARNSAISQQALADPALADEERSRIRLHHARSIEASDPSSAEAGYRELAAEQGPYQVRAQEHLAHLLLDQERWEDAALALEALTATSSNKPFAAFLFARWCLGVGELDTGLSLLRELDQVWTSGGVIIPQHLLYTTRARVADELGLWDEALSCRLTAMASPGAGQAEVDAMFHQWGARPADPLMQLLREVLPVADPAIEDCLHRTRSASTQVARAVQRRRYR

SEQ ID NO: 2063 - protein, 527 aa, Paenibacillus taiwanensis
MNNEVHHPVHSHTAHSLQKGQCYTLQDSSQKNRIDHVPPHAHTAFIETKGHHTTPTPYPIAATPISQTMPVEKCMPHTSLLPITLCLIVRDEADVIGRCLASAVPLVREIIVVDTGSTDDTPHIAAAYGAAVHYFTWADDFAAARNASIVLAHQPWILVLDADEIMDPVSWQAESVLPLLLQDRVHAYYVRCVHLAERWHIGQPRPDALAVDMACRLFRQDPRFRFQGCIHEEIAASVQAAYPDGLQWAPLTLWHDGYAPEVLRLKHKSDRNRQLLLKQLEKYPDEPLWWYAYGTELFQDEQYKECLPWLMRTLSILTEPEPFDMPGYMSDVCLKSVYALQMTGQLDQALELAHLGNELYPNFPDLLELHAYLLGALNRFEEAYKCAQKATCCGSIEHLYTTTEGAGGWRSHWTAACMAEHLHRSGLAAKHYEAAAKDSKQPALRMMLTAASAAHRYDFHAAIQYMLLALNTTAASPFSAFAAHVHAALSMLYSMLQRQLVGQSHTDTQHKLTMGIQMAPYIRPFIK

SEQ ID NO: 2064 - protein, 654 aa, Desulfotomaculum ruminis
MGNRVSLCMIVRNEEENIGRCLESVAGLVDEIIVVDTGSTDETPRIAREMGARVYSFTWKDHFGEARNVSLTYATGDWILFLDADEELARESRDRLVQYTAEEQVEGYFIKIINYIGKEGWVETCPDLVFRLFRNRPEYRFRGAIHEQMVDVILEKNPQAAYRIANDIKIFHYGYLDRQIDEKDKKNRNLRIIQRELEQQPENDLLRYHYGVELFRFERYDEAAAVFIEVANGIDPQTIFFPKLLRYITMAYASSGQPAKALEVIRQALRFFPDYADLYYYGGRCCMELKQYAKATELFSQAVALPEQPPQYASFGGVRGFRSLYHLGEIAEFFLNQEEALRYYLESLRDNPDFRPSLEKIVKILDPRLNPEYTRECLKKVLDFSTPQATLLLAEIFFQQDAYRLTLDFLNDLMQWGVASEEFLFQKAYCLIQERRFLEALRILSGYTAESTLYPQVKVNELFCFWLQGKRKKVREIVETLRQMGLSKDTDNVLKLVVKAQENRKTQRKITLGEEGIILLLDILKRLLDLKEPQKAEEILSPVAPECLAPWKWDVILLYRKYGYLEKAVELAEEYLTQKRNGEVHFLLAESHQELGNFTEAELHYRYAIEQDPDQPAYYIQQIQLYEEWRKRLKKEHDGNQGEMTLCPEEVCPS

SEQ ID NO: 2065 - protein, 273 aa, Marinobacter zhejiangensis
MTLPVSVYCITKNEELRLGATLAKVADWADEVIVVDSGSTDGTETIARQYGARFVVHEWQGFAAQKAHAASLCRNDWVLDLDADEVLSDELVANIKALFTADPDPGFAGFKMRWVLSQPLAGHPFRHDRSKRILRLYHRGRARIQGIAGSNDDRPKVLKGKVGVIPGDVLHRSVINLEQMERKYLQLSCEQAQFLAEKGRKISSARLFVEFPLKFLKYYLLHRQIMNGWYGLSVSIAGANRNFMRLAKAKEIQMLAELEPGEKPSRSAGVGDG

SEQ ID NO: 2066 - protein, 311 aa, Unknown
  Description of Unknown: Xanthomonadaceae bacterium sequence
MAAVAGRPPVRHGDAVAGHRRCNATRATVATALPAGWRGASAVRPPRYRAGPPEDALVIRAPVKLPLSGVVIAKDEVDRIGRCVASLAEVCSDVLVLDSGSTDATAELARAAGARVEQQPWLGFAAQKNAAIARATQPWVLLLDADEWLDGTAAGALRSLFVDGGVERADVWQLPRRTHYLGTPLDHGGWGREWVERLFRPDLRYLSAEVHEKLDLRGRRVARVEARIEHDTARSDAEYAAKLDRYAALWARQRHAAGKRAGLFAAPLHAAAYWLKNFVLRGGFLDGGNAPRYHWLHARYVYRKYALLRAM

SEQ ID NO: 2067 - protein, 256 aa, Methylibium sp.
MTLSVTLITRNESRHIAACLQSVAFADEWVVLDSGSTDDTREIAASLGARVVKTEGWPGFGVQKNRALELARGRWVLSIDADERVSEALASQIQAVMKSEQSADGYELSRVSRFCGQWIRHGDWYPDRVLRLFRRESGRFTDDLVHERLKVNGRVERLEGDLLHDTMPTLDDALDKMNRYSSGRALDKVAAGRTGGLGAALAHGLWAFVRCYGLKRGFLDGRLGFVLAVYVAEGTYYRYLKMGLLTQQARNPIEPI

SEQ ID NO: 2068 - protein, 255 aa, Arenimonas oryziterrae
MALPLPLSGVVITKNEADRIGRCVSSLTGICAEVLVLDSGSTDDTVALARAAGARVEHQDWLGFSAQKNAAIALASQRWVLLLDADEWLAEGAETKLRALFADQRVERAEIWRLQRRTHFLGKALNFGGWGREAVERLFWQPVRYWPARVHEKLDSEGLRCKSLAVRIEHDTARSADEYRRKLDRYAELFAEERHAAGRRAGKLSPYTHWLFYVLKNFIVRGGFLDGPRGWQYHYLHARYVFRKYALLRALKKPR

SEQ ID NO: 2069 - protein, 260 aa, Zavarzinia compransoris
MADLSVFFITLNEEDRLGPALASVRDLVDDIVVVDSGSTDGTVRLAEQAGARVVHNDFPGYGRQKRLAESLCRHDWVLNLDADERVTPELAAEIRALFAGGRPPQGAYHTPILQLYPHQDRPTAGAFEYDPVRLYDRARSQYSESPVHDRVVLGAGVAAGRLKGGILHQSIRNLSHLIAKSNAYTDKQLEEMLAKGRKVSGLRLAVEFPFSFLKAYVGRRYFLMGTYGIGVAATYAYFRLMRLAKLHEARLLKEKVQAKG

SEQ ID NO: 2070 - protein, 272 aa, Unknown
  Description of Unknown: Gemmatimonadetes bacterium sequence
METTLPGTEAAARPLGDARLSACLIVMNEGDRIGDCLASLDFCDEIVVIDSHSTDATRELAAAAGARVIERDWAGHRAQKQFAVEQATHNWILALDADERLSSDLRMEIVALRAMGFTGADGWSMPRLSYHLGTWIRYGSWYPNRQLRLFDRRCGHWGGGDPHDRWKMQGSEGRLLGDLLHIPYRSFDEHLRTLTRYASISAARMHEEGRRANVLDLLIRPPLRFVRGFVLKRGFLLGWRGLVLAWLDAHSVWLKYTHLMVLARVQDQVSRQ

SEQ ID NO: 2071 - protein, 265 aa, Unknown
  Description of Unknown: Desulfobacteraceae bacterium sequence
MSKLSACIIALNEEDKIGPALKSVEWADEIIVADSYSTDRTAIIAQEHGARVIQIRFTGFGDLRNRAMEACSHDWILSLDADERCTPDARREIEQIISGNAAIADAFYIPRKNFFMGKWIRYAGFYPDYRHPQLSRKGMITFLPDAVHAGFDVHSDKPVGYLKSHITQIPYKNLEEILNKANRYSSLGAEKLEEKQIKCRMYKALTHGIWSFFTTYFFKLGCLDGWPGLIIALGNFEGTFYKYAKGYLKQKGLESFFEHSPVQDE

SEQ ID NO: 2072 - protein, 285 aa, Unknown
  Description of Unknown: Xanthomonadaceae bacterium NML93-0399 sequence
MRALSPVRTSSWTAWPRRRMRQWFDVRRTQPMASTLPLSGVVITRNEADRIGRCLASLAPVCRELRVLDSGSDDETVAIARAAGAVVEHQDWLGFAAQKTLATSRASQPWVLLLDADEWLDAQSQERIAGLFASGQIESRDVWCLPRRTWFLGKPLRFGSWAHEYVHRLSRPDLRYLPVLVHEGPDLTGKRVGHCEARIEHETARSLDEYRAKLAGYARLWAQQRREAGRRAGRMSAAVHAAAYWLKHYVIRGGFLDGRTGWQFHACHTRYVYDKYDLLRRTPSA

SEQ ID NO: 2073 - protein, 265 aa, Camelimonas lactis
MTLDQNHFSVFVIALNEADRIGATLDAARKVTDDLIVIDSGSTDGTQDVARAHGARVIHHDWPGYGRQKRFGEDQCRHDWVLNLDADEVMPDALIGEIKGLFAGGKPPFDAYRIPIAEMFPGEKAPHPLGFSLAPVRLYRRSVGRYSPSPVHDRVALPAGTATGKLRGVIHHYSVRSIGDQVAKLNRYTDMQAADLDARGAHVSTWRLLAEFPANFIKAYIGRRHALRGVYGFMTAMNFAFYRYLRVAKHVERRLADKARREGRL

SEQ ID NO: 2074 - protein, 351 aa, Kineococcus rhizosphaerae
MVLLTACLVVRDEAPRIAATLAALEPLVDEIVVHDTGSHDDTPGIARRAGATVLRGQWRDSFAEARNVALAAAHGDWVLSVDADETATGEPAALRALLTGASEPDLAVTLHNLREDDRTSGGGYTSTAVRLFRRAGARWSGRVHERVERDGAVPGRAPRLVPATLLQLEHHGYATEQVVRTKAMRNGQLARVELDELVAAGAPAPELARAVLKVGRAAVGTGEVQRAVDAFEAVRELVPAGGTRQEATDYLARVLLGAGEAELAVVLADELEQAGADVSYCRWLRAQGLAQSNRPVAALEQLEGLTCIVDTAGRRHDPRALEALRGLCRELLEAAARDRAAHLASSRGGAR

SEQ ID NO: 2075 - protein, 265 aa, Microvirga sp.
MLPISVFIIAKNEADRIGETIRAVRDLTDDLIVVDSGSTDGTQAVAEGLGARVVYNEWPGYGPQKRFAEELCRHKWLLNLDADEVVPPNLAQEIRDLFANGEPPKDAYRIRIAEIFPGESAPHPLAYALSPVRLYRLDAGRYSPSLVHDRVDLNPGARVGRLKGTVHHWSVRSLGDQINKLNRYSDQQAVDLDIRGVSIPTWRVFFEFPAAFIKAYIGRRHFLRGTYGFLTAMNYAISRHLRLAKHYERRLLSLATRKDGAPGGG

SEQ ID NO: 2076 - protein, 263 aa, Unknown
  Description of Unknown: Candidatus Phycorickettsia trachydisci sequence
MNNPISAFIIVKNGEKLIGHTINSIKNIVDEIIVIDSGSTDNTVQVAKDLGANVVFKEWPGYTQQKIFGESLCKHQWILNLDADEALSPELQDEINYIFQSASQDKYKGYKMHVTILLPNDQKPRLGAPAHLFTRLYNRNYISFANTSDPNTTHDSALLLPGLKEKDNLLTLVSPVYHRSFTSISGLLTKINFYTDEAAKTLAKQGRRVSKLRMYTEFFLCFFKYFFIRRYWVFGTYGVIYSYMFAFSRFIRLAKVYELQNSK

SEQ ID NO: 2077 - protein, 268 aa, Unknown
  Description of Unknown: Gammaproteobacteria bacterium sequence
MQNNKASYTLSVIVITKNEQDRIAKCLDSVIAIADEIIVLDSGSTDNTVAIAKTYTDKVYVTDWPGYGPQKQRALELATCDWVLSIDADEVLTLELAQEISDKLARSPPEASFKMQWAVMLFGKRLDHGRSARYVERLFRRQGARFSDDLVHEKVILPKGKTSNLNNRLLHYSNRDFGHLLDKTSLYAFLGAQKRFKAGRYGGGLFVAALRAGWVFFQIYVLRLGLLDGGHGFLMAMIYAQYTFNKYAGVWAMRQDDKKNNVASRNNI

SEQ ID NO: 2078 - protein, 281 aa, Unknown
  Description of Unknown: bacterium BMS3Bbin04 sequence
MTDTTSQPVNRPKLSIVIMARDEELNIVDCVKSADFADEVIVVDTGSADDTRQLAAENRAIVKELAWHGFGLTKSKALEMGTGDWVLSLDADERIPPALAEEILTEIRSSKHDGFELPRRSFFLGHEMRHGGWDRDWVLRLMRHGQFKVTGDAVHEKIIVKGSFKRLYHPLDHHTNPTFAAYQAKIELYSTLAAIKIAKDKSRHAGVWAGVRHGLAAIIKKYLLQQGYRDGALGALLAVSTGYEKFLRYTKAGLIRKGMVDELTRTRLNVVALEDSDKNSP

SEQ ID NO: 2079 - protein, 266 aa, Microvirga massiliensis
MLPLSIFIIARNEADRIGETIQAVRDLTDDLVVVDSGSADGTQAVAAKLGARVIHNDWSGYGQQKRFAEDQCRHEWLLNLDADEVVPPDLASEIRALFERGEPPLQAYAFRIAEVFPGESAPHRLAYALAPVRLYRKSAGRYSPSPVHDRVVLNPGVKVGRLRGVVRHYSVRSLGDQIAKLNRYSDQQAEDLDARGVSIPAWRVFVEFPAAFLKAYFGRRHALRGTYGFLTAMNYAISRHLRLAKHIERRRADAASGRAPRNGAAR

SEQ ID NO: 2080 - protein, 253 aa, Inmirania thermothiophila
MRPITATIITLNEEEHLPACIESVRPVCDEVIVVDSGSTDRTVEVARALGARVLEQPYLGDGPQKAFAVPQARNDWILSIDADERLEEDAVAAIGGLDLDRDDVDAYALRRRSFVGNHWIRAAGFYPDYVVRLYHRGRAGYLPRKAHSRVEARRVVRLQAHLRHLTYRDVAHWVERINALTSYDAWAAYERGRRARPWTPALHAAAALVRKLILKGGILQGMDGWNVAVTTAFHAYVKYWKLLERQRREDGPR

SEQ ID NO: 2081 - protein, 259 aa, Hydromonas duriensis
MNTLTIAILTQNEARKIGKCLASAAFADQVIVMDSGSTDQTVLIAKAAGAETYIESDWQGFAVQRNRILPHVTSDYIFFLDADEEITPQLRDEILSQVQSSADAIWEVFWEQFAFGRSLRPMNNNKSGGVQRMFKTASLSHFEGVVHEGAVMNSKNLSVKPLRSYLLHYSRDNIYDAILKLAQYSRLGAFKRQQKGKVGGIWRGFASAFALFFRLYVLRRGFLCGGAGFLYSFFVALECFFRYAMIKYDADSLSQFVKR

SEQ ID NO: 2082 - protein, 278 aa, Pelobacter acetylenicus
MTIPVSVLILTLDEEINLPRCLASLQWCDDVVVLDSGSQDATQNIATEWGARMVERPFDNYARQRNFGLEKIPYKHPWVLMVDADEEVPSELVEEMNKTIAGCCEKTTLYRMRRKDFFLGRWIKRSSGYPTWFGRLIKVGHVRVERAINEEYNTDGYIGFLQGHLHHYPFNKGFSAWLEKHNRYSTMEADLMVKGGIDTPALSDLFGSDPANRRRAIKSLVYRMPFRPLLMFVALYVFRGGFLDGRAGLSFCLLRSFYEFMINCKAQEVHLRQNDMPL

SEQ ID NO: 2083 - protein, 266 aa, Unknown
  Description of Unknown: Acidobacteria bacterium sequence
MPAISATIITFNEADRIAEAIGSLSCCDEIIVVDSGSIDQTREIALARGARVIECPWKGYSRQKNFAAEQAQSDWILSIDADERLSMELADEIVYWKKSAARASGFEKACDPHPARHGAALSQGGKAVSMPRRVFYLGRWIKHSGWYPDRKIRLYDRRVCRWEGDFVHEWLKVDGAVSAFKGDLLHFPYRDWNDHAARTARYSELAARAARSSGRRGNIGRLLLAPPLVFLKAFLLRAGFLDGWRGLAIAYMGARYVFQKEFRILR

SEQ ID NO: 2084 - protein, 275 aa, Unknown
  Description of Unknown: Stenotrophomonas sequence
MPSPSTTLSSQRPRLSACIIAFNEADRIGDCLASLAFCDEIVVVDSFSSDATVAVAEAAGARVLQRAFDGFRSQKAFCVEQASHDWVLCLDADERVNPELRAAIESERDAGLPRAVGYRFARCSEYFGRFLRHGTAYPDRVLRLFDRRHGGWRGDREIHEAVSLDGPAALLKGDLLHHPYRSFLQLLDKKQKYARMMAEHEFGKGKRASLGKLIIAPSWRFIRSYVIKRGFLDGWPGLIEAFVSANYVRQKTIMLWLLQNGQPLVTPPTGAGPGN

SEQ ID NO: 2085 - protein, 253 aa, Xanthomonas sp.
MSTSAAPAPLPVSGVVITRNEGDRIGRCLDSMRALCAEMIVVDSGSTDDTVAVATAHGARVVHQDWLGYAAQKTFANTLAAHGWLLLLDADEWLSPGTEAKIRTLFADGRVETADGWLLTRRNWFLGHRLRGGEPMERLVRAGWRYLPSQVHERPDLAGKTIRSMDADFEHDTSRSHAEHVAKLSKYAALWAAQRREAGKRAHALDGPLHAGAYLLKQYLLRGAFLDGAAGWRFHKAQAHYVLEKYRRLRALS

SEQ ID NO: 2086 - protein, 257 aa, Breoghania corrubedonensis
MNRIPLSIFIITRNEADRIGATLDAVRDISDDIVVVDSGSDDDTRAIAEARGARVLVNPFTGYGAQKRFAEDQCREPWLLNIDADEICPPDLVAEIRALFTDGGPSHQAYRVPIAEQFPGEGAPHRWSYTIAPVRLYHRDAGRYCASPVHDRVDLATGVTPARLRHRIHHRSIRSLSDELRKLNAYSDMQVADLEARGKRLPAWRMVSEFPFAFLKAYLLRRHFVRGRYGFLTAMNHAIYRHMRIAKHLERRWRNRS

SEQ ID NO: 2087 - protein, 308 aa, Unknown
  Description of Unknown: Dehalococcoidia bacterium sequence
MLDVGRGRAELDVGCWMLEVGAGGMSEITVIIPARDEAVHIARCVASARELGRVIVVDSGSTDATREIAASSGAEVVEHAWEGHAAQKNWALGHLDIGTEWVLFLDADEYLLEETVAEMREAIRSDDAAGYELPRRYIFLGKELRHAWWYPDYQLRLFRREGARCEDVQVHEHMIVDGPVQQLRAPIMHENLKGLSAFVARHNRYSDLEAAELANPASNRKRGSFTGSWAERRRALKDRVWFRLPMRPVVRFLWLYFVKRGFLDGRRGLLFCYLIAMYDFLIDVKLLERRLAAAAEPMAAPARMEVQP

SEQ ID NO: 2088 - protein, 235 aa, Salinibacter altiplanensis
MISVLILTLNEEENIGACLDSVAWSDDVLVLDSGSEDRTVDIARQHDARVMHRDFDTFAGQRNYGLEEGNLRHNWVLDLDADERVTPSLREEIETVVRNTDKTAFRVPSKLMFRDTWLKYSGMYPTYQVRLGRRDTLRFDQVGHGQRGALPRKDIGTLDEPLLHYAFSKGISDWIERHNRHLTDEARQIVENDPERIAWKDLLEGDTQSRRRALKDLSYRLPLRPLWRFFVYTTT

SEQ ID NO: 2089 - protein, 276 aa, Unknown
  Description of Unknown: Methylobacterium sp. Leaf108 sequence
MTVLPLSIFIIARNEADRLGATIAAVSDLTDDLVVVDSGSTDGTQALAVSLGARVIHNDWPGYGPQKRFAEEQCRHVWLLNLDADEVVPPDLAHSIRAVFSAGEPALAAYRLAIAEIFPGEARPHPWAYRLTPVRLYRRDRGRYSPSPVHDRVDLQAGVDAGRLPGVVHHFSVRSLGDQLDKLNRYSDQQADDLDARGVTIPTWRLFVELPGNFLKAYIGRRHAVRGAYGFLTAMNYAISRHLRVAKHYERRLLQRHRDPSARPHANRVDPPDTKF

SEQ ID NO: 2090 - protein, 252 aa, Unknown
  Description of Unknown: Candidatus Phycosocius bacilliformis sequence
MALSVFIIAKNEADRLARTLESVRHLSDDIIVVDSGSTDGTQALAESLGARVIFNPWPGYGLQKQFGEDQCRHDWMLNIDADEVVTEELATAITHALSSPDVAPSAFETQIVEMFPGEPRPHPWAFRLNPVRLYHRKVGRYSPSPVHDRVDLVAGTKVQRLAGIIEHRSIRSLGHELIKLNAYADMQADDLDRKGRKIAGLRLILEFPLAFLKAYVARRHFVRGLYGFMTAMNYAFYRYLRLAKYWERRLGR

SEQ ID NO: 2091 - protein, 266 aa, Bosea lupini
MPPLSIFIIARDEADRIGRTIAAVRGLSDDIVVIDSGSTDGTQDIAMNLGARVIERGWPGYGPQKRFAEEQCRHPWLLNLDADEVTPPELVAEMAALFAGGQPACDAYRLRIAEIFPGEGAPHRFAYALSPVRLYRADKGRYSPSPVHDRVDLAPGARVGKLKGTIQHYSVRSLGEQMQKLNAYSDAQADDLDARGETLSVFRLVAEFPANFIKAYIGRRHMLRGVYGFMTAMNYAFYRYLRVAKHWERRLQRRSVRGNGNGGPGG

SEQ ID NO: 2092 - protein, 271 aa, Bosea sp.
MPPLSIFIIAQNEADRIGLTIAAARAVSDDIVVVDSGSTDGTQGVAEALGARVIFNPWPGYGQQKRFAEEQCRHDWLLNLDADEVLPADLIAEITALFQAGAPAADAYRTRIAEIFPGERAPHRFAYALSPVRLYRKSKGRYSSSPVHDRVDLQPGTKVGKLKGTIHHFSVRSLGEQMDKLNAYSDAQADDLDARGATVSAFRLIAEFPANFFKAYIGRRHALRGLYGFMTAMNYAFYRYLRVAKHWERRLQRNAGITPAGSLTGKQPNDG

SEQ ID NO: 2093 - protein, 444 aa, Anaeromyxobacter sp.
MAHVSLCLIAKDEERMLPGCLESVRGVVDEIVLVDTGSTDRTRELARAAGARVLERPWDDDFAAPRNLAAAHATGDWILPLDADERLAPGAGVALRRALRRATFDVGLVRCHNADAPDAPAGEVLSGARRAGPPALLPRVVRRAPGLRWTGRIHESVLEWAAARGGRIAALEVDLVHLGYSKEIWDGRGKRARNLALLRRRAEDEPGSVIALGYLAAELLALGQAEEAGEIAERAWAALDRQPRHRSIRRLAVVRAALAVRRGDAAVALEAVDRAEAAGGPNPDLPFFRACALEISAGAPGAPGREERLVRAAAELRRALALLEGGVFDQVIYAQRARALARLGAVELRAGRAEAARAAFRAARTPARPADALAPAEGIEAAAGEAEALVALGRAGEALAALEPVLAAGGPPRAWAAAARAAHALGALDDARLFLARARAAAAA

SEQ ID NO: 2094 - protein, 283 aa, Phycisphaera mikurensis
MPAVRLPISILILVKDEEEHLPLLLETLGGFEDIVVLDSMSTDGTIEIAEAAGCRVVRRQFDTWAEHQNWAMENIEFRHRWVFYLDADERMTDAVRGEIHQIAASPQEPPPHRAYYVGRDNRLFGRSLRHAMGGGVVMRFFQPAHIRFARRVNPQPVLEGEPGYLRSRFIHHHFARGFAQWFEKHNRYAGWEAQEWIEAVDATPLRWKPLFARDRNTRLQAIKRASFHLPFRPLLKFLHMYLWRRGFLDGSPGFHCCVLMSIFEYMIGLRVKEMRRRSAGKPV

SEQ ID NO: 2095 - protein, 245 aa, Unknown
  Description of Unknown: Deltaproteobacteria bacterium sequence
MTRLSATIIAQDEERDLPDCIASLQGFCDEILVVDGGSRDRTREIAASLGARVLDRTFDDFARQHEFARVEARGEWVLSIDADERASPELRRAPFGGAAAYSLPFRNHFRGIWLRHGGFWPDRHVRLFRREACRYDPGRTVHEKLIVDGPVGSLDAPILHYTYDSLQDCLLKMERYGEQSARMLHARGARASAWEVALRPLWRFLRGYVLRLGFLDGAPGAAMAWARAYEAFRRYARLWELSRFS

SEQ ID NO: 2096 - protein, 262 aa, Labrenzia sp.
MTERLPLSAFIIAKDEADRIHKPIESVIDWVDEVIVIDSGSSDDTVAVAERLGARVIRNDWPGYGPQKRFGEDQCRNDWLLNLDADEEVTPDLAAEIRAKFADGSYKSADGWRIMIRDMYAHESAPAPWAYGYHQIRLYDRQKGRFSVSIVHDTVRPEPGARIDNLSGIMAHRSIRSLDFQVGKYNRYSGMQVEDMRARGRKLPRTRLLTEFPVSFLKAYFVRKYRKYGWWGLILSMNYAHARFLRVAKAYEAELLEKAGKD

SEQ ID NO: 2097 - protein, 274 aa, Oharaeibacter diazotrophicus
MSDQTTDRTTGAAATPPLSCYIRTKNEAGRIGEVVRAALACADEVVVVDSGSTDDTVALAEAAGARVVSVPWRGNGGQKRAGEELCRNDWLLDLDADEIVSDELAAEIRALFAAGPPARPVYELTLVTVPPTGEVWSTFVLAHRRKLYDRRVVRMPDHPAWDQLELGRGAAVGRLGGPVYHHSFRDFEHVVAKLNRISTVRARETRPRSRAELAARVLFALPFYFLKHLVQRQLWRAGVYGVALAGISAFGRWLRDVKMYEALRMADPPGPRRR

SEQ ID NO: 2098 - protein, 367 aa, Roseateles depolymerans
MSARWRTCLVVIARNEAAHIGRLLDSVRPWVDDMLVLDTGSTDPTPILAAQAGARVAHIAWPDDFSRARNAALDLASADWHVVMDADEWLIDGGEALQALRQTPPGFVGTLALDDHFDDGIAHTRLSRVLPGTVRYAGRIHEQPRHALPIQPLPVRIGHDGYLGSRLKDKQGRNRKLLEAALADHPQDAYLWYQLGKDASVYEDFAASEDAFATCAACLSGSTSASTSGSTSASTNVSPIGNPSWWPDLVARRLFGLKRLARHADGVVFADSQLAACEHSPDVFFALGDLLLDWAAEDPTQAEVLLPMIEEAWRRCLVLGERPDLPGAVSGRGSHLAAHNLALVLEGTGRADEAKALRTEFPAPTRP

SEQ ID NO: 2099 - protein, 364 aa, Paenibacillus sp.
MSQPISACIMTKNEQDNIGACIDSVKPYVKEIIIVDTGSEDDTVKIAISKNVRVHQMEWKNDFSIVRNEMIKIATQPIILMIDADERVLPNQEESFRDTCNLLFDDHDKIGRVTILNEQENKETLKSSISRIFKNSSSFSYAGAIHEQIQSESSNTTYFQSGITLEHKGYLNSSLIAKDKYERNLSLLFNELKNARNGSYINFQIGRTYYVMGENKKAIDYLKEVYHEELLNQPYYSTVIQIYGWALLKEKNYSELFNLLQRGIELYPDYTDLYYLFGCTLIEMKSAEYVYLIPETFQTCIELGEPDSNKYETVEGVGSFKARYNLGLYYELTHQIDKAVVEYRLSASENFKLATARLEKIILA

SEQ ID NO: 2100 - protein, 373 aa, Unknown
  Description of Unknown: Candidatus Rokubacteria bacterium sequence
MDGRQVAPVLSATLIVRDEAAVLPRCLASIRDLVDEIVVVDTGSADDSRRIAADFGARVFEFPWRDDFAAARNAALEHARGRWILYIDADEAIVPTSHDTLAGHLLDPGLVACTVRFRPRTGFTRYQECRLFRNDPRIRFRNVIHETMLPDIENVKHADGLRMGHSALAVDHFGYDGNQDAKHRRNVPLLRDRLARDSDHVYSWNHLGQALAGLGDMDGALNAWWRAVEVVRARGVQSALDRLPYGSLLLHPGAAAEAPRLLPEALECFADDHLFRWLHGRRLADAGQLAEAIPLFERLAAIDAELHCDDQGIAYDARIFGVFSYEALGLCHFRLERYEDSARYYALADRVDPGNPVHRLKHRLATSRLSRGA

SEQ ID NO: 2101 - protein, 264 aa, Marinobacter zhejiangensis
MPDGYFCGPGSGGLSLKLSAVLITKNAGPDFRRCLESLAFADEIVILDSGSTDDTLAIAEEAGARVFTSEDWPGFGPQRQRAQEYALGEWVFWVDSDEVVTDELAQSIQAAVVSAPANMVFQLNRLSWFFGRFIRHSGWYPDRIVRLYRRAEYRYDDALVHEKVTCDGARVGSLEGDLLHYTATDFHDYMSKSVRYSDAWAEGRARKGKTATLGSAISHSVGAFLRKYLLQRGFLDGRHGFLLAVFTAHYVFNKYAALWIRSRR

SEQ ID NO: 2102 - protein, 264 aa, Unknown
  Description of Unknown: Candidatus Parcubacteria bacterium sequence
MKRPNLSVYILAYNEADKIRDAIESVRGWADEILVADSHSTDGTATVAKKLGARVVQIPFQTFGQLRNKAIAACNHEWIFSLDADERMTEEAKREIDEVLRLPAADLYFVPRRNFFFGRWIRHCGWYPDYRQPQLFRKGTLTFSEADEVHEGWKAKGEIGYLRHAIIQIPFSGLNQLQQKACRYSDLGARKLLREGQPVGMWRALAHGIWAFVRIYILKLGILDGWAGFIIALGNFEGTFYRYAKAVERRDGLNKFNSRFSADE

SEQ ID NO: 2103 - protein, 267 aa, Unknown
  Description of Unknown: Planctomycetes bacterium sequence
MTTAPAPCRRAPLSACIIAFNEADRIEDCIRSVDFCDDIVVVDSGSTDATRELAAALGARVIEREWPGHVAQKEFAVRAARHDWVLCVDADERISPELALEIRSLQSDGFSGERQAPAGWSMPRLTWWMGQPIRYGTWYPNRQLRLFDRRRGHWGGHDPHDRVILDGDFDQQRGLLAGDLLHHSYRDLDDHLATIAKLTAVAAAGLHARGRRARLGDLWLRPAVRFVRFYFLKRGFLLGWRGLALAFLAAHYVRLKYLRLRILQAQA

SEQ ID NO: 2104 - protein, 367 aa, Unknown
  Description of Unknown: Gemmatimonadetes bacterium sequence
MPSTGWRRSPHCPPASKDCHSRSSRGWRSASRSWRRGREEAPTSSRRAKRGCSFRRWSRARGPRRSNGCSAIRRSPHGSGPVAASWCGGSTRSSAWSSARRPYIVKRWSAASSREGRVQAPITIVIPTLNEAAQIAACIRHLDWTADVVVVDGGSTDDTVALARAAGARVITDGPRGIGEQRNAGIAVARHGWVFALDADERIGPELAQEIMAVPAGATPAGATHEAYRVKRRNAFQGRVLQRGHWGNDWVVRFARREFRYGGSAVHPGLQGLRDVGTLTQQLDHTPYRDLSHHIEKLVAYAQTSARALAARGQRARWSDLALRPAAHFWREYLLRGGFLDGRMGVIQAAMGAIGGFLKYAFLWEQE

SEQ ID NO: 2105 - protein, 297 aa, Methylococcus capsulatus
MNLTAIILTHDEEKHLARCIDSLQGVADRVVVADCFSTDATLAIAKAKGARVIQRAWVNYATQFNWALTQLDPDTGWVLRIDADEVLTPALAAEIRARLPELGPEIDGVNFGRRMTFQGRLIRWGGVFPVKVLRLFRYGRGQCENRWMDEHIKVAGATVDFTGELIDDNLNPLTWWTDKHNRYASREAVDLLNLKYGFMPHDTVASLRGSQAGVKRWVKEEIYARLPGGVRAFVYFFYRYVLRLGFLDGQAGAAFHVLQGFWYRYLVDAKVVEVERCMAQRGCSVVEAIEAVLGIRL

SEQ ID NO: 2106 - protein, 355 aa, Actinokineospora cianjurensis
MTSLSVTMIVRDGAATLGRVLEHAGAFCDELVVVDTGSRDDSRAIAKAAGARLAEFPWRDDFAAARNASLDLCRGDWVMWLDADDVVPAASRAAVKELVLDDRLDAVTAPYQYGFDPVTDACVALVPRERLARRVPGLRWVGAVHEVLAVPGDRREYRADLVVEHRPAPGRSRGTRNLDILERVVRQGDRSRRTLFYYARELRDLGRDAEAVDQFTAYLTDPGADWEHHAALLCLADCHAHLGDPHAQLDALHTALRVDSSRAEAHLALGTFHADRDQWPQALPYFSAAASTTPPTTGFITLPTYTWRAWDYLSLCLAKLDRHQESITAALHSLRLGNPDRTRLLDNINWSARSI

SEQ ID NO: 2107 - protein, 364 aa, Paenibacillus panacisoli
MGSLLPISACILTKDEEDLIAETIRSVTPYVREVIVLDTGSQDNTVHIARTCGAKVFETEWLDDFAAARNHLLGLAQEEYIFMIDADERYQGKGEDLKRYIQAKHRMPGRIKIINELDQGENSVSYITRLIPNNGQYSYRGSIHEQLYCSDESVSGMDTEITVLHEGYKKSILEKKKKTDRNLRLLMKQLNDYPQDPYVLFQIGKTLYVAKDYSQANEYLAASYHLLMNEEAYDYTFTPNVVLQYCYCLLKEKKWLELRNILGKALEKYPNYTDLYFIQASSIIESGNVQEFHSIPNIYYSCLELGEVRSGTYETVAGVGSYRALYNLGIYFEITGQIERAKEYYAASAKQGFIQATKRLEILD

SEQ ID NO: 2108 - protein, 268 aa, Unknown
  Description of Unknown: Chloroflexi bacterium sequence
MPNPTITAVVIARDEAKQIAACLASARPLTDDLLVLLDDRTSDDTARIAEAAGARVVVSRFVNFSAQRNRALETAGGDWVLFIDADERLTPTLIAEIKKCLAALPSALPPPMREASIAGYWAARRNYMFGHWVRHAGWYPDYQLRLLRRTAARYDESRAVHELAQLSGPDAKLREPLIHYNYETWAQFRAKQRYYTAFEARILYQQGQRVRLRNFVLQPLREFRRRYISLEGWKDGWLGLALALAMTWYEFRKYVMLWRMGKLTCHCR

SEQ ID NO: 2109 - protein, 304 aa, Pseudovibrio sp.
MRPAISSQSKIINIKERRAQRVELACDESSVKPRIPLSVFIIAQDEEDRISRAVSSCIDWADEVIVIDSGSSDQTIDVAQRLGARVLQHDWHGYGLQKRYGEDQCCNDWVLNIDADEVVTDKLRQEILGLFQTTVLDAYDFWKVDICDVWPHEKTAAKHAYAYTQIRLYRKSIGRFSENAVHDTVRPPKNARLGTLKGRMDHRSIRSISFHYEKMNRYSTMQVKEMRGRGRILPKSRLLYEFPVAFLKGYLVRGYCRYGWWGLIASTNYAVGRYLRLAKSVEAELMERSAKTDARPKAPQKEPA

SEQ ID NO: 2110 - protein, 305 aa, Panacagrimonas perspica
MPERRAFTLSVVMICRDEEDRIERALQSVQGWADEIIVLDSGSRDATVEIARRYTAKVWVTDWPGYGPQRNRAIGKASGDWILSLDADERVTPELRDEIDACLSNPDLEYNVLKMPWRTYFCGAPLRFGRFSTPQTRMFRREGASYRNLQVHESLEMPDKRVGVLKSSLEHHSWRDYHHAQEKHLLYACLLAEQKYAEGQRSSLLYASSRLVFDFLVQYIGRLCVLDGWRGFLISVILAQYAFHKYAALAMRQNGAPAMRPRVFAAPRAAVAQRRQVRPAWKKGARTRLPVPHAASLLAARTTPP

SEQ ID NO: 2111 - protein, 282 aa, Unknown
  Description of Unknown: Sinobacteraceae bacterium sequence
MSEPLKPRAPRRHTLSVCLICKNEADRIEPCLQSVAGWADELIVFDSGSTDGTVEIVRRYTDQLWITDWPGYGPQRQRSLEAARGEYVFTIDADERVTPELRAQIDAELAKETVPCAVYRMPWGPIFFGKRLRFGGRYASPQARLFRREGAEFPMAQVHETLKFPPGPVGRLSGRLDHDSYRDYRHMVDKHTQYAWLLAQEKLARGKRTFLLAGPLRFVWEFILQYLIRGLVLDGRRGFLLAVLLSQYAYHKYAALYTLQLSGAKPDPKFAPENRQRRVGGP

SEQ ID NO: 2112 - protein, 271 aa, Unknown
  Description of Unknown: Bacteroidetes bacterium sequence
MEPNTGISVVIIAYNEANKIGDCIDSVTGIANEILVVDSFSTDDTYNIAIEKGARVIQHPFEGHIQQKNWAKDQASFDWVLSLDADECLSIELQDQLKLAIQNRLTYGKIKGYSFSRLNHLGGQPIRGCGWYPDTKLRLWDRRCGCWSGRNPHDKFLIDKQHSLGSISGDILHYTYTDLAAVKHQALRFGKIGGQALKHKFTNHPGYFIQRRGLDFYLLFKILTAGLTRFIRNYLLKGGWKYGSNGLLICFWQSVEVSYKYGFALFGKAEQ

SEQ ID NO: 2113 - protein, 260 aa, Methylorubrum extorquens
MAPLPISVFIIVKNEADRLGATLAAVRALADDIVVVDSGSTDGTQALAASLGARVIHNDWPGYGRQKRFAEDQCRHDWVLNLDADEVVPPDLAEQIRAVFAQGEPAHAAWSIAIAEVFPGETRPHPWAYVLTPVRLYRRDLSTYSTSPVHDRVVLGPGVTTGRIKGRIHHFSVRSLGDQLAKLNRYSDQQADDLDARGVTIPAWRLYVELPGNFLKAYFGRRHFVRGAYGFLTAMNYAISRHLRVAKHYERRVTTPRRPG

SEQ ID NO: 2114 - protein, 285 aa, Streptomyces sp.
MRKLPIVVAIPTRNEAENITAAVRSVVDHFEAVVVVDSDSTDDTRALAKAAGAEVVSYTWDGKYPKKKQWCLDHVRPGTDWMLFVDGDERVGPELLAELRRIFDVPPGMTVRPAAFDIPLGYWFAGRRLRHGYTIVKRALLDRTRARFPEPDDLRAPGMGEQEGHYQPLADPVVRLKGTIEHEDLDPVRTWFDRHNRYADWEAWLEHHPEVREQIRKAKTRQGQVFHRAPFKPLVSFGYAYLVKRGFLDGRAGLDYALAMSFYRWQIGLKTREYGWLADRPDAPR

SEQ ID NO: 2115 - protein, 256 aa, Unknown
  Description of Unknown: Rhodanobacteraceae bacterium sequence
MPARPGLSACIITLNEADRIGACLDSLAFCDEIVVVDSGSTDDTRARAVARGARVLDHPFAGYRAQKDFAVAQARHDWVLCLDADERVTPALQISMEAEREAGFAAAAGYRFARATEYFGAFLRHGNAYPDRVLRLFDRRRGGWRGDREIHEHVSVDGRVVTLAGELEHRAYRSLDDQLARYRRYATLMAADMHARGRRAKLLDLVTHPAWRFLRGFLLRGGYRDGWRGFLFACMEADYAREKFARLWLLQQGAGP

SEQ ID NO: 2116 - protein, 303 aa, Unknown
  Description of Unknown: Salinarimonadaceae bacterium HL-109 sequence
MNQDPDKVPAKEQVPAGEQVPAARRRLPVSCTIIACDEADRIGRCIESVRDLVDDVVVVDSGSRDDTVAVAEAHGARVIFNAWPGYGPQKRFAEDAARHAWILSLDADEWLPREAREEIAALFAQGEPALAGFRFRIPTVYPGRARPRPFAGYHAHVRLYDRRRVRIPASLVHDAITFDPATMRLAKHPIHHESIRSLAHLVEKNIAYFHLQAVEMRRSKLTTLPRLLVEPVAVFAKYYFLRRHVTGGLFGLRYALTVAYIRSYRLAVLAGFFHARTEATRLGLEAGRGADAAQPPAQSRATE

SEQ ID NO: 2117 - protein, 272 aa, Unknown
  Description of Unknown: Flavobacterium phragmitis sequence
MENKFSIVILAYNEEDTLGGCLDSIKWCDDIVVIDSFSSDATVAIAKENGARVFQNKFSDFAQQRNFANDTVDFKYEWVFHLDADEHFTDALRTECNKAIESYHYGAFLVPAKEILWGTWLKHSAGTVYQMRFHKLSDARFEQYGHGQRECDLKRGLGKLENSYEHYFFSKGVNQWFVKHLRYAAEEAENEKNVSLKKIPFGKLISGESHEKRRVLKALSYKMPFRPLFKFFYMYILKMGFLDGKVGFKFCVMKSIYEQFIILKKFESEWNN

SEQ ID NO: 2118 - protein, 264 aa, Luteibacter sp.
MRAEPLSVVFTTFNNADTIGACLASVAFADDVVVLDSGSTDATHDIAASHGARVEVRPFAGYSAQKQAAIDLARHRWVLLLDSDESLPAAAAARIEAALTAPTVAGFVLLRREWVFWRWQADRARMNHYVRLFDRTRARMSGHEVHESVVVDGPVGRLDVVIDHYGERDIEGRVAKANAYSSLQVRDRHARTPAFLRTRMVMYPTVAFARYYFWRGHWRAGWAGFVAARVHAFYAFLKYAKLYELRRSGGQREGRPLDTERREK

SEQ ID NO: 2119 - protein, 273 aa, Unknown
  Description of Unknown: endosymbiont of unidentified scaly snail isolate Monju sequence
MPVSQPTTPLPLSVFVIARNEERCIGAVLEAARALSDDLVVIDSGSTDRTVEIAETAGARVFHHDWAGYGPQKRLAEEQCRHDWLLNLDADEVLTPELIEEIRTLFAKGEPPLPFYRIKVTTVYPGDEKPRWLAEHNDVIRLYDRRVGRFPDHPTWDAITPPKGAGVGLLKAPCYHFSSPGLHHYVDKFNRYTTLQANTQKLKPYPVLAARLLLGFPLDFLKAWLLKRHITGGLYGFVLAFSHAYSRFLRNAKMLEKHRLQRRSADRRKDSPP

SEQ ID NO: 2120 - protein, 264 aa, Desulfoluna spongiiphila
MPEHSRTTPTLAVAVIVKNEADNLCACLKTVEGWVDEIVILDSGSTDATEDVARQFTDKFFVHDTWPGFGPQRRIAQEHVSSDFILWLDADERVTPELRASIEGAVAANAPSTVYRISRLSWVFGRYIRHCGWYPDRVVRLYPTKLTRYDDSLVHEKVEVTEEMNVENLAGDAIHYTYKDLHHYLVKSAGYAKAWADQRNARGKKTSLGQGIFHALGCFLKMYILKVGFLDGRQGFLLSLLSAHSTFVKYADLWIITKTERPRD

SEQ ID NO: 2121 - protein, 267 aa, Microvirga sp.
MLPVSVFIIAKNEADRIGATIRAIRGLTDDIVVVDSGSTDGTQAVAQELGARVIFNPWPGYGLQKRFAEDQCRYDWLLNLDADEEVSPELLAEIHRLFAQGEPPCQAYGIRIAETYPGESAPHPLAYRIAPVRLYHRDAGRYSSSLVHDRVDLKPKTKVGKLKGLVHHRSVRSLGDQLAKLNSYADQQAVDLEVRGVSIPTWRVYFEFPAAFLKVYFGRLHFLRGTYGFLISMNYATWRHLRLAKHYERKRLGALTKSNADAKRVKA

SEQ ID NO: 2122 - protein, 279 aa, Unknown
  Description of Unknown: unclassified Streptomyces sequence
MTELESRIPVVVAIPTKNEAENIAATVGSVIGHFEAVVVVDSDSTDDTRAIAESLGAQVVPYTWDGKYPKKKQWCLDNVHPDIPWLLFLDGDEVPTPELIDELREIFARQPVLPAAFDIPLLYWFAGRPLRRGYTVVKRSLLDRTRVSYPEVDDLGAPGMGEQEGHYQPRADGPVGQLRGRIEHRDLDPVRTWFERHNRYSDWEAWLEHHPGAKEQVRGLKTRQGRIFQRVPFKPLLFFGYTYLARRGFLDGRAGFDYALALSFYRWQIGVKTRENAPS

SEQ ID NO: 2123 - protein, 265 aa, Bosea sp.
MPPLSIFIITRDEADRIARTIEAVRALSDDILVVDSGSTDGTQAIAESLGARVVFNPWPGYGPQKRFAEDLCRHDWLLNLDADEVVPADLATEITELFSQGQPAADAYKLRIAEIFPGEPAPHRFAYALSPVRLYRKAKGRYSPSPVHDRVDLAPDARVARLKGTVHHYSVRSLGEQMDKLNGYSDAQADDLDRRNATLSVFRLVAEFPANFIKAYIGRRHALRGVYGFMTAMNYAFYRYLRVAKHWERRLQRRSSAKRPDGRDG

SEQ ID NO: 2124 - protein, 363 aa, Alicyclobacillus sendaiensis
MRMASWSLCMIVRNEADTLPRCLASVGDLVDEIVVVDTGSTDDTPDIAQSLGARVHTFAWCDDFSAARNYAFGLATADYILWLDADDVIRPEDFPAWKALKSSLDPAVDAVTAWYHLAFYGDKPSYSSRLVRVVRRSAGFRWRGQVHEYLEVRGNVLHSDAAVCHRPVRHDADRNLRIYEARIRAGEMLGARDTLYYANELVDHGRMVEALTQYESFLKMQDIWKEDAIFACYRMSDCHLKLGQREEARVAVLRSFLYDAPRSEACCRLGHAALELGDLDAALAWYRLAILCRRPPGFMGFLNRACETWLPHIQLFVILARLGRIREAYEHNEWAAKFLGDEDPMVVHNRAQLAALLEHSEGA

SEQ ID NO: 2125 - protein, 286 aa, Unknown
  Description of Unknown: Alphaproteobacteria bacterium sequence
MQKISAYILAFNEAEKIADAVSSVLWADEIVVADSGSTDRTAEIAQSLGARVVQLPFYGFGDLRNRAIAECRCDWIFSLDSDERCTAEVRDEILAVLSSSPAHDAYLVPRRNYMMGRWIKGSGWYPNFRQPQLFRKGAMRYDDGPVHEGYELLTQRPLGQLQSAIWQLPFRNLEELINKMNRYSSLGVRKLSGKRSSMGSALGHGIWAFVKHYLFKHGYRDGWAGFVIALGNFEGTFYRYAKRYEEMKAWPPPPSAPLQRPSLSPATSAGAGIAAAGRESSTSTKA

SEQ ID NO: 2126 - protein, 266 aa, Afifella marina
MCDNSHKPQVTVPLSIFIITRNEADRLGETLAAVRGLTDDIVVVDSGSTDGTQELARRLGARVVHHDWQGFGPQKRFAEEQCRYDWLLNLDADEVPQPEVVGGISALFADGEPPLSLYRIRIVTIYPRHHHPRLFADFVSPVRLYDRRVARYSPSLTDDRVVDHGLPSGLVPGAVWHFSFRSFAHIRAKLDGYSDLQTIEKAGRRSPLVLRLRLLTEYPMQFAKYFIFRRHWTGGVLGARYAHEIAAAKQRRIRRFLEARQKLSST

SEQ ID NO: 2127 - protein, 236 aa, Unknown
  Description of Unknown: Deltaproteobacteria bacterium sequence
MLSAVIIAKDEADRIEAAVRSVAFADEVLVVDSGSADATVARAEAAGARVVQTDWPGFVAQKNRAWALARGEWVLSIDADEAVSAELQTAIRAAVASPAAEGFEVKRKTRWLGHDLAHGFAFPDPRVRLARKDRARWEGIDPHDHLVVAGSVAPLQGILHHDPYRSFEEHLRTIDRYTALDARRGSWLDVLARPPWHFIRGYLLKGGFRDGWPGLAFAALGATYTFTKWSRGHWDP

SEQ ID NO: 2128 - protein, 252 aa, Limnohabitans sp.
MPTLSIIIAAKNEAHNIGDCVKSAAFADEVIVLDSGSTDGTAEVATSAGAQVVATDWPGYGPQQSRGIGLATSDWVLSLDADERISPALQAEILQAIQEAKADGFRLPRLSSLCGTFIHHGGWRPDYTLRLVKREKAGFTHHFLHAHMTVDGTKADLNESLIHYSYRDLDDVLEKLNRYASGNAKDLDAKGVRGSFSKAISHGIWAFVRTYIFRAGFLDGRYGFMLAIYNAESTYYKYLKLLALQEARASKA

SEQ ID NO: 2129 - protein, 251 aa, Azonexus hydrophilus
MNPVSVVIITKNAGSVVGACIDSVRGLADEVVVLDSGSNDVTREVCESRGARFVETDWPGFGPQKQRAVQAARNDWVLCLDADERLSPALLDSMRKAMAQPAFAAYRFARSNRFMGRYLKFGEGYPDWSLRLFDRRVAHWSDDVVHEKVLCSVPVGTLAGDLLHDSAETLASYMTKQNRYTSLAASAALIEGRRVSVARLLLSPLVRFVKFYFLRAGFRDGLPGLVHILLGCFNSFAKYAKMLEQRRTGDQ

SEQ ID NO: 2130 - protein, 291 aa, Unknown
  Description of Unknown: Acidobacteria bacterium sequence
MRETGYSLGVTLSVVIITYDEEANLARTLESVMPLVRDGKGEIIIVDSGSTDRTLEIARSFGAKVFIEPWKGYAAQKNSAIEKARGDWILSLDADEEVDAGLAEEIGFLILGNPRHLVSGGVSVHQKGGVASTVHGFWIRRKNHFLGRWIKHGGLWPDPKLRLFRRGEASFEERAVHETVQVEGATRRLLTGALVHHSYPTLSDYIDHMNRYSSLGAETAGAKGHRGFSVIDIVLRPLATFVYNYFFRLGFLDGREGLLLHLYHAVYVSWKYAKAWELARADSSRTEVRSD

SEQ ID NO: 2131 - protein, 245 aa, Unknown
  Description of Unknown: Gammaproteobacteria bacterium sequence
MITFNEADRIEACLRSVAFCDEIVVVDAHSTDGTRELATALGARVIERDWPGYRSQKQFAVDAARHDRVLCLDADERVSAALRAEILALRAQGFTGPAGWSIPRITDYFGRFLRHGNAYPDRLVRLFDRRRGGWSGYEIHENTHVQGRTGRLHGRLEHYAYRSLADHQNRMQRYAELMAQAMYERGRRCGLTPVVVNPQWRFVRGYLLRLGFLDGWRGLVFALIEANYVRRKYLALYARSRGLPL

SEQ ID NO: 2132 - protein, 261 aa, Unknown
  Description of Unknown: Acidobacteria bacterium sequence
MAEARLPLSVLVTTKNEQETIGACLASVAFADEIVVVDSGSDDRTVEIARSHGARVLEHPYESPARQKNWGLAQCRHERVLILDADERVPEPLADEIRALLRADGPLADGYWIRRENVFLGRVIRHGGWESDRVIRLVHRDRARYDDRMVHEEIALDGPLPQLRHPLRHETFRSFDQYWPKVDRYARWGAQDAWQRGRRAGALTPVARGAATFLKMYLLRRGFLDGGHGLVLAGFSALTTFVKYARLWELTLAERRRAAAR

SEQ ID NO: 2133 - protein, 272 aa, Stenotrophomonas maltophilia
MSSTTAPIERPCISACIIAFNEAGRIGDCLASLAFCDEIVVVDSQSTDATVAIAEAAGARVLQRRFEGFRSQKAFCVEQASHDWVLCLDADERISPELRAAIEQARDGGFSGHAGYRFARLSEYFGRFLRHGNAYPDRVMRLFDRRQGGWRGKREIHEAASVDGSVGTLRGDLIHYPYRSLQQQLAKTEKYARMMAEHEFARGKRATLGKLVLAPAWRFWRGFLFRGGFRDGWHGLVYAYVRANYVRQKTIMLWMLGNGQAVADPAPSADRP

SEQ ID NO: 2134 - protein, 373 aa, Streptacidiphilus pinicola
MRPRIGPMARVSLSMIVKDEAESIAAVLADASVFCDELVVADTGSTDGTQELARAAGARVVDVPWTDDFAAARNASLDACGGDWIIWLDADDRVPPAAQQAFVRVLAELEEDVDALISPYHCAFDENTGAPTFTTLRERVLRRAAGLRWAGAIHEVVDITQARIREVPQLVVEHRRTEAQAAADEGRNLRILEKLYAGGDRSPRTLYYRANELRDLGRHEEAEVAYAEVLTLSQPAWERYFALMSRAECLQAVGRSAEAGEVAVQAVLLDPTRPEAWMVAGMIPYEQCDWARAVPFFSAAAAARSRPSEGFVRDRDHGWAPWDFLSVCLGNSGRHEEALQAGVRALRDNPQAERVRANLGWFVSELPVSDSTS

SEQ ID NO: 2135 - protein, 258 aa, Halomonas huangheensis
MTAITGIIITLNEQDNVEEAIASLQPVCEEIIVVDSGSTDNTVALAEAAGARVIHQPYLGDGPQKAFAVPQARNDWILALDADERLDQDAVSAIRDLSLDDPRKAYRFRRRNFAGRHWIRAAGFYPDAVTRLYNRTTSGYLPKKAHSSVEAPEVVDLEAHLSHFTYRDLSHWITRIDQLSTRDAWAMKERGVAASAWQPAIHALTALIRKLILKGGLLQGQDGMTVAMTTAFHAYMKYAKLNELYENEQAGRDADTHR

SEQ ID NO: 2136 - protein, 251 aa, Marinobacter persicus
MSVKISAVLITKNGGPYFQQCLDSLAFADEIVVLDSGSTDDTVAIAEMAGARVFVSEDWPGFGPQRQRAQEHARGEWLFWVDTDEVVTDDLAASIQDVVARGPENTVFQVKRLSWFFGRFIRHSGWYPDKVVRLYRRGEFGYDDALVHEKVHCPGAMMDTLDGDLLHYTATDFADYMAKSLRYANDWADARAVRGKTASLFSACSHSLAAFFRKYVLQKGFLDGRHGFLLAVTTAIYAFNKYAALWLKTYR

SEQ ID NO: 2137 - protein, 380 aa, Frankia canadensis
MATPYRLAPRPFRPASRTRPGRRPGQVATRAAWPVPYGTAASSGDAIWPVPGTVPVTTIILTRDEAPNIVRVVRSAGWSRQIVVVDSGSTDDTVELARAAGATVWYEPWRGFAGQRQWALSHPGIAHDWVYFLDADEWVSAELAAEIASQAGSTDPAGPAAYAHRRRLVFQGRWIAHCGWYTNSWQVRLLDRRAACFDQDVTYGERPSVVGRIGRLSADLIDEDQKGLAAWLHKHVRYAELKAESQPARGAARHGVALTWAAIRHRGASTRPLGRIVARELVFPLLPARPLLLFVYMYLVRGGWRDGRSGLLFCIYHAWYELTVGALVGARRSPGRPPATDRPLPVVPRQRAAGPAGGRADQPDSRAPAGREAAAGPVPS

SEQ ID NO: 2138 - protein, 369 aa, Unknown
  Description of Unknown: Acidobacteria bacterium sequence
MSRFAARATDAARGGVRKPCPGFGQLDRTGPASANGPLRPLRTPGSASGRASPRQRRAAPGTAAESHRSLGAAFSVTARKAPPGRRPRGLEFRFPAPPERGGTTTVASGKGAAGPRLSAAIITRNEAHNLPRLLEALRGVADEVVVVDSGSDDGTPEIARRFGARVIETDWPGFGLQKQRALAACRGEWVLSIDADEVPDEALAAALSRLPPPDSTTYRGFAVDRLTWYLGDFLRHVWSPDWITRVVRRGAGRFTDSRVHERLVVDGPVGRLPGRLLHYSFRDLSDHIERTVRYARLGAQELERRGRRSRAVDLALRPAASFVQRYLLKRGFLDGYRGLIAAGVTAAGTFFKYAFLFERSLARNGGEKR

SEQ ID NO: 2139 - protein, 261 aa, Unknown
  Description of Unknown: Metallibacterium scheffleri sequence
MAREPLSLVVTTLDNAATLARCLDSAAFADDILVLDSGSTDATRAIAEAHGARIERHAFDDYAAQKQRAIALARHDWILLLDADEALTPAAAAIIQRELRAPRAAGYRLPRREQMFWTFQHRRSRINTHLRLFDRRHGGMNAVPVHAAPEVLGRVRTLRAAVFLHFGEPDIATKVRKLNDYSSGLVAHKRARGTRFVRTRMLLYPPLFFLRQYLFKRYFLNGWAGYISAASGAWYVFLKYAKLYEARRDQGGAGDDSGGRA

SEQ ID NO: 2140 - protein, 265 aa, Dechloromonas sp.
MKHSGGNRGAVRNEKAGMKLSVVVITKNEAHCIGDCLRSVSFADEVIVLDSGSSDKTVEICRGLGARVEVTDWPGFGPQKNRALDFARGNWVLSLDADEAVTDALREEILQVMEAGVSNVYMMPRLSSYLGRPMRHSGWWPDYVARLFRRGSARFSPDLVHEKLVFSERPGHLRAHLEHEAFTSLEEVIDKMNRYSSAGAEMARQKGRGSSLGLAVLKGLVAFLRTYVIRAGFLDGREGFMLAVSNAEGTYYRQVKLMLLNDRQR

SEQ ID NO: 2141 - protein, 253 aa, Unknown
  Description of Unknown: unclassified Xanthomonadaceae (miscellaneous) sequence
MPISACIITFNEADRIGDCLASLAFCDEIVVVDSGSTDATREIAAAAGARILERAFTGFRSQKQFAVDQARHDWVLCLDADERVSPELRASLLAARDAGFADGAGYRFARLSEYFGRFLRRGNAYPDRVLRLFDRRRGGWRGDREIHEAASVDGPVKTLPGDLIHYPYRSLMQQLQKTERYARMMAEHEFARGKRASLAKLVLSPAWRFWRGYVFRLGFLEGWHGLVYAYVRANYVRQKTIMLWMLERGQKVE

SEQ ID NO: 2142 - protein, 260 aa, Unknown
  Description of Unknown: Acidobacteria bacterium CG_4_9_14_3_um_filter_49_7 sequence
MEITGIVIAKNEANQITGVVESLFSVCERIIVVDSGSTDETCTLAEKAGAKVVSHAWEGFKGQRRFADGQAETDWILVLDADERLSDGLKAAILKLKEQSDSPVVHAYSFQRNLHFMGKCFRNSPLTCERKIRLYNRNYSKWDGGSVHEAVSVIGKIRKISQTIDHYPFESMEEARNKLRGYAFLKATDKHQRGKRTGFWSVALHIIFTFLKKYIWQCYFLKGTPGLILSWLETDYTAITYMKLYELNHSFDDKESKHEQ

SEQ ID NO: 2143 - protein, 264 aa, Unknown
  Description of Unknown: filamentous cyanobacterium CCP5 sequence
MASELMMENQPHHALSAIIIAQDEADCIAQAVRSCQHFADEILVVDGGSQDDTPAIAAELGAVVHHNPWPGYAKQRNYGADQAAHDWVFFLDADEWVDDQLAAALNDWKRQPTLPAQAFSISRIGDFLGVWLAQRPESHIRLYDKTRFRIKDVLVHETPDVGDAPVVKLPGTVLHAGFRTVGELAERFNMYTDLDAQKAYGEGQRFNLLRFLLKPPAKFLQMYLRNGMFRAGKAGLFLASLWSYYIVLKELKLYEIDWAAKQPN

SEQ ID NO: 2144 - protein, 677 aa, Marinobacter pelagius
MMEPRMMHLPHALLPLLFMTGLGGALFSSSILAGATALLAIAGITLIFRKSLNQSGWVVPKELRLMHFAFWFFVLVSFCSWALEGFTYEGGKNLGTHARLILFWPLIIALTYSGIRARGIFTGLALISASVIIVFLMALAARSGAWDKLLNTRFGGGINPISFGNIALLGGMLTVTGGLFFVRSKRPLPATLMCIVGVTAVIVSMFSETRSNLVALPALLLLLLPLISRKLRIAGAIAILVIVVATIANSDRMSRSVEHLLEGGKLDTSMDVRIEVWGLAWDLFLESPLTGSGLGGYTRGVEEAVTAGEVPRKIGDCCTGHAHNDFLNNAATSGIPGILSWAFLIFIPLSVFSRHIFNKHAPTAHIAVAGSMVATGYLVYGLTEATFDRSLFLTFYLLVMAGLASALFTELRASCYRERKVRVSATVIAKNEEDHIADCLQSARLVADEIIVLDSGSSDRTAEIARQYADIVEVTDWPGFGIQKQRALEKATGDWVLSLDADERITPELAREINHHLADPDADAYKLPWAVTIYGKRLDFGRSGRAPLRLFRREGVRFSDALVHERILIPEGRKIRTLRGRLTHYTHRDFGHSLEKSAKYAWLGSQEKHRRGKKTRTMIYPTLRGLMTFIQVYFIRFGFLDGAVGYLTAVTYAQVTFNKYAGLWTLGRPTQDNRNTE

SEQ ID NO: 2145 - protein, 500 aa, Unknown
  Description of Unknown: Clostridiales bacterium PH28_bin88 sequence
MNRKKTASLCLIAKNEEEHILSCLNSAKQLIDEIIVVDTGSEDQTAPLAREAGAKVFHFPWTGDFSQAKNFALEQAASDWILFLDADEVLDPVSRENFEQLLYRSDIEGYFLTIISYLGNGHEVISDRVVRLFRNKPIYRFQGAIHEQVAQSIMQANDGRGLTDAPLVIRHYGYLASESRKKNKTKRNTLIIERELKQNPRDPFLLYCLAVELYQQGDVQEGLNCLEKALHHLRGTEGYVEDVIHQMAVGLLHLRYWGQLISFINKALSALPQQTELLLIRGLGFYHTGHYLAAAQDLEKVLQQGGSASLPLYHVLGVLGDAYNLAGHYAKAEKAYFSALGQSTRFLYPFTQLLGLVQGGRNTVSLAQFSRLISFKDNKFVWQELIKAGEIPLALIIILFAIHEVASGSGYEDILVQLSQELTSILARVEPLPARKESFEYLSVVAVEMDAYAATLAKGYHLEPLPAKKLLGLVEKTILLLVTEFCPRWSPQLLGVELKE

SEQ ID NO: 2146 - protein, 255 aa, Asticcacaulis sp.
MGPTSLSCCIIARNEGDRIGDVIRAVSGLVDEVVVIDSGSTDNTIVVAEALGARVVHHDWPGYGPQKRYSEDCAAYDWILNLDADEVVTPELYSEIKALMSAGPTLNAYRFRIMNVYPGWNAPRLWADFHNYVRLYDRRVVRFRESPVHDTVDTRDEPVGQLTGTVTHFSSRSFEHIRQKFESYNTLQAKVLKKPSWQLWARLPLEYPLGFLRYYVFRRHFTGGVDGLRVSHIAAEARFKRILKFLAAKRNGRVA

SEQ ID NO: 2147 - protein, 369 aa, Paenibacillus sp.
MITISLCMIVRDEEETLGRVLDGVKDIVDEIIIADTGSVDRTKEIAAAYEQCRIVDFEWIDDFAAARNFSFSQAGMDYILWLDADDWLREEDRQGLLRLKKTLDPSYERVTMPYNLAYDSAGNAVSSLRRNRLVRRDRGFKWIGPVHEYLEAWGKALDSDVCVSHGKEKEYSDRNLRIYRNRQQAGEDFSIRDLYYFANELKDHAFYDEAALYYEQMLRTGQGWIEDNIQACLKLADCYGQMGHKDLQLQAALRSLCYDKPRPESSCAIGNGLFEREQYEAALYWYGLAVALEPPVTMGIINRTASTWYPHLQMCLCLDRLGRFREAFEHNEHALAFHPDHPSMLHNREYFRSSHGMVPDAGVTAAVKD

SEQ ID NO: 2148 - protein, 270 aa, Halothiobacillus sp.
MPPKLPISVTIITQDEADRVGPAIESVIDLVDEVIVVDSGSSDGTEAIAEGLGARVVHHDWPGYGRQKRYAEELARNDWVLNIDADERLMPELRDEIAARFEGDPGEDAFRLPIHDRFLCSERISRKAQYLPVRLYRRSRGRYSESPVHDRVQMEKGARIGELSGRIAHDSTRSLSHRLQKMDGYTAMQAEDMRRKGRRGSGLRLVADFWLSFLLGYFTKGFWRAGLVGYIYAMNYAYSRFLRQAKLWELERCGKADSVSKAEDSPRAGS

SEQ ID NO: 2149 - protein, 271 aa, Unknown
  Description of Unknown: Rhizobiales bacterium sequence
MAPLSIFIIAQNEADRIGRTIEAARPLSDDIVVVDSGSSDGTQALAESLGARVIFNPWPGYGQQKRFAEEQCRHDWLLNLDADEVLPPDLAAEIGALFASGEPPADAYKTRIAEIFPGEKAPHRFAYALAPVRLYRKSKGRYSPSPVHDRVDLQPGARVGRLKGTIHHFSVRSLGEQMDKLNAYSDAQADDLDARGATVSAFRLVAEFPANFIKAYIGRRHALRGVYGFMTAMNFAFYRYLRVAKHWERRLQRRAGIAPPNSPAKQEPSDG

SEQ ID NO: 2150 - protein, 280 aa, Leptospira perdikensis
MPLPLSCAIITLNEEDNISRTLVALSFIEDIVVIDSGSTDKTVEIAKSLGARVFFRKFDNYADQKNYAIEQTKFDWVLAIDADEVVSIGLQTEISNLFTKDKLQSVGYLVPRLTYYLGKWIRFGGYYPNYQIRLFKKTAGEFSGGLVHERVKLTGKPIKLKNPLYHYSYKNISDHLQFIDRYSSLFAEEEFRKGKTSSVFWAFLKACFKGFYMYWIRLGILDGKQGFVLALLGFYYNFLKYLKLYEKSKSISSFFVMVDSVHDVKSGKSTKEDSNQIHVG

SEQ ID NO: 2151 - protein, 258 aa, Parvularcula oceani
MPDTRPPLSAYIRTLDEADHIEEVVRAALAVARQVVVVDSGSTDGTPDLAEAAGARVFTRDWQGSGKQKRIAEELCRHDWLLDLDGDEVVSPALAGSIAKLFENGEPPEPVYALPWVIVPPFGAPWHEVDRAFRAKLYDRRRIRIPDHPAWDQLEVDKNRAPRLEGPLYHHAFEDIGDLTRKVERNMTGRARGVAQKPKGVLALRIVFGMPVYFLKRYLLKGLFRKGVYGFAFCVAQAYGRWLKDVKLYERHLRDETE

SEQ ID NO: 2152 - protein, 270 aa, Unknown
  Description of Unknown: Acidobacteria bacterium sequence
MPAISATIITLNETDRIAEAIGSLSCCDEVIVVDSGSTDQTREVARACGARVIERLWEGYSKQKNFAAGQAQNDWILSIDADERLSIELADEIVSWKKKPLPLGEAAPRSASPIGRSLNGSAGEGSGGERAFSMPRRVFYLGAWIKHSGWYPDRKIRLYDRRACRWAGEFVHESLEVDGGVGAFKSDLLYFPYRDWNDHAARIARYSELAARAARSRGRRGNICRLLMAPPLVFIKSFVLHAGFLDGWRGLAIAYMGARYAFQKEFRILG

SEQ ID NO: 2153 - protein, 265 aa, Unknown
  Description of Unknown: Rickettsiales bacterium Ac37b sequence
MKIKLPISAFIIAKNEQDFIGTAIKSLVDWIDEVIVIDSGSQDKTVEIATNLGARVVYNEWSGYVNQKIFGESLCRNKWIINIDADEEFSENLKEEVFLLFSKNTLTPSAYYINVVMVHRFKKKFLCKIAPRNKVIRFYNIEIAGFCYGDLSSLYRDSVKLNKKMEVSPLELKNVIWHRSFRSIQQMMDKINFYTNIQVEEDLKKGRKINPIRVLIEFWMVFIKFYLLRRYFIYGIDGFIDSMIYAFSRFIRLAKLREKTIKNKY

SEQ ID NO: 2154 - protein, 370 aa, Desulfosporosinus sp.
MKTKETVSLCMIVKDEEDCLLAAIQSVQDLTDEVIIIDTGSIDSTPQLALAAGAKLFKLDWTADFSLARNFALKQASSDWILFLDADEVLEPIVPEIFNKLLNNVHIEGYFLRIKNILGPTLGESYDEVVRLFRNRPIYQFEGAIHEQIAPSILRANNGSSLASALLTLNHFGYLSNRLQSKEKFSRNCNILFEELDKNPSNPFLHYCLGLEYYQRDFITEGLQHLTKAITRMSGNEGYFEDILHNIAFGYLRLEETIKLIDFLSQAMVMYPDQSDFLFLRGNAYLSQANYHEAAEDFNHLLEILGTRTSKSNSDNAKNISYTFLTLALKEIQFCSLALKRQALEPMHSKAKNKINGALKEAFLFFIQRK

SEQ ID NO: 2155 - protein, 293 aa, Loktanella sp.
MTEITVIILCKDEAAHIGRAIASVAKIATRIVVVDSGSSDDTVAIAKAAGADILFNPWTTHARQFNWALDQIAGVAGWVLRLDADEVVTPELAQQIGRGLPDVDGIYLRRNICFLGQEIRYGGVYGLSVMRLFRNGAGRAEQRWMDEHIVVNGPTATLSGAIVDDNRKPLDWWITKHNGYASREVIDMLRTEFGAQNGPAQTGAKRWIKTHVYRRLPGGLRAGTYFFYRYVMRLGFLDGPQARSFHVLQGFWYRYLVDAKYAETRRHMVMNGCGWEQAVSDVLGVTIKDEDMR

SEQ ID NO: 2156 - protein, 274 aa, Terriglobus saanensis
MRPAVIILTFNSAETIATTLRSVRSLTDEIILVDSGSTDETIQLATELGAFVVSHPFENYGAQRNWAIDNLEITKTWQLHLDADEDVSEDLAREIEAIPESTAMDGFLVARYLKFMGRVLRHNLAPTYHMRLFRSGKGRCEARMYDQHFICSGPIGTLKHSMVDDIRMPLTEWTRRHNQWADAEVKELRMKRANAEIQGRWFGNKIQVKRRLRQCYENLPLFVRPGILFIYRYILTGGFLDGHEGLIFCVLQTFWFRFLIDAKLFEADRQSATK

SEQ ID NO: 2157 - protein, 289 aa, Hyphomicrobium denitrificans
MNARLPLSCFIIAQDEGDRIARAIRSIKPWVDEVVVVDSGSSDDTVAVAQSEGARVIAQPWLGFGGQKRFAEEQCRYDWVLNLDADELISPKLRTAIEALFHSGSPEFVAYGMPVHVIYPGRQKPRIWARDNWYIRLYNRKIVRFRDSRVHDTVVTGEHQVGRIEAPIYHYSIRSFEHMRAKLDERMSLSAEHKPARNRLTMLARLLVEFPLNFYKYYVVRRHFTGGTIGLRYATIQSTFRVKKVYRMWRSRNPVPTIKDASPSNNNKTAWSNLDVANLSRHGKRHRHR

SEQ ID NO: 2158 - protein, 296 aa, Unknown
  Description of Unknown: bacterium A52C2 sequence
MNEHSTFRAGFPEIAKASPGTEGLASAAPGTAKPVRSLTALIIAQDEEDCIARAVLSCRPFADEILVVDGGSRDGTADAAREAGARVLVNAWPGYARQRNFAAEHAGEDWVFFIDADEAVGSELAEAITAWKARPEADPLQAFAVTRMNNFFDTWWTKGERQVRLYNRRQHRIRNVLVHETPDATPDQIVQLPGRLWHFGFRSVGNLVMRFNRYTGLEAEKAYLGGRRFSLFRLMWRPPARFVQQYLVHRLCREGMAGFSASVLWVFYEVFTEIKLYELQWQARRTAPPQTPEALP

SEQ ID NO: 2159 - protein, 255 aa, Unknown
  Description of Unknown: Betaproteobacteria bacterium sequence
MAANPEKLPLTVAVIALNAESQLGELLSSVGFADEVLVVDSGSTDGTVRLAEASGARVIRKEWLGFGRQKQFAVSQARHDWVLCLDVDERVTPRLAQSIREALAGGRFKAWRMARRNRFLGAWLSHGEGYPDWSLRMFHRAHASWSNDEVHEAVLTTTEVGRLDGDLLHDSAEDVATYMAKQNRYTTLHAEALYRQGVRAGYAKLLVNPLVRFLKFYVLKLGFLDGGPGFAHVVIGCNNTFHKYLKLIELQKAGR

SEQ ID NO: 2160 - protein, 256 aa, Acidithiobacillus ferrivorans
MGARLSVLYITKNAGQYFDRSLASVAHIADELLVVDSGSQDNTLMVARSAGARIIERSWPGFAAQRQFAVAAAENPWVLMMDADEILTEAAAKAIRNTFLIGEPAGVAGYLLERISFFHGKEICYGDWAHDRVLRLFDRRCGAYGENLVHEAWETHGTVESIPGRALHHYSYANYGELLNKMRLYATLNAQQVHQRGKALHAYMPMTHALAAFWRGYFWRLGFLDGVEGAAIAWTTALGAFMKYAIALELRDCDRQ

SEQ ID NO: 2161 - protein, 274 aa, Unknown
  Description of Unknown: Planctomycetes bacterium sequence
MKISILILTLNEETNIGACLDSVSGFDDIVVLDSLSKDATKQIAVAKGARVVERPFDNWAAHQNWAMANIDFRNPWVFYLDADERMTPELRAEIQAIAADSKRAEVAFYCGRKNFFMGKWIRHAMPPGMIMRFFKPTKIKFERLVNPVPVIDGPHGYLSNYFEHYNFSKGLTEWFDKHNKYSLLEAMEGMKLRAKPVGFSAIFSGDRFDRRRALKELSFKLPMRTAIKFCYLYFLQRGFLDGRAGFTYCKLQSIYEYMIVVKMRELARRERGLP

SEQ ID NO: 2162 - protein, 273 aa, Desulfatirhabdium butyrativorans
MYPKRDFRSDIGSFSISKRNTLEKPKISVAIIARDEADRIGGLLRSLGFADEIVVVDSGSTDGTQAICESFGARVVFNPWPGYVEQKQFALDATSHEWILSLDADEEVPDALAAEILRSIQQAGPNVAGISMPRLSRYLGRWIRHGGWYPDRKVRLVRRGRGRWQGVNPHDKLVADGDVIQLSQPFLHYVYRSISDQVVTMNRFSEIYAQQGASRRGWFVVAGVFHAIGKFLECYVWKFGFLDGIPGLIIAMNSAGYVFLKHAKRWERRLTEV

SEQ ID NO: 2163 - protein, 251 aa, Unknown
  Description of Unknown: Comamonadaceae bacterium CG1_02_60_18 sequence
MQLSVIIITRNEEANIGDCLKSVDFADEVIVLDNASSDRTQEIAKSLGASVHVAPDWPGFGPQKNRALALAKGQWVLSIDADERLTPALRDEILGWIARPDAPSGYCIPRSSWFCGRFIQHSGWTPDYVDRLFKAGTARFSDDLVHERLLCQGVAQPLKNALLHYSHRSFSDVLTKIDRYSTAWAEQALAKGKRASVLGAVGHGCWAFIRAYFFKAGFLDGAHGLALAIASAEGSYYRHLKLWRLGQTHSA

SEQ ID NO: 2164 - protein, 254 aa, Hoeflea sp.
MGLSVIIITQDEEQNIGPCLESVGFADEVVVLDGGSSDRTREMAAEMGARVHVASNWQGFGVQKNRVLALAQEQWVLSLDADERVSPELADAIKAVVAGQSSSDAYEMSRMTWYCGKFLRYSGTSPDYVLRLFRRGTARFSDALVHERLVPDGAVARLPGKLLHYSFRNFSDVLKKTDAYTEASARQALEAGRTSSVGKAVSRGMWMFFRTYVLKRGFLDGGHGLANAVSAAQGTYYRYLKIWNGQQAGPKAPK

SEQ ID NO: 2165 - protein, 797 aa, Conexibacter woesei
MAPRPLNGSTPPLQAQAAALLRRGDVDAYRALFADAAALEDRNARYLERCHLVNAALAHGGVGAAVGVRAGLEELLTVLEQEPAEPVLLNQAGVLLAMFDGFAPALAVLEAALRLDPGLDDVAVNAAKIRQLLSARTRGRIDRSGELGRRAARVAARAMPAEGMTVSLCMIVKDEEEMLPRSLAAAAPAVDEIVVVDTGSSDRTIEIATSYGARVIERPWTGSFSEARNVGLDAATGDWLLILDADEVLVADDVPNLRALLGRTWREAFYVSAINHTGELDDGTATTHSTVRLFRNRPGHRYSGRLHEQIVESLPQGAPERFEATPVRIEHFGYLGAVRDAKEKSRRNIELLERQRDEGDSSAFMHFNLGSEYGALGDAEAALAEYERAVALLGDVAGGSGFIGALTSRHVRALRVCGRGDDAIARAEEALERFPGFTDLVFEQAAAAQALGRTDDAIAYFERCIAMGDAPSRYTATVGMGTYLPTIALAEIRHQHGDPAAAVELLDGALAAHPGFFGLVLPFAAALLDDGAEPDVVVARVEELVAKLTPTVRFMLGTALYEHGETEAAEQQYRELLAQQPSSGHARVALAEALLSQRRWDEAAAVAAELNDAEPHAGAARRSELFARITGGDHTGAAAVLARPEPDDAVVLGPGDRALFAAWLAAAGGEREDSVLPAEAVGLLAVTLEALLRVEEVDAFGTLVGLLDRCPIAPREQRELRAGMYLRRGFLASAAEEWLAVCGADATDVRALVGLAQVAVAQGMTDEALDFAREAHALDPGDARATRLLQRLEPLAA

SEQ ID NO: 2166 - protein, 271 aa, Aeromonas veronii
MSRQTGNNREPHFVKKPTLAAVLIVKNEADNLRKCLASLDGLVDEIVILDSGSQDETPAIAAEFGARFFVNAKWPGFGKQRRLAQSHVQSDWVLWLDADERLTPELKTAIANVMANPASDTIYSLPRLSWVFGRFIRHSGWYPDRVLRLYPKALTSYNEALVHEKVEVRANMKIVNLYGDLHHFTYRDLEHYLVKSAGYARAWADQRTARGKKGSLSQGLMHAVGCFIKMYLLKAGFLDGKQGLLLAILSAHSTFVKYADLWVRQQPQQPE

SEQ ID NO: 2167 - protein, 258 aa, Glomeribacter sp.
MKRATLSVIVVAMNEAHDIGDCLESVQHWADEIIVFDSGSTDGTPALCREFGARVFETDWPGDGPQKNRALAQACCDWVLCLDADERVSPELREEIDCMLTDGSAHAAFSTPRRSSFCGRFMKHSGWWPDRIDRLFRRGQARFTDVRTHTRLIIDGTVGKLNAPIIHLAIPDVREALDKANAYSSAGAQTLFERGQHASLSQAIGHGLWAFIRTYLVRLGFLDGKEGFILAVANAEGTYYRYLKLMLMHRQNSKNGAR

SEQ ID NO: 2168 - protein, 239 aa, Sphaerotilus natans
MAFADEIIVVDSGSTDDTVAIARRLGARVEVTPDWPGFGAQKNRALALARGRWVLSLDADEWLDETLAAEIRRVVATPPAGVAHRLSRLSSFCGQWMRHGGWYPDPVLRLFPRGTARFSDDRVHERLLWDGRVEGLGGHLLHESMASLTVANDKMNRYSSGRAADLAARGRRGGLGRAIGHGLWAFVRTWILRRGFLDGRLGFVLAVHNAEASYYRYLKIWLECADAPQPPSSPRPPSR

SEQ ID NO: 2169 - protein, 362 aa, Paenibacillus illinoisensis
MSLPISACILTLNEEKQIGESIKSILDYVEEVVVLDTGSTDRTIEEATVAGARVHQVKWVQDFSYARNELINLASSPYILMMDADERYKGNGKDLLQYINQSSLPGRVKIINKLDGGEQTETFTIRIFPNNGVYKYKGTIHEQLTESDAVVVGEDTEIPIYHFGYTKENIERKRKVDRNLDLLLRELDNNAEDPYLLYQIAKTFYVSKNYVEASSYYKMSLLYLEENNLNYKFIPNLLLQYSYSLLNEKNWVELEKNLLESIEKYPDFTDLYYIYASWIIEEKKIELFKILPELYKKCLEIGEADPTKYETTKGVGSYKALYNLGLYYELTGNTAKAKECYTLSGQMNYPNAINRLNNLSNI

SEQ ID NO: 2170 - protein, 430 aa, Mobilicoccus massiliensis
METPLLAAALIVKDEEANLPGCLDSLRALGDLMSEICVYDTGSTDRTIEVAEAAGARVERGYWDDDFARARNAASAMCASKWVLTLDADERIVVLDPVRFKSALRSALTAELYGADALLVAVADVRGGVELQAHESIRLHRPGRCRWRGRVHETIVSLRSPERPVAADLPRSVVYIDHHGYGDQAKNPLRFDRNLKLADAAVRDLQSTEDLPAYVQALVDRARTKRALGDVGGALSDLRAAWLQPVSTSYRAFGGELLVETLIQVGQFSDAEAVLRQLRSEGVSRAGYCDWLEATMATALGDTSRALCLLRGVGVIASSLGVVVGPRILLEDLMWAAIAEGQNLEAASSLVNLMAAQGVIRRKFGDLLLNLASDVPTDGLIDVLLEHDRGHIPELAAELELSRAPGPEIAAALRRRSPAKSPAVQACSRR

SEQ ID NO: 2171 - protein, 271 aa, Stenotrophomonas sp.
MPQPSSSSPSSRPRVSACIIAFNEADRIGDCLASLAFCDEIVVVDSFSTDATVAVAEAAGVRVLQRAFDGFRSQKDFCVNQARHDWVLCLDADERVDPALRAAIEAERDAGFPRGPGYRFARCSEYFGRFLRHGTAYPDRVLRLFDRRHGGWRGDREIHEAVSVDGPVALLKGDLLHHPYRSFLQLLDKKQKYARMMAEHEFSRGKRASLGKLIISPAWRFFRSFVFKRGFLDGWPGLIEAFVSANYVRQKTIMLWLLQNGQPVQTPPASR

SEQ ID NO: 2172 - protein, 251 aa, Unknown
  Description of Unknown: Rhizobiales bacterium TMED94 sequence
  MOD_RES (48)..(48): Any amino acid
  MOD_RES (51)..(51): Any amino acid
  MOD_RES (62)..(62): Any amino acid
MNNKLPISCFIIAKNEADRITKTIKSVEGLVDEIIVIDSGSTDGTQDXVKXLGCKLYYNEWXGFGPQKRFGEDKAKNKWLLNLDADEYLSNELKVEIRNLFSRKLESNFYSMRVIPIYPNWNKPRLFSAHHLCIRLYNIKFGRFSASEVHDSVQTNSKKIIRLKNPVFHKSVRSFSHLIEKEDSYIKMQIESLKKKNKLFLFSRLIFEFPLSFIKYYFIRRHFTGAFTGLVTATILAFYRWKRIYLFFRKT

SEQ ID NO: 2173 - protein, 265 aa, Bosea sp.
MPPLSIFIIARDEADRIGRTIAAVSSLSDDIVVVDSGSTDDTQAIAEGAGARVIFNPWPGYGQQKRFAEDQCRHDWLLNIDADEVVPPGLVAEIAALFAQGEPGADAYKMRIAEIFPGEAAPHRFAYALPPVRLYRRDKGRYSPSPVHDRVELVPGACIGRLKGTVHHYSVRSLGEQIDKLNAYSDAQADDLDKRGLSLSVFRLVAEFPANFLKAYIGRRHALRGVYGFMTAMNYAFYRYLRVAKHWERRLSRGNAVKPPDRGDD

SEQ ID NO: 2174 - protein, 290 aa, Salinibacter altiplanensis
MISVLILTLDEEVNIGACLDSVAWADDVLVLDSGSEDRTVEIAREKGARVMHRAFDDFASQRNYGLEEGNLRHDWVLHLDADERVPPALRDALRGKADHGEHRAYRVPSKLMFQGRWLKHAGMYPTYQVRFGHREALTFTQVGHGQRGALSPEQVGTLDEPLLHYAFSKGIADWVRRHNRYSSDEAEHARETRLRDVDWTALMTGNAQTRRRTLKDLSYALPFRPLLRFLYVYVGRLGLLDGRPGFDYAVLLAFYEYLIGLKRRERGHRNERTVGGKSSAPLQETETNET

SEQ ID NO: 2175 - protein, 265 aa, Marinospirillum insulare
MVKEKTHTLSVCVITKNEADRIRTCLDSVKHLADEIVILDSGSTDNTVEIIREYTDQVEVTDWPGFGPQKQRCLEKAKMDWVLFIDADESLDATAQKALAKLLTQETIEEVAFTIKWGVVRHGKMLRFGRSGRAPLRLFIREGSSFSPDQVHEKVIHPKGKVSRLPGILMHHTVRNYGEALAKNAKYGWLGSQKYFERGRRNHSLALVILRSYWTFFHIFILRGGFLDGRVGLLVALDYMQTNFAKHAGLWTLTQEEKLKKNTPV

SEQ ID NO: 2176 - protein, 266 aa, Stappia stellulata
MTAATPISVFIIAHNEEDRIGRAIRSVESFADEVIVVDSGSTDETVRVAESLGARVLVNPWPGYGAQKRFAEDQCSNDWLFNLDADEAATDSLGREIQALSASGALFKTPFWRVRIKDVFAHEAGPAPFAYGYNQIRLYDRTKGRFSASPVHDTVRPPEGAHVAQLKAAMAHRSIRSVAFHVEKMNRYSTMQADDMAARGRRIARWRLVTEFPFAFLKAYLLRRYALYGWWGLVISTNFAYTRFLRLAKAYEAELLAKSDTQDTSK

SEQ ID NO: 2177 - protein, 272 aa, Marinobacter sp.
MKLPLSVYYITQNEELRLPESLAKVTGWVDEIIVVDSGSTDKTKEIAESSGAQFVHNHWQGFACQKAYAASLCRNDWVLDLDADEVLSDELVANIKTLFEKPIPGNIAGYRMRWVLSPPKPGHPFKHDRNKKILRLYNRTRAAIEAETDSNNDRPQVSEGKVLYLKGDVLHRTLISLEQLEKKYCQLSTEQARFLVSKNRKISSGRLFAEFPLKFLKYYLIRGQFRNGWFGFSIAITSANRNFMRLAKAKEMQMLAEIDGQAENGFQPGGPQ

SEQ ID NO: 2178 - protein, 336 aa, Sphingomonas sp.
MMSRPVSIAATLIVRNEARCLARCLGSVAPFVDRMVVLDTGSTDGTVAIAKAAGAEVHHLPWPDSFSVARNHLLDLADSDWALMLDADEWLVTGGELLREWCGGPARLGRVCIHNQHDDGETATRSWITRLIPRGARYEGRVHEQVASPLPRVPLPLHVAHDGYLAAQIAPKRNRNHILLLRDLAEQPDDPYLHYQIARDARMRDDLDAACTHFAQALALTPADANWRHELVVTAITVLTKAARLDEALALADREMPHWPESPDFFFVLGDLLLDRAMADPANAIGHWLPLAEGSWQRCLAIGERPELEGSVAGRGSHLAQHNLDVIRSQLAMLAA

SEQ ID NO: 2179 - protein, 337 aa, Unknown
  Description of Unknown: Planctomycetes bacterium sequence
MDHPLLGDLHAHAADAPVLGTRVDARLGDGPRPFARGIPAVRGVPDHLDARQPAHGTNLRSVSDPRSPSSGPCDLSVAIVCRDNADTIGRVLRSVKGLASQLVVVDSGSTDATMDLVLACRDWAEVVLLETQWRGHVATKQLALRACTRRHALSLDSDEPVTPELARSVRDACARDIPAARVNRVVEYRGRLLRHCWQPEWRLRLIRTDLVGDGRAKWGGLDPHDKLEVEPGVAVENLAGTLIHESFPSFERHLHNQLRLQAVAARSLRAAGRPGSVWKLVTSPPGAFLKQVVLKGAWRDGRAGWLAGGTAAAGALIKHMILLELDEPAGPGTVKRS

SEQ ID NO: 2180 - protein, 266 aa, Stappia sp.
MTAAPPISVFIIAHNEEDRIARAIRSVESFADEVIVVDSGSTDQTVRRAESRGARVLVNPWPGYGAQKRFAEDQCRNDWLFNLDADEAATTSLAEEIKTLAACGALERAPFWRVRIRDVFAHESGPAAWAYGYNQIRLYDRTKGRFSASPVHDTVRPPKGAAIAQLEGAMAHRSIRSVAFHVEKMNRYSTMQADDMAARGRRIGRWRLVTEFPLAFLKAYVLRRYALYGWWGLVISTNFAYTRFLRLAKTYEAELLAKSARQEPPE

SEQ ID NO: 2181 - protein, 276 aa, Unknown
  Description of Unknown: Methylobacterium sp. GXF4 sequence
MDAPASDVAPLTLSIFIIARNEADRIGATIRAVRDLTDDLVVVDSGSTDGTQALAASLGARVIHNPWPGYGPQKRFAEEQCRHVWLLNLDADEVVPTALAAEIRALFAAGEPSRPAWRIGIAEVFPGEGRPHPWAYTLTPVRLYRKDRGRYVPSPVHDRVALEPGVKPGRLRGVIHHFSVRSLGDQLDKLNRYSDQQADDLEARGVVIPTWRVFVELPGNFLKAYLGRRHLLRGTYGFLTAMNYAMSRHLRIAKHYERRRRTTTGPDRVDPPDPTF

SEQ ID NO: 2182 - protein, 263 aa, Lysobacter sp.
MSLSSPSPQRVPLSAVIIAFNEADRIGDCLASLAFCDEVVVVDSFSTDDTVAIAAQRGARVLQRAFDGFRSQKQFAIEQAAHDWVLCLDADERVSPPLREAIEAERARGFDGAAAYRFARLSEYFGKFLRHGNAYPDRVLRLFDRRRGGWRGTREVHEAASVDGAVRTLRGDLVHHPYRSLDQQLAKTQRYARMMAEHDFARGKRATLAKLVLAPAWRFWRGYVLRAGFLDGWHGLVYAYVRANYVRQKTIMLWMLRNGQRVD

SEQ ID NO: 2183 - protein, 278 aa, Paenibacillus alginolyticus
MSHYSDAVGENRISVVIIAQDDETRIASAIASCKPFADEIVDIDGGSKDGTVRVSEQLGCKVYVNAWPGYAKQRIYGSDKATYDWIFVIDTDEVVSEPLAASIQKLKSDLSNPSKAYAVLRIGDFLGRWMGKGEKLVRLYNRTEIQYQESLVHETPDVASENIVYVPGVLWHYGFRSIHDHIQRFNKYTDLEAEGAVAAGKRFSLLRMIVRPPLRFVQKYIVHRLYKKGIPGLAVSLFWGIYEFLVCMKQYELGLARKRVKKSQEEPIKEGKAYATLQ

SEQ ID NO: 2184 - protein, 252 aa, Variovorax paradoxus
MSSPSPSLSVIIAAKNEAHHIADCVRSASFADEILVLDSGSTDATAALAAEQGARVVPTDWPGYGPQQQRGIAMARCDWVLSLDADERISPELQAEIRAAIASGAADGYRLPRLSSFCGQFIHHSGWRPDYTLRLVRREKAGFTAHLLHAHMTVDGTRQNLRHSLVHYSYQDLDDVLEKLNRYSAVGARDMQARGKKASLGSAIVHGLWAFVRTYLVRQGFRDGRAGFLIAVYNAETTFYKYLKLMALNTPR

SEQ ID NO: 2185 - protein, 276 aa, Unknown
  Description of Unknown: unclassified Methylobacterium sequence
MSAPPLSIFLIAFNEADRIGATIRAVRDLTDDLVVVDSGSTDGTQALAASLGARVIHNDWSGYGPQKRFAETVCRHDWLLNLDADEVVPPDLSRTIRDLFAAGEPAHPAYRIAIAEIFPGESRPHPWAYALHPVRLYRKDRGRYSPSPVHDRVELDPGASVGRLKGVIHHFSVRSLGDQLDKLNRYSDQQARDLEARGVTIPTWRIFVELPLNFLKAYLGRRHFVRGVYGFLTAANYAISRHLRVAKHYERRSALISTPLPPIEPAKRVDPSDAKF

SEQ ID NO: 2186 - protein, 255 aa, Unknown
  Description of Unknown: Rhodanobacteraceae bacterium Dysh456 sequence
MSRPPLSACIIAFNEADRIDDCLASLAFCDEIVVVDSGSTDDTRERAAAHGARVIQRPFAGYRSQKAFAVAQARHDWVLCLDADERVSARLRTSIEAAQAAGFEGAAGYRCNRLSEYFGAYLRHGNAYPDRVLRLFDRRRGGWRGEREIHEAVSVDGPVRTLAGDLEHHPYRSLSEQIAKQERYAQMMAEHLHARGERATLGRILLNPWWRFVRGYLLRGGFLDGWRGLVYALVRVEYVRRKFLKLWLLERGYRP

SEQ ID NO: 2187 - protein, 266 aa, Marinobacter sp.
MKLPLSVYYITQNEEMRLPESLAKVIGWVDEVIVVDSGSTDNTRDIVKSAGARFVHNDWYGFACQKAYAASLCRNDWVLDLDADEILSDELVENIKALFEAPIPADIAGFKMRWVLSQPNPGHPFRHDKSKKILRLYNRKKAAIEAEKDSNNDRPQVREGKVEYLKGDVLHRTLISLEQMERKYCQLSSEQARYLVAKGRKISAGRLFVEFPLKFLKYYLIHRQVMNGWFGLSVSITAANRNFMRLAKAKELQMLAEIDGQSRAEK

SEQ ID NO: 2188 - protein, 382 aa, Ideonella sp.
MTASPSPSVYRVALVMIVRDEAPRIGRALQSLRPWVDEMVVLDTGSRDDTVAQAQAAGARVGHFTWCNDFAAARNAALDLAGADWHVVLDADEWLSSGGPSIAALRQQAPAFVGQVRVDSHFGHDGERAPSWLPRVLPGWVRYEGRIHEQPRRGPPTQRLPVVFEHLGYAPAALAEKAGRNAALLGQALKDNPRDPYLWYQLGKDHDVYERWAQALDCFDQACQALPPHGPLPPWRHDLEVRSLHALKRTGRHADGVLRAEQGLGQWSHSPDFFFALGDLLLDWATQDLSRADELLPMIEDAWQRCLMLGERPDLEGSVAGRGSHLAARNLMLLYQVLERPEDAAALASLARPPAPTRLEQAPPGAAYQPAASPPAAAASAP

SEQ ID NO: 2189 - protein, 265 aa, Luteibacter sp.
MAREPLSVVVTTFDNAETIGACLASVRFADDVLLLDSGSTDATVAIALSHGARVHVQPFAGYSAQKQAAIDLAAHRWVLLLDSDEALPALAAERIQAALVAPDVAGFELLRREWVFWRWQPDRARLNHYVRLFDRTRAAMSGHEVHESVRVDGPVRRLDAIIDHYGERDIGGRVDKANRYSSLQVRDRLTRQPRLLRLRMVVYPSIAFARYYLWRGHWRGGWAGFVAARVHAFYAFLKYAKLYERRMSGGQRHGHGAFETERRDN

SEQ ID NO: 2190 - protein, 251 aa, Unknown
  Description of Unknown: anaerobic bacterium MO-CFX2 sequence
MPVELAVVILTYNEADHVAACITSVGWADRIVVFDSFSQDNTPALAQAAGAEVIQHAFEDYARQREAALQAVDADWILFVDADERSSPEQAAEIRDLIRHGEHNGYWIPRHNYIFGKLTRHSGWYPDYQLRLLRRANAHYDMERQVHELVNLEGEPGYLKTPFVHYNYTSFAQFRAKQRRYVQYDARMLQQQGIHPKPHKFITQPLRQFIWRFITLQGYRDGWHGLRLSLLMAWYEFQKYVHLRRLSSADR

SEQ ID NO: 2191 - protein, 258 aa, Edwardsiella piscicida
MPPRLSVVLICKNAADLLPECLASVAWADEIIVLDSGSSDETQRIAQAAGAKVYENRDWQGFGIQRQRAQQYASGDYILMIDSDERVTPALKEAIAQVLTQPVTERVYSIARRNLFLGRFMRHSGWYPDRVIRLYPRQRYGYDTSPVHESLACRGASVTPLQGDLLHLTCRDFTGFQQKQLCYATAWAHERHARGKKTSMLGIFSHTVGALLKTLLLRGGVLDGKQGWLLAVVNAQYTFNKYAELWALQHGYTEKTPL

SEQ ID NO: 2192 - protein, 261 aa, Polymorphum gilvum
MADRLPVSAFIIARDEADRIAGAIDSVAGWVDEVIVIDSGSSDDTVTVARSRGARAVENAWPGYGPQKRFGEDQCRNDWLLNLDADEAVTPDLEAEIRTLFATGRHTEADCWRIMIRDVYPHEAGPAPWAYGYHQIRLYDRRKGRFSASTVHDTVRPDAGARVASLQGIIAHRSIRSLAFQVGKYNRYSDMQVADMRARGRGLPRWRLLTEFPFAFLKAYVGRRYARYGWWGLILAVNYAHARFLRVAKAYEARLAERTRR

SEQ ID NO: 2193 - protein, 261 aa, Lewinella marina
MRRPLSIIYTTFNEIDIIGRSLESVEGWSDDLHVVDSFSTDGTAEWLAARPDVRLTQRAYTGPADQKNWAIARARHEWVLLLDADEVVTPELRREIDDLLAAPDLVDAYWIGRDNYFMGRPIRYSGWGNDRVVRFFHRDRARYNQQQVHEEIEVRNLRVGSLRGRFQHFTFKSVDHFLDKNRRYARWKAMDQGASTPRVGLFHLLVKPVFRFFRHYVIQGGFRDGREGLIICTVAAYGVFLRYVYLLAERRGGEGRGAPSP

SEQ ID NO: 2194 - protein, 258 aa, Breoghania sp.
MPAPLPLSIFLIAFNEADRIGATIEAVRGLADEIIVVDSGSSDDTRDIAAALGARVLHNDWQGYGPQKRFAEDQCRNDWLLNIDADEICPPALIAEIRALFASGAPSCGAYRVPIAEQFPGEKAPHRWSYTIDPVRLYRRSAGRYADSTVHDRVELAQGTSVGRLRTSIHHRSVRSLSHEIAKLNAYSDMQAENMEARGVRLPFWRILTEFPMAFLKAYVLRRHFLRGRYGFLTAMNYAIYRHLRIAKHLERRRSGGR

SEQ ID NO: 2195 - protein, 266 aa, Marinobacter fuscus
MRLPLSVYYITCNEEARLPESLARVKALADEIIVVDSGSTDRTCHLAEAAGARVVHRDWEGYASQKAYAASLCRNDWVLDLDADEVLSDELVANIQERFSQPISEQVAGFRMTWVLSPPDPEHPFRYERPKRILRLYNRQRAVIRPEKDSNDDRPKVVSGRVLDLPGNVLHKSVVSLQQAEAKFIQLSTEQARYLAAKGRKVSTARLLSEFPLKFLKYYVLRRQYRNGWFGFSYSILSANRNFMRLAKARELQLMAALRARRAAGD

SEQ ID NO: 2196 - protein, 386 aa, Unknown
  Description of Unknown: Candidatus Carbobacillus altaicus sequence
MNGMLDPSTPSSKTSSHTLSITMIVRNEEQTLPRALDSIREAADEIIIVDTGSTDRTIDIACSYGAHVIRVPWHDHFSEARNKALEAARGTWILTIDADEWIPAEDIKLLRQLLNDPSVSAYFVHVISFVGPNGEKKALNRTIRLFQNDPAHRYEGRIHEQIALSIQRHNPQAKFAISPLRLFHDGYLNDVVQSKHKIERNIALIRQMIREDPENSFHTFNLGVEYMRAGRWQEAQSALDAALAKLPPGISYAHLLYKYRLLVAMNLGKTEDAENILQEALSLFADYTDLWHIQGDLARRKGDVKQAYASYLKALTLGPAPAPYHTEIGVGSYLTAQALGEIAEQIGDERLAIAYYSRALMIEPSYTPVRERLRSLLNRSERFSPV

SEQ ID NO: 2197 - protein, 486 aa, Alicyclobacillus hesperidum
MVATLTHIETVKSQLLAGDYSTAKVNAVKAIRQSEKLNAQLWEFLGEALEHLGEYDAAWAAYDRAWLLDPQAEWAEPARMRLRERVTGKVPVWIQELLAAPHVTISAAMIAKNEARTIGDAIAALTPAVDEIIVVDTGSTDETIAIAEAAGAKVYRYEWNDDFAAARNFALDQVSSDWVLWVDADEVLFEEDVHNPRIVAGLFNELDPPAILRIGQINVFDDRVEPNYDMSRLFAVRTGLRWLGRIHEQIGLPEGGVFAGNFVRPAVRIRVRHDGYKPEVMNAKQKLQRNIHLLKAAVNDNPNDIASWGFLGRDLLLAGHVEEAVNALYTTERLAPSNPQYARLPEIRMFLIDALVSLGRRAEAIAVGERAKAEHPNYPGTWFALGRALMNTAIHELGQAKEAFVKAQQSAQGYRGMVAFDPQILTWRSTAAIADVEKLLGNSFQALKLYEDALSKSPGNKAIAGQIEWLRNQARMIHGETSSSGK

SEQ ID NO: 2198 - protein, 271 aa, Unknown
  Description of Unknown: Candidatus Pacebacteria bacterium CG10_big_fil_rev_8_21_14_0_10 _44_54 sequence
MQEKITAIIIAKNEADMLAACLATVAWCDQVLVLDSGSTDDTAKIAEQAGAKVVLFSHSSFARLRNEALKHVSTEWVFYLDADERVLPQLAREIQVHIETGKDTTLQLERKNVFFGQAFSAGGWSPDYVTRIFRKTSLRGWSGVVHESPEFEGGVVQLQIPLVHLTHRSVSDGLKKSVVWTALEAELLSETLTFAVTPRTVIRKGVMEFLRRGFFWRGYKDGTPGMMEALIQGINKMLVYLQVWELQQQPPIEQQYKAAEKEIADLWRKKS

SEQ ID NO: 2199 - protein, 279 aa, Unknown
  Description of Unknown: Methylobacterium sp. CG08_land_8_20_14_0_20_71_15 sequence
MSAAPPLPLSVFVIARNEADRLGATLRAVQGLSDDIVVIDSGSSDGTQELARSLGARVIHNDWPGYGPQKRFGEEQCRHDWLLNLDADEVMPPDLVAEIRALFARGEPDKPAWSVGIAEVFPTERRPHPWAYTLTPVRLYRRDVGRYSPSPVHDRVALPEGTPTGRLRGVIHHFSVRSLGDQLDKLNRYSDQQADDLAARGVAIPSWRVFVELPGNFLKAYFGRRHFVRGVYGFLTAMNYAISRHLRVAKHYERRHTRAPAPQRDPAKPERLDPPAPTF

SEQ ID NO: 2200 - protein, 359 aa, Acutalibacter sp.
MNTISLCMIVRDEEDVLGRCLESVADLVDEIIIVDTGSKDHTREIARRFTPNIYDFTWIDDFAAARNFSFSHASCDYCMWLDADDIIAPPDRQKFLDLKKRLDAGVDVVMLRYYTGFDEQGRVTFSYYRERIIRNRAGMVWKGAVHEVIETRGNVRYSECGITHWKLHPSDPDRNLHIFEKLLEQGTTLDPRQQFYYGRELYYHKRYQEALKVLENFLKEGRGWIENSIEACRQCAYCWYALGDERRALEALFSSFAYDIPRAETCCDIGQHFLDRECWERAAYWYVRALECERRDDRGGFVLPDAYGYLPCIQLCVCYSRLGRQEEARRYNERAAEFQPDSPAVAYNRAYFAGLEPAM

SEQ ID NO: 2201 - protein, 569 aa, Unknown
  Description of Unknown: candidate division NC10 bacterium sequence
MKTRTSLMTMREKQKKRSTLSLCMIVKNEEQYLSDCLASATPFVDEIIVIDTGSTDRTVDIAKAAGARLFHEEWRDDFAAARNRSLCHATGDWILVLDADERLSGDGGRIMRDRIEVPGVAAYLVRLQCPTHGGSALGTMSLKWLPRLFRNGVGARYEGIVHECLLPSLRGKGKIVHSEITLEHLGYLQSDEVMRVKAMRNLHLLEGQAARTPDDSLTWIQLAETYLTLSRHDQAIASYQKALTLLTHERDHGQRTISNATAAVAYQQLGALHLLRGGCDEAIVVLRQAIDLWPALASAYLYLGQAHENKGELENARESYGMAIEWAQRPEPPGHPVRLVPWLPWLLKGTVECKLQRYDAARDALDQAICLNPDFPGAHTMLGVIDRVLGRPHAALEAFETARRLGDATASLLINIGTTHHHLGNFDKAVQAFQEALVRESESRDARLGLCRAYVQLGQWSDVADEGYALLERGVVDPDLYRLVGQALRSLGMWTAAVSVYEALCAMTNPIPADWSGLAIVALGAGQPIKALQAAEYALSVNPPEDLRSILQAVTEQAQEALPLESALL

SEQ ID NO: 2202 - protein, 260 aa, Unknown
  Description of Unknown: Rhizobiales bacterium GAS113 sequence
MPPLSVFIIALNEADRLPQVLEALGDLVDDIVVVDSGSDDGTQDVARRFGARVIEHAFPGYGPQKRFAEGECRHPWLLNLDADEVISQALRAEIAKLFASGEPAADAYEIAIHEVFPGEDEPHPFGYALAPVRLYRRDKGSYNPSPVHDRVDLVPGAKVARLKGRIRHISVRSLGHQLEKLNVYTDAQVRDLEARGIRVTTLRVFLEFPGAFLKAYFGRRHCLRGIYGFMTAMNFAFYRYLRVAKALERRRLREKGIEPQ

SEQ ID NO: 2203 - protein, 254 aa, Aquidulcibacter paucihalophilus
MSLPLSIFIIAKNEVDRIGPTLESVRGLSDDIVVIDSGSTDGTQELAEGLGARVIFNPWPGYGLQKQFGEDQCRHDWMLNVDADEVVTPELADAIRTVFSQPDLAPCGYETDIIEMFPGEARPHPWAFRLSPVRFYHKTVGRYSASPVHDRVDIVKGTPIKRLVGVIEHRSIRSLGHELIKLNAYADMQANDLDRKGRNISALRLVVEFPLAFLKAYVTRRHFVRGLYGFMTAMNYAFYRYLRLAKHWERRLGR

SEQ ID NO: 2204 - protein, 271 aa, Luteimonas arsenica
MNTSSSPGPALSACIIAFNEADRIGDCLASLAFCDEIVVVDSGSTDATADIARAAGARVLQRKFDGFRSQKAFAVAQATHDWVLCLDADERVGEALRASIEAARATGFGDAAGYRFARLDNYFGRFLRHGNAYPDHVLRLFDRRCGGWRGDREVHEAASVDGPVRTLAGDLVHFPYRSLEQQLAKTQRYARMMAEHDFARGKRATLGKLVLSPAWRFWRGWLLRGGFLDGWHGLVYAYVRANYVRQKTIMLWLLQNGQAVATPPAPGAADD

SEQ ID NO: 2205 - protein, 264 aa, Pseudovibrio sp.
MSNNLPISAFIISQDEEDRILMAINSVKTLVDEVIVVDSGSTDNTVALAEKAGAKVIYNKWDGYGKQKRFAEDQCRNTWLINIDADEEITLKLADEITEIFTSTPRADIYKVHIVDVFPHEKTAKKWAYGYWQYRLYNKEKGRFSSSSVHDTVRPHEGAKIARLKGKVDHRSQRSIQFTVEKFNRYSDMQVQDMIFRERRISPLRLLTEFPLAFLKSYFIRRGVFYGLWGIVDAHNYAYSRFVRLAKYYQYQLIERAKKANKER

SEQ ID NO: 2206 - protein, 295 aa, Lysobacter sp.
MAGHRRRRRTGAAAAAALPAAGAGDRAAGATRPRGRAPQAALVSAVADKLPLSGVVIAKDEGDRIGRCVASLAALCREVIVLDSGSGDDTVAVARAAGARVEQQPWLGFAAQKNAAIARATQPWVLLLDADEWLDAAAGSTLRTLFAGGAVERADVWRLQRRTHFLGTPLQHGGWGREPVERLFRPDLRYLPAEVHEKLDLAGRRVAAVPARIEHDTARSFAEYADKLQRYAQLWAQQRRAAGQRAGALAAPLHAAAYWLKNYLLRGGFLDGPMARRFHALHTRYVFLKYKLLRG

SEQ ID NO: 2207 - protein, 254 aa, Lysobacter sp.
MPAPLPLSGVVITLNEADRIGRCIASMREVCDEIIVLDSGSTDETVSIARSLGARVKHRDWDGFARQKNAAIERARHPWVLLLDADEWLEPVARDEIRKLFASNIESADCWLLQRRTHFLGHAMRAGSFAREPVHRLFRQAMRHGDVPVHEYLDVDGWNVRLSSIALEHDTARSEDEYSAKLQRYARLWADARATRGKRPSALRGPAAGAAYLLKNLVLRGGFVDGHAGWRFHRLHARYSVLKYRLLRERLRPG

SEQ ID NO: 2208 - protein, 271 aa, Unknown
  Description of Unknown: Chitinophagaceae bacterium IBVUCB2 sequence
MVVEMVENRKDLIFVAMQSLSVVIVCRNEAGIIGETLQSLQGLTDDIVVYDNGSTDDTVEKAKAYTEQVHQGSWEGFGKTKRKANALAKYDWILSLDADEAIDAALKESLLSFKPANDYEVGEIKFKNFFVDKWLRFGEWGNDKHIRLFNRKQVNWDDAAVHEKLLIPAGSSVKKIKGHILHKTVKSIDAYKQKMQQYAMLNAGKYHQAGKKATWVKRYLSPAFTFINYYIFRLGFLDGYAGYVCARITAWYTSLKYERLRELNRGVGRGK

SEQ ID NO: 2209 - protein, 270 aa, Stappia sp.
MQTTAGGTPVAISVFIIAHNEADRIARAIDSVAGFADEVVVVDSGSTDGTQDLARAHGARVIENAWPGYGQQKRFGEDQCRNDWIFNLDADEAATPALAREIAQLAASGALTSAPFWDVAIKDVFAHEDGPAPWAYGYIQIRLYDRRAGRFSDSPVHDTVRPPDGARRARLKGAMEHRSIRSVAFHVEKMNRYSTMQAEDMAARGRRIARWRIATEFPLAFLKAYAIRRYALYGWWGIVISVNFAYTRFLRLAKAYERELCERAEQRRRS

SEQ ID NO: 2210 - protein, 359 aa, Emergencia timonensis
MITISLCMILKDEEDVLDRCLSSVKGLVDEIIIVDTGSTDATKQIALQYTDQVFDFAWIDDFAAARNYAFSKANMEYCMWLDADDVIEEKDRLDFLTLKNTLTLDTDIVMMRYNTAFDDDGNPSFWYYRERIIRNDQSHPWQGAVHEVITPNGSLLYSDVAICHRKLGAGDPDRNLNIYRKLLAEGRILSAREQYYYSRELYYHQLYDDAIEAFGVFLSLPDGWMEDKIEACIMSSKCYMLTGKSDEALLMLFRSLLYDIPRAEVCCEIGDCFMKTGRFETAAFWFETALDCQMDYRKGGFILPDCYDYIPAIQLCVCYDKLGEVEKAKAYNDKAGEYKPNASAFLHNKKYFDKKLKSH

SEQ ID NO: 2211 - protein, 630 aa, Unknown
  Description of Unknown: Chloroflexi bacterium sequence
MRTPIEKSLHCFSWSGNPFPAGLCGPRPPIDHSPPISRRLTSCQLVTGRLSAVQSGPLGTRSTPFVGRRGRGRSPYMTRNRHDQVSSFAQVERRGNRRSSRWAQEGFAMSESGRARADKPLISLTMIVKNEEANIGRALDSARGIADEMIVVDTGSTDRTVEIARGRGARVIPFTWVDDFSAARNFALDHATGEWILILDGDDVAVEESIGALRAEIVAQPAGIQILRVPVRSRRADGLGFTVSGGRRLFRNSPEIRWIYPIHENIVHCREDPDMEGGSAALVVEHSGYADTTGREAAGKHKRNLRLLRRELRQRPDAPELYYYLAVQHAEMGHHVTALRHARAALRRFAGRIRPDFAGLIRVVAMRSAMQLGQAVLAVRIGELGVRDYAYSDLCFTLGCAHGQTGNLVQAERFLNLAMALRDRATEFQVDAGSGSWKALVELGTVAWSKGNFELAIERWRRAYDWMPNEAVTNLALGRGLLANDEAGEALDYLRRAAEAAPRLVETHTRYCQALVATGQNQAAYDYLDDLTRRNPDVSAYWLLLGDLLHRLGEHEECARVLGGAIDRHQTEPKIYILLGSALRFLERHHDSLNAFVLAARLDPGSIVARNGMRAAAESVERIHAELLTA

SEQ ID NO: 2212 - protein, 257 aa, Niveispirillum irakense
MAHKLPLSAFIIALNEADRIGPVIRAVRDWVDEVVVIDSGSTDGTQALAASLGARVIHHDWPGYGQQKRFGEMECRHDWLLNIDADEEAVPELEAEVRALFATGSPPLQGYRIQTVMTLDGQARPHRFAPRHNYIRLYDRRHGHFADSETHDAVIMESGAVGQIKSIIIHRSIRSHADLINKLNRYSSAQAAEIIARGKARRFSALRLMAEFPVNLLRYFFLKGYWVFGLQGLEIAAIIAFFRFARIAKVRENLRKG

SEQ ID NO: 2213 - protein, 483 aa, Alicyclobacillus sacchari
MVPAVDAVKDQLLRGGYGEAKTLAVESLRDKGKLNAQLWEFLGESLEHLGEYDAAWAAYNRAWLLDPQAEWAEPARMRLRERLTGKTPVWIQELLAVPHVTISAAMIAKNEARTIGKAVAALSPAVDEIIVVDTGSTDDTVAIAEAAGAKVFRYEWNDDFAAARNFALDQVSSDWVLWVDADEVLFEEDVENPRIVAGLFNQLEPPAILRIGQINVFDDRVEPNYDMSRLFAVRTGLRWLGRIHEQIGLPEGGVFAGNFVRPAVRIRVRHDGYKPEVMNSKQKLQRNIHLLRAAVRDNPNDIASWGFLGRDLLLAGHVEEAVNALYTTERLAPSNPQYARLPEVRMFLIDALVALGRRAEAIAVGERAKAEHPNYPGTWFALGRALMNTAIHELGQAKEAFTKAQESAVGYRGMVAFDPQILTWRSTAAIADVEKLLGNSYNALKLYEDALSRSPENASIAGQIEWLRNQARMIQQERDKQGD

SEQ ID NO: 2214 - protein, 271 aa, Bosea thiooxidans
MPPLSIFIIAQNEADRIGRTIEAARALSDDIVVVDSGSSDGTQAVAEALGARVIHHPWPGYGLQKRFAEEQCRHDWLLNLDADEVLPPDLADEIAGLFTGGQPSADAYRIRIAEIFPGERAPHRFAYALAPVRLYRKSWGRYSPSPVHDRVELLPGAKVGRLKGTIHHFSVRSLGEQMEKLNAYSDAQADDLDARGETLSAFRLVAEFPANFFKAYIGRRHALRGAYGFMTAMNYAFYRYLRVAKHWERRLQRRAAQPDDATAARPGASDG

SEQ ID NO: 2215 - protein, 268 aa, Unknown
  Description of Unknown: Desulfobacterales bacterium CG23_combo_of_CG06-09_8_20_14_all_ 52_9 sequence
MEKERRREDRPVERVKDQTIGIAVIAQNEADRIMKLINSISFADEIVVVDSGSTDGTPSLCTQMGARVIQRPWQGYAAQKQFAMECVRSDWILNVDADERVSEALAHEITAAVASAPPETAGFSMPRLSFYLNRWIRHGGWYPDRKIRLVRRGKGEWSQDALHERLIVQGKVIPLSQPLYHDVYRNIADQVATINRFSDVAASEKGPRTGKHLLLGLLHGAVKFFESYFWKLGFLDGYAGMVIAANSSWYVFLKHAKAWEFSLKTPEK

SEQ ID NO: 2216 - protein, 265 aa, Microvirga sp.
MLPVSVFIIAKNEADRIGATIRAIRGLTDDLVVVDSGSTDGTQAVAEELGARVIYNPWPGYGLQKRFAEDQCRHEWLLNLDADEEVSPELLAEIRALFAHGEPPCQAYGIRIVETFPGEAAPHPLAYRVAPVRLYRRDAGRYSSSLVHDRVDLNPGTKTGKLKGLVHHRSVRSFGDQLAKLNSYTDQQAVDLEKRGISIPTWRVYFEFPAAFVKAYFGRLHVLRGTYGFLIAMNYATWRHLRLAKHYERKRMNALAKANSRTERA

SEQ ID NO: 2217 - protein, 256 aa, Unknown
  Description of Unknown: Deltaproteobacteria bacterium sequence
MSLSAVVVAQDEEERIAACIASVRGFCDEVLVVDGGSRDATVRIAEEAGARVVSRPFDDFARQHEFARSEARGTCILSLDADERASDDLARTARPALERGAAAYALPFRNHFRGVWLRHGGFHPDFHLRLFRKDLCRYDLTRPVHEKLIVQGAVERLEAPILHFTCSSLAQCLAKMERYGERAAWSLFAQGRRGQAWEVAFRPLWRFVRGYFLLGGFLDGAAGAAMAWARAYEAYARYARLWELSQFPESRGDALR

SEQ ID NO: 2218 - protein, 272 aa, Lysobacter gummosus
MDANEPARMRVSACIIAFNEADRIGDCLSSLAFCDEIVVVDSNSSDATVAIAHAAGAHVLQRRFDGFRSQKQYAIEQAAHDWVLCLDADERVSDALRASILAARDRGFADAAGYRFARLSDYFGRFLRHGNAYPDRVLRLFDRRHGGWRGKREVHEAASVDGAVVTLGGDLIHYPYRSLEQQLAKTERYARMMAEHDHARGKRATLAKLVLAPAWRFWRGYVLRGGFLDGWHGLIYAYVRANYVRQKTIMLWMLQHGQPVTTPRRENDTTPE

SEQ ID NO: 2219 - protein, 274 aa, Unknown
  Description of Unknown: Gammaproteobacteria bacterium sequence
MALIGEYSTQLQRVSGEVRVASRTGLSACIITYNEADRIEACLRSVAFSDEIIVVDSHSTDATRELASALGARVIERDWPGYRSQKQFAVDCARHDWVLCLDADERLSNELRGEIEAVRDSGFEGFAGWSVPRITDYFGRFLRHGNAYPDRLVRLFDRRRGGWTGYEIHENTRVQGRIGRLRGHLEHYSYRSLTDHYERLQRYADLMAQALYSSGKRCGLTQVLVNPRWRFVRGYILRLGFLDGWRGLVFALVEASYVRRKYLQLYMRGKGQSS

SEQ ID NO: 2220 - protein, 357 aa, Rubrivivax sp.
MTAAAPCRLALVVIARDEGRRIARLLNSVRPWVDDMLVLDTGSTDDTVQVARAHGARVETFTWCDDFSAARNHALALAGADWHLVLDADEWLIAGGEALQGLRGTPRDFVGALQLRDRFDLSAGQAGEAIAWLSRVLPRPVRYAGRVHEQPQHALPVRRLPLVVGHDGYVAERLAAKQGRNRRLLQQALADAPGDAYLWYQLGKDCAVYDEHAQAEAAFALAAGAADVEAAPWWLDLVSRRLFGLKCLGRHADAMDFAQTQMAAGVESPDFYFTVGDLLLDLAAADPAQAGEALPMAEAAWRRCLELGEHPEQPGAVAGRGSFLAAHNLAVVLDGTGRAGEAAELRARHPWPPQPTP

SEQ ID NO: 2221 - protein, 274 aa, Edaphobacter dinghuensis
MRPSIVLLTFNSSDSLGATLASIRGLSDDVHVVDSGSTDTTIEIAQAAGAQVTYHPFSNYGSQRNWAIDNLQLKYNWQLHLDADERLTDELKNEILLLPENPDCSGFFIGRFLQFLGRVLRHGGMSPTWHMRLFRSGEGTCESREYDQHFWCRGKTANLQHSMIDDIRMPLSEWTSRHNRWADAEVREILSDQKDGRIAGNLRGNLVERKRFLRGGYDRLPHFFRAFALFGYRYIIKLGFLDGIEGSIFWVLQTFWFRFLVDAKLYEHQKNTKV

SEQ ID NO: 2222 - protein, 722 aa, Unknown
  Description of Unknown: Actinobacteria bacterium sequence
MSHPPVSVIVTASGSPADFSACLDWLRPELGPQDEVVCVVPHDRPQLRRELTGQSWLRILDDDSADQAGRWSAGLAATRHPIAVLLDGDVLGSARWLDRVVQPFADPQVVAAGPRCHRSYGPQGASLPDHALASPASFREYAREWRDEHREEPTAVDRLGPVCVAVRRAALDQVGGPTADLPYEQLRAAGRLVVVHSALVAHVGTGRCALRSGVPGPRPLVSASMIVKNEEDMLADCLTALRGFVDEIVVYDTGSTDRTVDIAREHGARVVEGYWNDHFAEARNRSIAHCRGEWIFVVDADEIVTGDPASMRSALDQVTGPAAEVLVQCVEGHGLEGRGVLSIRLFRADGRYYGRLHEQVVDRVTGEPLTGSLLPGVELAHFGYTELRFAVKDKVARNLHLAELAVEDEDGSHDAVANLARSLVFAGRLEEAVAVCQRERAQARGSARQTFLEVLVQAAAGLRRFDLAEEALAELRTIDGAALSAQELDARLRYTQGDYAAALALVEAFPRTAPTGQAVQVLSRGQLVRVEIMSLHKLGRHEDAARLLCECIERGEFPFGMAEMTALLVAAGRPATTIAAVVPHRSVRELLLVAAQVPGAAFDDLLEVLWSRYPGDPAVLAFAARVGAHLPLIRSLDWAARLRQHGFADSCTLVALSGAAQRTPRERALAAAIALEMFGDDRAMPPLERALAEISDEEAPGLLDEMRQLAPGIAAAIEPAGV

SEQ ID NO: 2223 - protein, 305 aa, Lysobacter antibioticus
MVSPTDGLHNAGIRRAACRHQVSIIDTTRPAATTPTDGRPKLSACIIAFNEADRIGDCIASLAFCDEVVVVDSYSTDATAAIAQAAGARVLQRAFDGFRSQKHYAVEQAAHDWVLCLDADERVDARLRASIEAARARGFEDAAGYRFARLSEYFGKFLRHGNAYPDRVLRLFDRRRGGWRGKREIHEAASVDGAVATLAGDLIHYPYRSLEQQLSKTERYARMMAEHEYARGKRASLSKLVLAPAWRFWRGYVLRAGLLDGWHGLVYAYVRANYVRQKTIMLWMLERGQPVTTPPRKDDAGTPHD

SEQ ID NO: 2224 - protein, 255 aa, Aquitalea sp.
MTPLSIYVLTFNSEKYLSAILQAVAPLADDLLVVDSGSSDQTVAIATQCGARVLHRPFDDFRQQRDFAQQQCRHDHVFFLDSDEIPSPELVAHLLQLKQSGFQHDAYAIQRDWIVMGQQVHALYPVGCPDFPVRIIEKNRVRLSEQAVHEDFVGYRSRGRIELPIKHQTFHSMDEINRKLELYTNLDASDLARMSSRKNFALRQWTSPVGAFFKWYVKSGNWKDGRVGLILGVYAARFAHRKYKKALQIRRETGL

SEQ ID NO: 2225 - protein, 255 aa, Luteibacter sp.
MTRRPISLCVITQNEADRIRDCLLSAAPFCDDMVVVDGGSTDDTVAIAEAAGARVIHRPFDGFRSQKAFAVVQAKNDWVLCLDADERVGADLRAAIEQVADAGFGAAGYRFHRRNDFFGRFMRHGNAGADKVLRLFDRRQGGWRGPREIHESVSLDGDVRMLPGFLDHYPYRSLSELMAKQERYAHMMATEEFAAGKRATLGQIVVSPMWRFFRGYVLRAGFLDGWRGIVYALLRVEYVRRKYVKLWLLQHGQRA

SEQ ID NO: 2226 - protein, 273 aa, Unknown
  Description of Unknown: Gemmatimonadetes bacterium sequence
MRRSPHGSGPVAASWCGGSTRSSAWSSARRPYIVKRWSAASSREGRVQAPITIVIPTLNEAAQIAACIRHLDWTADVVVVDGGSTDDTVALARAAGARVITDGPRGIGEQRNAGIAVARHGWVFALDADERIGPELAQEIMAVPAGATPAGATHEAYRVKRRNAFQGRVLQRGHWGNDWVVRFARREFRYGGSAVHPGLQGLRDVGTLTQQLDHTPYRDLSHHIEKLVAYAQTSARALAARGQRARWSDLALRPAAHFWREYLLRGGFLDGRM

SEQ ID NO: 2227 - protein, 844 aa, Desulfotomaculum sp.
MNKETVSLCLIAKDEEEFVQSCINSVKHLVDEIVVVDTGSLDKTAKLAVEAGAQVYSFGWTGDFARARNFALEQASSGWILVLDADEILKPVSAGEFYRLLQAADVEGYFLRVESFLGTGWETATDQVVRLFRNKPAYKFAGAIHEQVAPSILSANGGKGLAAAPLVINHYGYLKAQVIKKNKFYRNTSIINRELESNPADPFLLYCLAVEHYQRGDFTGGLDCLEKALVLLQGTEGYFEDVLLNLALGLLKTGSMERLIDFTTKSLQMFPEHRDLILLRGLGYLSRGKHLEAMKDLNKSSQASDAGLLHGFGPRKLRKKKNLPVKLRVLTASPVRQKEAVLREFLESLQLLDTSGLELDFAFIDDNNRHNLLGAFSKKMKNVRIIPGVTADNYLCDETTHHWQENLIWKVAGYKDKFIRMALEGDYDYLFLVDSDLFLHPKTLSHLVSLGKDIVAEVFWTKWEPYLAPLPQVWVSDSYQLYHTRRGEVLSEEELNKRIAEFLKLLSNPGTYKVGGLGACTLISRKALSAGLCFKEIYNLGFSGEDRHFCIRAAALGLELYADTHYSPFHIYRESDLKALQEYKEKIFKSDGGSTQKKRGAASAPGQRRKKERAPKITLAMLVRNEAGRYLERVLENASRYVDNAVILDDASEDSTVEVCKKVLKGVPLTLVSNKKPGFENEIVLRKQLWEITVGTKPDWILILDADEIFEDSAPAAIRSLAAKPGIYHYSFRLYDMWDENLYRSDQYWNSHNFYRPFMVRFTPGFNYQWKETPQHCGRFPVNITGLGGDSSQLRVKHLGWMKPEDRLAKYCRYKKLDPYGKYGVMEQYLSILDPRPGLAPWVE

SEQ ID NO: 2228 - protein, 256 aa, Enterobacter cancerogenus
MSASLSVVTIAKNAADLLPDYLASVSWADEIILLDSGSTDNTVEMARAAGVKVYVDTDWQGYGIQRQRAQACATGDYVLMIDTDERITPALQQSIQAILAAPQPGAVYSIARRNYFLGRFMRHSGWYPDRVMRLYERTRYQYNDNLVHESLACENAQVIPLTGDLLHLTCRDFASFQRKQLSYATAWAQERHQRGKTASLTGIFTHTLGAFLKTLLLRGGVLDGKQGWLLAVVNAQYTFNKYTELWALCRGYSEKT

SEQ ID NO: 2229 - protein, 582 aa, Paenibacillus sp.
MSRLQRKPLISLCMIVRNEADTLARCLTSIHGVADELIIVDTGSTDSTLSIARSFGARIVSYPWTGDFAAARNAGLEQARGTWILVLDADEELDAQSKGELLLCAEHTEYEAFFVRIHNHKGTEFSSPVITVNPILRMFRNRPQYRFSGIVHEQIASAIVEATPAAAMHLSTVSVHHYGYADKVVAKKDKISRNLSLLKEQLRLNPRDAFHQFNTAVEYMRLGDYTQALEHIRLSLAEAEPDTSFIHLLYKYEARCRIMSGDQSGALDACIKGCALFPDYPDLHHIKGVLLLQAGAFAAARQAFRQALDIGVSPPGYHTESGLGTYLTYAALGQLCQETGEAGEAIACYTRAAQLHPAPAPLLVRLVRIMKCAGREHELAGWLEAHLPQLTADVPRLAGLLLAEGCLAAAAEVIGACAGAADADMPGGGAGTMNENPPRGDAEVSDMRAPGGAGTAGVADMPGGGSMTPLDGKWPAVHEPVSGAASSGLPSDNAAADLLRLLQRVNAVPADQLLHQDITLLLSHPAACVPEHSPSAAGPASRSSRAWLLMADRMLAALPAASGYGAAAARVRLTLPLPRTGE

SEQ ID NO: 2230 - protein, 276 aa, Unknown
  Description of Unknown: Methylobacterium sp. Leaf99 sequence
MTSPAVTCLPLSVFIIARNEADRIGATIRAVRDLTDDLVVVDSGSTDGTQALAASLGARVIHNDWPGYGPQKRFAEDQCRHVWLLNVDADEVVPADLAAAIRAAFARGEPARPAYRIAIAEIFPGEGRPHPWAYRLTPVRLYRKDRGRYSPSPVHDRVDLAPGAAIGTLRGVIHHFSVRSLGDQLDKLNRYSDQQADDLAARGVAIPTWRLFVELPGNFLKAYLGRRHFVRGTYGFLTAMNYAISRHLRVAKHYERRRADSRANPESRLDRPDAKF

SEQ ID NO: 2231 - protein, 580 aa, Selenomonas bovis
MRRQRVPAVISGTRRGALSTISGRAARRSASRGRRLQGARNGRCRRIRHGARRRSMEQKRKVIRVSACVIVKNEAENLPRWLAGMRQVADEMIVVDTGSTDDTAAIAAAAGARVVSFPWRDDFAAAKNFALDQARGRWIIFPDADEYFTEASLERIPQLLRQGDRDNSVGGYLCRLVNIDKDDGGRVSSVTTQVRIFRHLRQLRYQGSVHETLAIPRGKKLLLVPDITIHHTGYSREIVREKLQRNLALLEKNRKEHKHQDDVQEKLYYMDIYYGLQEYEKAIACAKEIIEDRKATETMRTRCYETWASACIEGHFPADEIEESLNAAIAARPEEAEFLLMKGLWLYEQQDYLQAEALLRQGLALHEDMQQIQQQRYQTGDIREVNLSLLEDNAERLLPHTWWRLGSLAELQRKGEDALACYEAGLRLQPRHARMLQAYWRLICAVGIDDVDRIQILRRLYRAEDVAWLAEQLSGLGAGRVYLYFARAAGVPLDTVAAQLAAGRADAAAEQAADCLDTACRFGLWAEASGAGGLDALLGNLPLRWQRVRSDYQAGHRTPEVHALQRLEREMQTILSRRMR

SEQ ID NO: 2232 - protein, 353 aa, Pelomonas sp.
MPAMAHVAPFSTALVVIARDEAPRIGRLLASVRPFVDTMLVLDTGSRDATPALAREAGARVEQFDWCDDFSAARNRALELAGADWHVVLDADEWLIEGGEALRELRSMTPDFIGTLQLRDSFDDAGQAREASAWLSRVLPGRVRYDGVVHEQPQHALPVRRLPLLVGHDGYRAERLADKRGRNRRLLARALQAAPNDAYLNYQWGKDCAVYDEDAAAEAGFARAAALGSPELPWWTDLVARRLFTLKRLKRHADAMDFADAQMPRCADSPDFFFAIGDLLLDLAADEPARAAELLPMIEQAWGECLALGERPGQLGAVAGRGSWLAAYNLALVLEGTGRADEAAALRAAHPAP

SEQ ID NO: 2233 - protein, 513 aa, Cellulomonas marina
MATRARLSIAAVLIVKDEEDVLRPCLESVGWADEVVVYDTGSTDATVEVARACGARVVEGYWDDDFGAARNRALEHVTADWVLSIDADEVFEGDPHQLRRRLGAGGAPVHSVLQVSTAAPGEHPVGASVIRVHRRGDVHWVGELHEQLVLDGGGPLLVRALPDVVLRHSGYDTDRFAERDKARRNAEIAENDLEAARAEGRPAVEVATREANLARSWVLVGRAQEALDLAERLVAEGHMTRRTTTTLARAMVGAADEASRPDLRERWLERWEETGSNPAEPWAVRATLAAAAGDAPATLEALEHVPTTSVDEDLVRLDRRSLAAAEVWALATVGKTARARRVAVDAAARGFAPGPPMVLLALLGEEALAEVAGAMPAPLWPPFVARCLTEPGTQALRVLDVLVAVRPDSGAALLAASRLHPVMDLEETARWAARLRGAGLEQDCTLVAVACDEAREPRDRAIAAALAYDVWRDVRGADALEDVLELVAPHEEDALLSELSVVAPGLVSRAASA

SEQ ID NO: 2234 - protein, 262 aa, Ahrensia sp.
MLLVATMQIFLPAISCTIIAFNEADRIAQTLSAAGKVCDEIVVVDSGSTDGTQTICESLGARVVHNDWPGYGPQKRFAEDQAAHDWILNLDADEVPTQELLDEIATWKRTVPQLSGYRFRQTTVYPGRAKPRPFADHHTYVRLYDRRVMRFRNSLVHDVVDSDGHEIGRFEGDCLHWSWRSLDHLARKLDGYTTLQAKEIRRPAWKLWLRRPIEYPVLLFRYALLKRHITGGLYGIRAAHTIAKGRAARIPKILAAQANERV

SEQ ID NO: 2235 - protein, 271 aa, Unknown
  Description of Unknown: Microgenomates group bacterium GW2011_GWA1_46_15 sequence
MPTISAVIIAKNEEKMIANCLDTLQWCDECIVIDNGSTDSTPMLAEQAGAHVIELKNAGFAEARTKGKDEAKSDWILYIDADERVTPKLKSEVQRVISSPGYQAYSVPRNNIHYGKWMQYGGWEKDRVVRLFQKKHLSAWEGKVHEHAIVDGVTGELREPLVHLTHRNMKEGLEKSIVWTDIEAHLFLAAGHPNMTTLRLIKVTLWEFFSRVFKKKAYKDGTEGMIEAMVQAMNRFLVYERVWELQRKPSLDETYQKIEKEIASLWRKQNG

SEQ ID NO: 2236 - protein, 263 aa, Asticcacaulis sp.
MEPPRLTPLSCCIIARNEGDRIGDVIRAVSGLVDEVVVVDSGSTDNTVAVAEGLGARVIHHDWPGYGPQKRFSEDCAAYDWILNLDADEIMTPELCAEIRALIASRPRLNAYRFRIMNVYPGRSAPRLWADFHNYVRLYDRRVVRFRESPVHDTVDTRNEPVGQLKGTVTHFSSRSFDHIRQKFEAYNTLQSKVLKKPSWQLWARLPLEYPLGFLRYYIFRRHFTGGIDGVRVSHIAAEARFKRILKFLDAKRNRQATNGPPA

SEQ ID NO: 2237 - protein, 262 aa, Aidingimonas halophila
MVNITGVVITLNEADNIMACLQSLSHVCDELIVVDSGSNDETCKLAERAGARVIRQPYLGDGPQKNVGPTHATHRWILSLDADERLTEEAIHCITALDLSTTTHDGFALRRRNYLGSRWIKACGWYPDYCIRLFDRDRTGFSDSQQHASVQARHPARLDADLQHFSFADLGELFTKASGRFSKRAAKIMYRRGKRANGWSPFLHGSSAFLRKFVFQKGFTAGLDGLSVSLSAAVNSYLKYAKLLEFQRDSRIRDNEDFDKIW

SEQ ID NO: 2238 - protein, 363 aa, Unknown
  Description of Unknown: Aquabacterium sp. sequence
MSARLALVMIARDEARCIERCLRSAAPWVDEMLVVDTGSKDATPALAAAAGARVLHFDWVDDFSAARNFALSQTGADWRLVLDADEWLEGGMRELQELLASSSAGFVGQVEVRSDFDDAGQVRQASSWISRLLPRGVHYAGRVHEQPVHRLPVQRLALRIGHDGYRSARQQAKGDRNERLLQAALRERPDHPYLLYQLGKEAEIRDDFHAAATRFKRAHAVLRGADALVGARINGTAAERPEREPGWLHDLVVRLIFSLKRDGEHAQAVQLAEREMAHWAQSPDFYFALGDLLLDWAASQPQRAGELLPMIEAAWLRCLEIGERPELEGAVAGRGSTLAAHNLALLYDSLGQGDKASAYRRMT

SEQ ID NO: 2239 - protein, 268 aa, Lysobacter sp.
MDTPRAAANPVPPLSACIIAFNEADRIGDCLASLAFCDEIVVVDSYSTDATVEIARAAGARVLQRPFDGFRSQKQYAIEQAAHDWVLCLDADERVDERLRTAIEAERERAFDGAAGYRFARLSEYFGRFLRHGNAYPDRVLRLFDRRRGGWRGQREVHEAASVDGAVRTLPGDLIHYPYRSLEQQLAKTERYARMMAEHDYARGKRATLAKLVLAPAWRFWRGYLLRGGFLDGWHGLVYAYVRANYVRQKTVMLWMLQNGQRVTTSDS

SEQ ID NO: 2240 - protein, 262 aa, Unknown
  Description of Unknown: Rhizobiales bacterium sequence
MPPLSIFIIARDEADRIGRTIAAVRELSDDIVVIDSGSTDGTQTIAEQCGARVIFNAWPGYGQQKRFGEDQCRYNWLLNLDADEVVPREMAVEIAALFAHGDPPADAYRTRIAEIFPGERAPHRFTYALSPVRLYRKDKGRYSPSPVHDRVDLSPDARIGRLKGTVHHYSVRSLGEQMAKLNNYSDAQADDLDKRGETLSVFRLVAEFPANFVKAYIGRRHALRGVYGFMTAMNYAFYRYLRAAKHWERRLKRHSDKDARNG

SEQ ID NO: 2241 - protein, 302 aa, Unknown
  Description of Unknown: Planctomycetaceae bacterium sequence
MNTSGNPAAADFYAGRSLVGRCADPSSLGQTDRLSACTRPITAVIITLNGATHLGRVLESVGLCSERLVLDSGSTDGTVALACAAGARVEQQAFLGYGLQKQHAVQLATHDWILSLDDDEVLDPEASDAICRLDLSDPLACWSIRRRTFIGAREMRHGPWKNDCVLRLFNRQTAAFKPLMVHEQVQPQRPPQLLPGSVAHYSYDNCCDLLARALRYAPLKAGLMHAKRQRVHTWMLPLRGLATFVRCYYLQGGWRDGAAGFTVALSRVIDATLPRTMLLLGEADEATKSSADQRHEKHASRK

SEQ ID NO: 2242 - protein, 255 aa, Unknown
  Description of Unknown: Candidatus Amesbacteria bacterium GW2011_GWA1_47_16 sequence
MFSVAIIAKNAADVIGSCIESVSPLTTDIVVVVDSSSSDTTSAVAEKSGARVFHRQFDDFASQKNYAVSLTKFKWVLSLDADETASEELIKEIKSAVPGTRFAAFAFPRINYIFGKSIYHTNWSPASDKHVWLFDKTRSHWENAVHERVSVDGPVGSLSAPKYHFHYRTVEEFLHKTNQYTTLDISSGSQSRFSSLIRPHWLRLILQPKWKFFRHYFLFAGFLDGWHGLFLSYLMAVYGACLAVKSWQKQNPHTS

SEQ ID NO: 2243 - protein, 263 aa, Hirschia maritima
MSKLPISVFIIAKDEEDRIVPVIHSVIDWVHEVIVIDSGSSDNTVKVSEAAGAKTVFNEWNGYGPQKVYGETLCSQKWLLNIDADEEVSGQLRSELESMFAEGKEPSLAGYQIPILICFPFDKGPRPFAPSNDPVRLYHRDKAGFKPELVHDSVVLNQGESSGKLKHHINHRCFRSHHHALEKINRYSSMQAEDMLSKGRKPSVLRLLTEPITAFLKSMILRRYGLFGVNGFVESCIYSFARFIRLAKAREEWAKHEAEKRKT

SEQ ID NO: 2244 - protein, 255 aa, Unknown
  Description of Unknown: Bacteroidetes bacterium UKL13-3 sequence
MAEVQLSVVIITYNEQRNIGKCIDAIKSIADDIVVIDSFSKDDTLIIAKEKGARVIQHLFQGHIEQKNFAITQAKFPHILSLDADEMPDEIFLTQIKQIKQDWQCDGYSVNRLNNYCGKWIYHGAWYPDVKLRLWDSRKGKWSGTNPHDRYQMTEGSAIKHLPGKILHYSYQSIDEHKKKSDYFSSIAANAYLAKGKKSSWFKIIMSPIFRFTRDYIFKKGFLDGKYGWIIATITANEVAMKYKKLYSLQCTTTG

SEQ ID NO: 2245 - protein, 260 aa, Pseudoxanthomonas suwonensis
MPLSACIIAFNEADRIGDCLASLAFCDEIVVVDSGSTDGTREVARAAGARVLERPFDGFRSQKQFAVNQCAHDWVLSLDADERVDARLRAAIEAERDAGFARAAGYRFARMSEYYGRFLRHGTAYPDRVLRLFDRRRGGWRGDREIHEAVSVDGPVALLPGDLLHHPYRSFMQLLDKKQRYARMMAEHDFARGKRATLGKLVLAPAWRFFRGYVLKAGFLDGWPGLVESFVSANYVRQKTIMLWLLQNGQPLVDPPRHGK

SEQ ID NO: 2246 - protein, 255 aa, Acidithiobacillus caldus
MNKVKLSAVYITKDAGAYFRASLASVVDLVEDIVVVDSGSRDDTLTLAEAAGARIYQRPWPGFGAQRQYAVEQAKTDWVLVIDGDEVLRPEGGARIRALLERPLDAAAYALRRRSYIGRRAIRHGDWGEDWVLRLLDRRRGHYDAGDLVHESWRCAAPGQRLPGLHLDHYTFASYADMLTKLARYGRLNAEQLYRRGRPIGSRMAMNHAVAAFLRSYVLRLGFLDGVDGAAIAWTTALGSFMKYAIAYEMQREQP

SEQ ID NO: 2247 - protein, 265 aa, Unknown
  Description of Unknown: Methylobacterium sp. 17Sr1-43 sequence
MADLAPLPLSVFIIAQNEADRIGAVIRAVRALSDDIVVVDSGSTDGTQALAESLSARVIHNPWPGYGPQKRFAEEQCRHPWLLNLDADEVVPDDLSAEIRALFAMGEPARPAWRLAIAEIFPGETRPHRWAYTLTPVRLYRLDAGRYSPSPVHDRVELRAGIEPGLLRGRVHHFSVRSLGDQLAKLNRYSDQQADDLEARGVTIPAWRVFVELPGNFLKAYLGRRHFARGTYGFLTAMNYAISRHLRVAKHYERRRRASAPGSPR

SEQ ID NO: 2248 - protein, 264 aa, Microvirga vignae
MVPISVFIIAKDEADRIGATIQAVRDLTDDLIVIDSGSTDGTQAVAEELGARVIFNPWSGYGPQKRFGEDQCRHEWLLNLDADEELSPALHEEVKALFAHGEPPCQAYGVRIAETYPGEAEPHLFAYRIGPVRLYRRDAGRYSSSLVHDRVDLKPGTKVGKLKGLVHHRSIRSLGDQIAKLNAYTDQLAIDLEVRGVSIPIWRVYAEFPAAFIKAYFGRLHFLRGTYGFLIAMNYAIWRHLRLAKHYERKRLNAQAKANKVEPA

SEQ ID NO: 2249 - protein, 324 aa, Unknown
  Description of Unknown: Mycobacterium tuberculosis H37Rv sequence
MTASELVAGDLAGGRAPGALPLDTTWHRPGWTIGELEAAKAGRTISVVLPALNEEATIESVIDSISPLVDGLVDELIVLDSGSTDDTEIRAIASGARVVSREQALPEVPVRPGKGEALWRSLAATSGDIVVFIDSDLINPHPLFVPWLVGPLLTGEGIQLVKSFYRRPLQVSDVTSGVCATGGGRVTELVARPLLAALRPELGCVLQPLSGEYAASRELLTSLPFAPGYGVEIGLLIDTFDRLGLDAIAQVNLGVRAHRNRPLDELGAMSRQVIATLLSRCGIPDSGVGLTQFLPGGPDDSDYTRHTWPVSLVDRPPMKVMRPR

SEQ ID NO: 2250 - protein, 262 aa, Salinicola sp.
MAAITGVVITLDEADNIEACLASLARVCDELIVVDSGSRDDTVIRAEALGARVIHQPYLGDGPQKRVGPQAASYRWVLSLDADERLTDEAVAAILALDLDDAGHDAYALRRRNFIGSRWIRHCGWYPDYCIRLFDRDRTGFSDSHQHASVPATNPQRLDADLEHYSFANLAELFGKASGRFSNRAAKIMYLKGKRANGWSPALHGANAFVRKYLFQRGFAGGLDGVSVALSAAVNAYLKYAKLLELQRDAKVRDAEDFDRIW

SEQ ID NO: 2251 - protein, 250 aa, Geobacter lovleyi
MPISATIITLNEGDNIADCLAALDFVDEIIVLDSGSSDQTEELCRACPKVRFYHQEWLGYGRQKNRAAELARHDLILNVDADERVSPQLRRSIEQFDSSSFAAARMARENYFGRRWIRHCGWYPDYSSRLYDRRRCSFSERAVHESLQTAGAVATLAGNLVHYTYNGVGDYLERMNRYSTLAAEEYHRAGKTAGLLRMLVKPVATFIKMYLLRRGFLDGRTGLVLSLLYAVYTFCKYAKLSELNAEEHRK

SEQ ID NO: 2252 - protein, 259 aa, Unknown
  Description of Unknown: Xanthomonadaceae bacterium NML08-0793 sequence
MTYSTAMPTPPQKLPLSAVVITRNEADRIGRCVSSLLPVCAEVIVLDSGSSDDTVAIARALGARVEHRDWDGFARQKNAAIALASQPWVILLDADEWLEPAAQQALHALFAGEIESADVWLLQRRTHWLGKPMQFGSFSREPIERLFRQHLRHADVPVHEYLDTQGHVVKPSRIRLEHDTARNTQEYREKLTRYAALWAKAHAGRRGGAIRGLLAALAYAVKNLILRGGILDGASGLAFHREHMRYSALKYRLLAEQER

SEQ ID NO: 2253 - protein, 262 aa, Salinicola sp.
MAAITGVVITLDEADNIEACLDSLARVCEELIVVDSGSTDATVARAEARGARIIHQPYLGDGPQKRVGPVAATHRWVLSLDADERLTDGAVAAIAALDLETTPNDAFALRRRNFIGSRWVRHCGWYPDYCLRLFDRERCNFSESRQHASIPASQPARLDADLEHYSFANLGELFGKASGRFSNRAAKIMYAKGKRANAASPALHGANAFVRKYLFQRGFVGGLDGMSVALSAGVNAYLKYAKLLELQRDAKVREATDFDKVW

SEQ ID NO: 2254 - protein, 256 aa, Yokenella regensburgei
MSRRLSVVMIAKNSADLLPECLDSVQWADEIILLDSGSNDDTVALAQSRGVKVFEDRDWQGYGIQRQRAQAYATGDYVLMIDTDERVTPELKTSLQQTLTAPQPGAVYSIARRNYFLGRFMRHSGWYPDRVLRLYERERWQYNDKLVHESLECGKAQVIPLQGDLRHLTCRDFGAFQQKQLAYATAWAQERHQKGKKTSLAGIFGHTLGAFVKTLLIRGGILDGAQGWLLAVVNAQYTFNKYTELWALNRGYSEKA

SEQ ID NO: 2255 - protein, 291 aa, Unknown
  Description of Unknown: Gemmatimonadetes bacterium sequence
MPCSRRGPAAQPAILSGGSTVSTAWSSALKLFIVKRWSVAGPGEERVLAPITIVIPTRNEADQIAACIGHLDWTADIVVVDGGSTDDTVALARAAGARVVTDGPRGIGEQRNSGIAVARHGWVFALDADERIGPALAKELITVSAHATHEAYRVKRRNAFHGRVVRRGHWGNDWVVRFARREFRYGGSPVHPGLQGLRDVGTLTEQLDHTPYRDLSHHVEKLVAYAQTSARALAARGRRARWSDIALRPAAHFWREYLLRGGFLDGRMGVIQAAMGAIGGFLKYAFLWEQE

SEQ ID NO: 2256 - protein, 281 aa, Marinobacter mobilis
MTLPVSVYCITKNEEVRLGATLSRVVDWADEVIVVDSGSCDGTEAVACHYGARFVHHDWQGFAVQKAYAASLCRNDWVLDLDADEVLSDELVSNLKALFEQEPDPDFAGFRMRWVLSQPVPGHPFRHDKSKRILRLYHRERARIEAVPGSNDDRPRVLSGRVGFVPGDVLHQPVITLEQMERKYLQLSNEQAHFLAEKGRRITSARLFVEFPLKFFKYYLLHRQILNGWYGLSVSIVAANRNFMRLAKAKELQMLTRLGEGHGESQSGVAPVDSDRPPRQR

SEQ ID NO: 2257 - protein, 490 aa, Sulfobacillus thermosulfidooxidans
MEKTTLQQYEVTTAELLRAGRWSAAQARAVEGLMHFPAGAQLWVYLGESLEHLGQRGPARTAYDRAWMLDPAAAWVPATWARLQHVAPTVPDWLERVLAVPAVTVTAALIARDEEDTIGTAVARLIPAVDEVLVVDTGSTDATVARAREAGARVVAYEWTDDFSAARNFGLEQVRTDWVLWVDADEWLFPEDVAVPRVVAGLFHAADPPPILRIVQMNRIGSVVDPNYDSSRMFRVGQGFRWVGRIHEQIAPPSAGASLIPWPRPVVRIRVDHAGYDPAVVQRKGKWDRNIRLLRQAVAEAPHDVVPLGFLGRDLFLAGHTEEAVEVLRQAETLAVATPGYGRLAELRQVLAEALWRLGRLDEALAVTERQTTDAPTFPGGWYLRAQLQLAQAVTLLDAAAEGFQTALQHAPTYRGVVSFDSQIATWKALVGLADVAKLKGRWDEALRLYEQARTVVPDNAAISQQIRYLQTQAAWVHDHVTSQRLGTAR

SEQ ID NO: 2258 - protein, 262 aa, Unknown
  Description of Unknown: uncultured bacterium sequence
MPQKISQKLPLSVFIIAQDEEDRIPACIKSVVDWVSEVIVVDSGSQDQTVSVSKSLGARVIEKDWPGYGPQKRFAEEQCRNKWVLNLDADESISPELALEIQKVFHTLPPKNKAFKLKIKDVYPHQKKPGFWPYTYQVVRLYHLDQGRYSKSPIHDRILLKNGTEYITLKGDVYHKSIRSLSHLIEKANVYTNLQATVFINQGKKVSLFRLAFEFPLSFLIGYFTRGNILRGRYGLILAYHYAYIRFMRLAKLWEKQVIINE

SEQ ID NO: 2259 - protein, 271 aa, Unknown
  Description of Unknown: Bosea sequence
MPPLSIFIIALNEADRIGHTITAARSLSDDIVVVDSGSTDGTQAVAEALGARVIFNPWPGYGRQKRFAEDQCRHDWLLNLDADEVLPPDLAAEIAALFQAGMPPADAYKTRIAEIFPGEKAPHRFAYALAPVRLYRKSKGRYSLSPVHDRVDLEPDARVGKLKGTIHHFSVRSLGEQMEKLNAYSDAQADDLDARGETISVFRLLAEFPANFIKAYIGRRHALRGLYGFMTAMNFAFYRYLRAAKHWERRLQRDAGITPPGASAGKRANDD

SEQ ID NO: 2260 - protein, 287 aa, Enterovirga rhinocerotis
MTYRSNRDGPDDTSAARQPLSVFFIARNEADRIGAAIRAARDLTDDLIVVDSGSTDATVAIAEGLGARVVHRDWEGYGPQKRFAEELCRHDWMLNLDADEIVTPELRAEIRSLFARGEPEEDGYRIGIAEVFPGEERPHRFAYTLHPVRLYRRSRGRYSASPVHDRVDMAEGARIGSLRAILHHFSVRSLADQLAKLDRYSDQQADDLAARGIVIPTWRILFEFQASFWKAYIIRRHFLRGTYGFLTAANYAIARHMRVAKHYERSRGLTRGPLSDATSVDPPQAKP

SEQ ID NO: 2261 - protein, 263 aa, Microvirga subterranea
MLPVSVFIIAKNEADRIGETIRAVRDLTDDLIVVDSGSTDGTQAVAEELGARVIFNPWPGYGPQKRFAEEQCRYPWLLNLDADEVVPPKLLAEIRALFAKGEPPCQAYRIGIAEIFPGEAAPHPLAYTLTPVRLYRLDHGRYSPSLVHDRVDLEPGTKVGKLKGVIHHWSVRSLGDQLAKLNRYSDQQAVDLEIRGVSIPTWRVFFELPAAFIKAYIGRRHALRGTYGFLTAMNYAISRHLRLAKHYEKRRLKVLGKSPSQTG

SEQ ID NO: 2262 - protein, 249 aa, Geobacter sp.
MADKISCIVIARDEEARIGDCLDSVRWADEIVVVDSGSSDNTVAIAKGFTDRVHVIPWQGFGPQKQAAVELAAHDLIFSIDCDERVTPELAAELRELAEAGDRLPGYTVPRRTFVGKNEIRHCGWYPDRTIRLFDRRRARFSDSPVHERVIVSGTVGDCCHHLLHYSFAGFRDMLAKMNHYTDLAAEQMHAAGRFAGYADITVRPLYMFIRTYLFQLGFLDGFAGYLVSVSNAVSVFAKYAKLMERNRK

SEQ ID NO: 2263 - protein, 295 aa, Yoonia litorea
MTTITVIILTRDEALHIKRAIASVAGFASRIVVVDSGSADDTVAQARAAGAEVLEHPWRNYADQFNWALDQIAGCGGWVLRLDADEIVEPDLAGAIRAGLPDVAGLIVTRRITFQGQPVRFGGVGAVPSLRLFREGQGRCENRWMDEHIEVTGRVAALHGSICDDNRKGLDWWMAKHVGYANREVVDLMARASEGSGLSGRPAVVRWIKQHFYRKLPSGWRAGVYFVYRYVLRGGFLDRAEARHFHVLQGFWYRYLVDTKMAEVVRYMKETGAPRRRAIREVLGIDIGSDREARP

SEQ ID NO: 2264 - protein, 260 aa, Unknown
  Description of Unknown: Methylobacterium sp. Leaf456 sequence
MSALPISVFIIARNEADRIGATIRAVRDLTDDLVVVDSGSTDGTQALAESLGARVIHNDWPGYGPQKRFAEEQCRHPWVLNLDADEVVPPDLADAIRAVFAAGEPAHAAWRIDIAEIFPGETRPHPWAYVLSPVRLYRWDRSRYSPSPVHDRVELGADVTAGCLKGRIHHFSVRSLGDQLDKLNRYSDQQADDLDARGVTIPAWRVFVELPGNFLKAYFGRRHFVRGVYGFLTAMNYAISRHLRVAKHYERRITSPRQPG

SEQ ID NO: 2265 - protein, 363 aa, Butyrivibrio sp.
MCDFLWVKAENTRRNLECIGGVTVATISLCMIVKNEESCLGKCLDSLKGIVDEMIVVDTGSTDNTIQIAKERGAKVYNFKWTGDFSDARNYSFSLASCDYIYTADADEELDEENRQRFLKLKEDIVELDVDIVQMYYSNQLSFRTVYNFDKELRPKLYKRIRKFRWVDPIHEQVALDPVVCDSDIEIIHKPKENHAGRDLAAFRKAVNDGRKFSRRLLGMYARELFMAGEDDDFIQAKDFFVQATLDNNRSLDEIKEASCVLAHIAVLEKDAESMLKYTLKDAITEMSSEMCYELGDYYYGKRDLDEAIVWYFNAAYECSSILDIKKSMELPRLAIAKCYRELGNEEQAADYEREAADVANME

SEQ ID NO: 2266 - protein, 276 aa, Microvirga pakistanensis
MSISVLILTYNEENILPECLESVSWSDDIVVLDSFSTDRTVEIAKAAGARVYQRVYDNEDSQHTYGLKEIPFKHPWVYIPDADEITTPELRDEMLAIAAAPDRPEAAFRVRFKVMFMGRWIRNSSLYPTWVVRLVRPEKAHFVREINSRCVIDGPEGRLRSHFLHYTFNKGLTAWYEKHNRYSWHEARESLKGLRDGFDWKDLISLKPEIRRRGMKELSFRLPFRPMLRFLYMYFFRLGILDGWAGYVYCRLLTTYESMIVFKIAEIRRREKGLSV

SEQ ID NO: 2267 - protein, 257 aa, Lysobacter silvestris
MNEAAGAKPPVTGVVIAKNEGDRIGRCVASLVPLCREVIVMDSQSDDDTVAAAAAAGARVVQQPWLGFAAQKNAVIALATTPWVLLLDSDEWLAAGTADAIRTVFADDHVERADVWKLLRRTHYLGTALDHGGWGKEKVERLFRNDLRYKPASVHEALDTAGKRVATLQARIEHDTARSDDEYASKLQRYATLWAQQRHAQGRRASAIDAPLHAGTYWLKNYVLRGGFLDGGTSARYHALHARYVFDKYRKLRGLAR

SEQ ID NO: 2268 - protein, 497 aa, Unknown
  Description of Unknown: bacterium sequence
MMPLNPRSPGPIPGLDVHASIRNRESCAPMKRKTVSLCLIARDEEATIGAAIKSVLALVDEVIVVDTGSRDNTRIIAEGYGARVLEVPWNDDFAAARNAGLGEAVCDWVLVLDADECLQPCRPVEFQRYLHDPQVAGYRVRIVSPREESGPDGRRQVRLFRNSPEARYEFPVHEQITPALEAWARSTGLVIQDTPLVVIHDGESPERRTRRRERNLRLLNQALETHGQEPYFPYRLACETMLRLDGEVLPVGGLDEALGYLQRSWRLLSPKDDEELRCLHWLPDLGTRIASGMLAMGEVPAARSTLGTLRGLVPGHPLVLLHGVAADIRYLAERTNDLTSDDASRIIAAARADLERLRSGEPVPPQDTIDGRVRDLYPLRYFGELALLEGRVTEASERFEQALEWDPNYSFAWLGLAECSRFAGDRKRAMKLYLRAVTESEWNHRAWFRGAALMADMGFHDNAASWLRTACARFPEHPRARRERLEALDHGEIPAHV

SEQ ID NO: 2269 - protein, 268 aa, Tepidamorphus gemmatus
MTSPVPVSCFIIAKNEADRIGPVIESVVGWVDEVVVIDSGSTDGTIDIARGLGARVVHNDWPGYGPQKRFGEDQCRNDWVLNLDADEVPTDELCREMIALFDHGRPPAPFYRFRIKLVYPGDTRPRLWADYHNYIRLYDRRAGRFSDSPVHDTVQTSGGRTVQLRGVAYHFSYRSFSYLVEKLNSYGDLQAKTIRKQAPTLLALRLPFEFPVAFTKYYLLRRHFTGGRKGFTFAMINAFFRFLRVVKLLEAAGSPPRSPTNSSDSPAS

SEQ ID NO: 2270 - protein, 337 aa, Unknown
  Description of Unknown: Chloroflexi bacterium sequence
MRAGGACGASGRAKHRAGAPGKRASSVDKPAASLSQASSAMESCAGPADDWGRDEAAGANARPRSGPCGCLPDNCDGGAETMKLFAVILTYNERENITACIETVRFADRIIVLDSYSQDDTAVLALEAGAELIERPFDNYASQRNAALAAVRGRADWVLFVDADERVTPALEDEILRAIEQPGYAGWRIPRLNYIFGRLTRGAGWYPDYQTRLLRVGRARYDETRAVHELVVLDGQEGTLTKPFLHYNYKTVAQFHAKQERYARLEAQTMFEKGIVPKPRNFVLQPLRQFWWRFITLGGIREGFHGLRLCTYLAWYEYRKYVMLRALWQQQVSDRVR

SEQ ID NO: 2271 - protein, 303 aa, Hyphomicrobium sp.
MSRLPISCFIISKDESDRIVRTIRSVKSWVDEVVVVDSESRDNTVALALAEGCRVITQPWLGFGPQKRFAEDQCRNDWVLNLDADEVVTPELRDEIIGMFSAGRPAQIAYAMALDLVYPGDQRPRRWARDHWYVRLYDRQVVRFRNSHVHDTVVMGGHAVGSLRHSVYHYSYRSYDDLKQKLGERMLLSAKHAQNSSQVMLFARLLLEMPINFFKYYIVRRHFTGGFKGLRYAWIQGTYRQVKIVHMWRARCEKSASAATVPCNGNTGLEARADIQGAMVSPRTDFGLYPKTPPAGEIYAERA

SEQ ID NO: 2272 - protein, 255 aa, Phycisphaera sp.
MRLSVAIVCKDSASTIGRTLDSVSDLADEIVAVDSGSTDATLDMLREADARIIESDWLGYVKTKQLALDSCEGDWILALDSDESLLPELIEGIKAALESPGEHTGFEVNRKVFIHGKALDHAWQPEHRLRLVKGGHYHWQGLDPHDHLAPIDPGEPISRLNGDLRHDSISTWPEFLEKQHRHAETMARSMLAEGRKPSRFKLLTSPAAALLKQLILRQAFLDGADGFRAAFATAKAAKLKHKALFRLSKGPSNPS

SEQ ID NO: 2273 - protein, 266 aa, Microvirga pakistanensis
MLPLSVFIIAKNEADRIGTTIRAVRELTDDLVVIDSGSTDGTQAIAEGLGARVIFNPWPGYGQQKRFGEDQCRHEWLLNLDADEELSPALREEIRALFAQGEPSCQAYGIRIAETYPGEAAPHPFAYRLAPVRLYRRDVGRYSPSLVHDRVDLKPGTKIGKLKGLVHHRSIRSLGDQIAKLNVYTDQLALDLEVRGVSIPTWRVYFEFPAAFIKAYFGRLHFLRGTYGFLIAMNYAIWRHLRLAKHYEKKRLNGKAKTKANSAEQA

SEQ ID NO: 2274 - protein, 280 aa, Leptospira bouyouniensis
MSSIPLSCAIITLNEADNLSRTLKAISFIDDVVVVDSGSTDETVEIAKSMGARVYYHKFDNYADQKNFAIAKTKYDWVFAIDADEVVSPKLKEEILKLFSNQDIKTKGFLVPRLTFYLGKWIRFGGYYPNYQIRLFHKAEGQFSGGLVHERVKLNGRPLKLKNPLFHYSYKNISDHLKFIDRYSSLFAEEEFRNGKRSSIFWAFMKGCFKGFYMYWIRLGILDGKQGFVLALLGFYYNFLKYLKLYEKTNSVPSFFVMVDAIHDVKGKKTTKKNSDQIHV

SEQ ID NO: 2275 - protein, 274 aa, Chelatococcus sp.
MQRVPPLSIFIIARDEADRIGRTIEAVKGLSDDILVVDSGSTDGTQEVAAKLGARVVHNPWPGYGQQKRFAEELCRHRWMLNLDADEVVPPGLAAEIAALFTGQGPEADAYELRIAELFPGEAAPHRFAYALAPVRLYRRDKGRYSPSPVHDRVDLLPGARVARLKGTVHHYSVRSLGEQIEKLNAYSDAQADDLDARGLSVSVFRLVAEFPANFVKAYIGRRHALRGIYGFMTAMNFAFYRYLRVAKHWERRLQRAGASRQPAAQQGSDGRNG

SEQ ID NO: 2276 - protein, 250 aa, Unknown
  Description of Unknown: Xanthomonadaceae bacterium sequence
MTGPLPLSGVVIAKNEADRIGRCLQSMRPVCSEMLVLDCGSDDDTVAVARAAGARVEHQDWLGFAGQKNEAISRATQPWLLLLDADEWLADGAEARLRELFASGRVEQADVWRLVRRNWFLGSRLRGDERPERLVRPDHRYLPMKVHERPDLAGKRVLDCDVVIEHNTARSLEQHRRKNSRYAQLWAEQKFEEGKRCSALAPWTHVAAYWLKAYLLKGAWREGRNGWHFHASHARAVIEKYQRLHALGKT

SEQ ID NO: 2277 - protein, 259 aa, Unknown
  Description of Unknown: Acidobacteria bacterium sequence
MKITATIITFNEADNIRAACESVAWADEILVVDSGSTDATREIAQACGARVIERAWPGFAAQKQFAADEAQHDWIFSLDADERVSIELRASIEDLLYTNEAQLADGYAMARRAFYMGRWIRGGGWYPDWQLRLYRRSRGRWEGAYIHESVKLAPDARKEILQGDILHYTVSDAAHHHRMIGERYAPLAARKMFEQGRRTTPWQIATVGPATFIRNFILKGGWRDGLAGFSIATFAAHHVFLKYLMLWELQNSKIVTSDK

SEQ ID NO: 2278 - protein, 264 aa, Roseibium sp.
MSKRLPVSAFLIAKDEADRIGRAIDSVVDWVDEVIVIDSGSQDDTVKIAEAHGARVVFNAWPGYGPQKRFGEDQCCNDWLLNLDADEEITPDLRTEIEALFETNRHEEAGSWRIMIRDVFAHENEPAAWAYGYHQIRLYDRRQGRFSPSSVHDTVRPDKDTVIRELSGIMAHRSIRSLDFQVGKYNRYSNMQVADLRERGRQLPRWRLLGEFPIAFFKAYFVRKYMRYGWWGFILSINYAHARFLRVAKDYEATLLERSPKAGS

SEQ ID NO: 2279 - protein, 461 aa, Unknown
  Description of Unknown: Acidobacteria bacterium sequence
MGRPLLSACLIVRDEEERLGRCLTSLRPVADELVVADTGSADRSREIARRHGARVVDIAWRDDFAAARNECLERARGAWILVVDADEVLENPDRAALEGLLAASDAPGFTVEIVSARDGGDEEIAHVARLFRNLPSHRYRGRVHEQILPALAASAGRPDWTPPRSGLRLRHEGYLAEVRERRNKLERNRRLLREEIARRPHDPGPRYFLARELAPHIGGDLLDMPPADEAWEAVRPAVEAVLSGPPCGLTDPLGALGVRLAVVRGEDELARRWSEMLGKRVGRSARWCYAEGERLLTIGAMGDREAAETAAGWFAAAAHAPEGSPAVITPRRLRTCWAPVRRDLARCLAGRDRPAQTATGEGVEPLLARAWAEAASGRSAAAVRLLADGVRRDRGDPRLWLALAVALRVDGETRRACRAARAALAAAPGWRAAEEWLAGRPAPFRGLLAPWSLAARESARA

SEQ ID NO: 2280 - protein, 258 aa, Pannonibacter phragmitetus
MSDVPAPISVLIRCFNEGDRIGRTLQSVQGLGREIVVIDSGSTDDTVAVCESFGARVISNPWAGFGPQRSFGEKQCGNDWVFYIDADEVVTPALRQEIAGLFRNGEPQHACYLVRNTMVLPGDERPRPFADYRKVPRLYNLKHARIRLEPSYDRMDVDEGFTTGILKGRQHHFSFRTWGHAIAKLNYTSDLAAATQKKKNGLLLRLRLVTEFPVEMLKYLIMRRFIFAGWKGYAFATIQSFGRFVRILKMLDKQRSSN

SEQ ID NO: 2281 - protein, 269 aa, Bosea sp.
MPRLSIFIIARDESDRIARTIEAVRTLSDDILVIDSGSTDGTQAIAEALGARVIFNPWPGYGQQKRFAEEQCRHDWLLNLDADEVVPADLAAEIASLFASGVPAADAYQLRIAEIFPGERAPHRFAYALAPVRLYRKDKGRYSPSPVHDRVDLVSDARIARLRGTVHHYSVRSLGEQMAKLNSYSDAQADDLDKRGVSLSVFRLVVEFPANFIKAYIGRRHALRGVYGFMTAMNYAFYRYLRVAKHWERRLQRRSAASASPPQRESHDV

SEQ ID NO: 2282 - protein, 274 aa, Unknown
  Description of Unknown: Methylobacterium mesophilicum sequence
MSAGPASPLPVSVFIIAHNEVDRLGATIQAVRDLTDDLVVIDSGSTDGTQALAASLGARVIHNPWPGYGPQKRFAEDQCRHTWLLNLDADEVVPETLAREIRTLFASGEPRRPAWRVGIAEIFPGERRPHPLAYTLTPVRLYRKDRGRYSASPVHDRVALEPGVTPGRLKGVIHHFSVRSLGDQLDKLNRYSDQQADDLEARGVVIPDWRVFVELPGNFLKAYLGRRHFVRGTYGFLTAMNYAISRHLRVAKHVERRRLAAARRDRVDPPDPTF

SEQ ID NO: 2283 - protein, 263 aa, Pannonibacter carbonis
MPARLPLSVFIIARDEADRIADTIRSVKDWVDEVIVIDSGSVDATVAVAEAEGARVVFNAWPGYGPQKRFGEDQCRNDWLFNLDADEVVTSGLAEEIQALMGAGGHLGADGWRVMIRDVYAHEDEPASWAYGYHQIRLYDRRKGRFSASTVHDTVRPEPGARLADLKGVVAHHSIRSLTFQVEKYNRYSTMQVNDMRARSRSLPRWRLVTEFPFAFLKAYVARKYVRYGWWGLILSVNYAHARFLRVAKAYEADLVDRHKPDR

SEQ ID NO: 2284 - protein, 252 aa, Unknown
  Description of Unknown: Proteobacteria bacterium TMED72 sequence
MKAPLSICLIARDEELELARCLDSLPSADEVIVVVDSRSVDGTEQLARERASRVEVRPYTGQSDQKSHCLSLARNEWVMIMDPDEVVPAALAAEIEEKLADPDEGLGGLSVNRRTWHLGRWIMHGDFYPDWTLRVFRRSRSRWVGDDPHARIEVDGRIDRLSEDLEHYSYRDLADQVDRIQQFSAESARALSEAGRRARLRDLLFRPPARFLRAYLLRRGFMDGIPGLVIAWATAFHVFLKYAKLWERQQRG

SEQ ID NO: 2285 - protein, 255 aa, Unknown
  Description of Unknown: Rhizobiales bacterium sequence
  MOD_RES (154)..(154): Any amino acid
  MOD_RES (203)..(204): Any amino acid
  MOD_RES (228)..(228): Any amino acid
MQLSVFIIAKNEADRIGRTLEAAAKLSSDLVVIDSGSTDDTVKVAEKFGARVVLNEWPGYGPQKRFGEEQCQHDWVLNLDADEVLSDELITEIRHLFANGAPEKSGYTLNVVTVYPGHQRPRPFADFYKINRLYDRRKMRFSASRTDDRVVENXLPVGELAGPVWHHSFRKIEDIAPKMENYARQQVAEKASKRTKSGLKARXXIEYPVNLLRYLFGRRHITGGLLGXRYAHEVAKSKKKRLKIFLQALEDQNQH

SEQ ID NO: 2286 - protein, 269 aa, Kushneria sinocarnis
MTDSRQGTTPISGVVITLDEADNIEACLASLAQVCSELIVVDSGSSDATLARARAMGARVVEQPYLGDGPQKNVGPALASHRWVLSLDADERLTEQAVTAIRALALSDDGPDGYALRRRNFIGSRWVRACGWYPDYCIRLFDRDRTAFSDTRQHASVQATRTVRLDADLEHYSFADLGELFTKAGGRFSRRAAKIMYLKGRRVNAWSPWLHGSNAFMRKYLFQRGFTAGVDGLSVALSAALNAYLKYAKLLEYQRDAKVREAEDFERIW

SEQ ID NO: 2287 - protein, 255 aa, Unknown
  Description of Unknown: Acidobacteria bacterium sequence
MERGMPTVPVSAVLITRDAERWLGAVLSPLAVCNEVLILDSGSTDRTREIASACGVMWHEHPFDGYGSQKRRAVELARHDWVLSIDADEILDEEAAEAIAAIDWTSQDPKNCWAVRRRPYIGAREIRHGHWVPDPVVRLFNRRSHTFSSAPVHESVTPRGPIRCLPGAMAHHSYEDLAELFRADYHRLKAAEYLKVGRKVPGAFDLSARALWAFFYSLILKRGFLDGPAGVVVALSGAVNAVLGLALAGEGRPAG

SEQ ID NO: 2288 - protein, 273 aa, Bosea sp.
MRPRVPLLSIFIIARDEADRIERTIRAVRALSDDIVVVDSGSTDDTRDLARALGARVISNPWPGYGQQKRFAEEQCRHDWMLNLDADEVVPPDLATEIAALFSGSGPQADAYELRIAEIFPGEPAPHRFAYALAPVRLYRKDKGRYSPSPVHDRVDLAPGARIARLKGIVHHYSVRSLGEQMAKLNSYSDAQAEDLDKRDVSLSVFRLAVEFPANFIKAYIGRRHALRGVYGFMTAMNYAFYRYLRVAKHWEKRLQRRAPGATDPAARNPSDV

SEQ ID NO: 2289 - protein, 281 aa, Solimonas variicoloris
MPLPAESPPPCPPPRARRSLSVMIICCNEADRIRACLESVAGWADEIVVFDSGSRDGTVDIVRRYTDQVYVTDWPGYGPQRNRALQQCRGDWVFSLDADERVTPALRAEIDRALADPQLPYTMLKMPWRTWFFGAPLRFGRYTSPQGKLFRREGARYRDHQVHESLLMPSRVDGILKSPLDHHSWRDYRHAQEKHLQYACLLAAQKHAAGQRGSMGMATLRFFTDFLQQYVLRLCLLDGWRGFLISVILAQYAFHKYAALYTLQDRAPRRLTAGAASLPGD

SEQ ID NO: 2290 - protein, 271 aa, Unknown
  Description of Unknown: Rhizobiales bacterium sequence
MPPLSIFIIAQNEADRIGRTIEAAQTLSDDIVVVDSGSTDGTQALAEARGARVIFNAWPGYGQQKRFAEEQCRHDWLLNLDADEVVPPDLAAEIAALFANGPPPKDAYKLRIAEIFPGEGAPHRFAYALAPVRLYRRSKGRYSASPVHDRVDLAPDAQVGRLRGTVHHFSVRSLGEQMDKLNAYSDAQADDLDARGGTLSVFRLVAEFPANFLKAYIGRRHALRGIYGFMTAMNYAFYRYLRVAKHWERRLQRRASAQAAPPPANHDGRDG

SEQ ID NO: 2291 - protein, 266 aa, Blastochloris sp.
MSEAMPAAIPVSIFLIACNEADRLGRTLQAVQGLTDDIVLVDSGSTDDTPRIAESFGARVVHNPWPGYGPQKRFAESLCRHRWVLNIDADEVMPPDLVAELRALFAGGEPPCDAYEIAIAEVFPVETAPHPWAYSLAPVRLYRTDRGRYSDSPVHDRVVLAEGARVGRLKGRIHHFSVRSLGEQIAKLNAYTDQQADDLDRRGVKLPVWRLFTEFPAAFLKAYVGRRHFVRGLYGVMTAANYAFFRYLRLAKHLERRMIRQARGEQ

SEQ ID NO: 2292 - protein, 261 aa, Beijerinckia sp.
MAGSPPSWSPPDASIRTRVSCCIIAFNEADRIARTIESVRGLVDEVIVVDSGSTDGTQALAEGFGARVVHRDWEGYGPQKRFAEEQARNDFVLNLDADEWLSEELRAELRAILVQERMPAASFRMRMTMVYPHHERPHIMADSHNYIRLYDRTKTRFAASMVHDTVEPTADVIQLKAPAYHQSFRSIAHLVRKEIGYYELQKREKTKNKALLVLRVFTEIPWQFCKFYFIRGHIFGGFYGFILSVAVAFMRWTRILVLLGY

SEQ ID NO: 2293 - protein, 277 aa, Unknown
  Description of Unknown: Chloroflexi bacterium sequence
MFDRRRVCRASRRVSLVGATVTISAAIIAQDAERHIRACLVCLRFADEIVVVDGGSLDRTAENARALGARVLVRPFDNYALQRQFALENSHSDWVFFVDHDERVSAGLAAEIRTVIARDGPDSPVGYWVPRRNYIAGRWTRGGGWSPDRQLRLVRRDRSRYDLDRPVHELVHLDGRDGVLACAIVHYNYDDYGQFLCKQARYALLEAERRRSTGETPSARRLITSPLREGWRRLVIEGGARDGIHGVWLALGMAWYAFQVEARIRAYSVRVSSARRS

SEQ ID NO: 2294 - protein, 263 aa, Pseudoxanthomonas indica
MPVSACIITFNEADRIGDCLASLAFCDELVVVDSHSTDATVAIAEAAGARVLQRPFDGFRSQKQFAVEQARHDWVLCLDADERVDATLRASIEQARDGGFAQAAGYRFARLSDYFGRFLRHGNAYPDRVLRLFDRRRGGWRGKREVHEAASVDGAVVTLAGDLIHYPYRSLEQQLLKTQRYARMMAEHDFARGKRATLGKLILAPAWRFWRGYLLRGGFRDGWHGLVYAYVRANYVRQKTIMLWLLQNGQPVATPPPAQPRQG

SEQ ID NO: 2295 - protein, 255 aa, Unknown
  Description of Unknown: Marinobacterium georgiense sequence
MTDTTLPISVTIIAQDEADRIGMAIESVRNWVDEVVVVDSGSTDGTQEIAASLGARVVHHDWPGYGLQKRFAEDQARNDWIFNIDADERILPELQAEIVAMFTQAPDADGYFIAIHDRLYCTDRLSAYTPYKPVRLYRKSKGRYSTSPVHDRVQMEAGAKTAALKGRMAHDSLKSFHHRIEKMNEYTEAQAKDLLARGRKPSTFRILTEFWTAFIVGYFFRGYWRGGLMGYIYAVNFAYSRFLRQIKLYESERKK

SEQ ID NO: 2296 - protein, 250 aa, Unknown
  Description of Unknown: Acidobacteria bacterium sequence
MTPISAVLIAQNEEHKVQAAIDSVRFCDDVVLVDSGSLDHTREVAEKAGARVIVNAPWPGFVAQRDFAVRAARHDWVLALDADERVSPGLRGEIEALRARGFDCPGYRMSRVALYLGRWIRATDWYPDPQIRLFDRTQGGWEGALVHESVRVRGRVGSLAGELEHHPYADISDHLRKIDLYTNLWARQALMSGRRAGPFEMAASSLWAFFRNYLLKGGFMLGSAGLTISTLNAYYTYVKLAKLEELARSR

SEQ ID NO: 2297 - protein, 264 aa, Microvirga guangxiensis
MLPLSVFIIAKNEADRIGATIRAVRDLTDDLVVIDSGSTDGTQAVAEELGARVIFNPWPGYGPQKRFGEDQCRHEWILNLDADEELSPALCEEIKALFANGEPPRQAYGIRIAETYPGEAAPHPLAYRLSPVRLYRKDAGRYSSSLVHDRVDLKPGTSTGTLKGLVHHRSIRSLGDQIAKLNLYTDQLAHDLEVRGVSIPTWRVYFEFPAAFIKAYFGRLHFLRGTYGFLIAMNYAIWRHLRLAKHYEKKRVNALAKANKAKGA

SEQ ID NO: 2298 - protein, 260 aa, Desulfococcus sp.
MKIDIRDLMSRPTIGVAIIAKNEADRIGRLLSSVSFADDVVVVDSGSTDSTRDVCLEHGARVVEREWAGYAAQKQFAMEQLNTGWILSMDADEEVPDRLAGEIVDAVSNADEDVGGFSMPRLSRYLGRWIRHGGWYPDRKVRLVRHGKGRWLGNGLHERLEVDGRVVPLSNHMLHYVYRNIADQVGTINRFSDTEAAARGARSGWFVFAGVAHAAGKFFECYIWKLGLLDGIPGLVIAMNSAFYVFLRHAKCWELGRDVS

SEQ ID NO: 2299 - protein, 259 aa, Zobellella denitrificans
MNQRPTLAAVLIVKNEADNLADCLATLDWVDEIVVMDSGSTDRTREVAEAAGARFFENTDWPGFGRQRQLAQDRVQSDWVLWIDADERVTPELRTSIEAVLARPTDDTVYAISRLSWVFGRFIRHCGWYPDRVLRLYPRALTGYNDALVHEKVELKPGINTARLRGDLLHYTYRDLEHYLVKSAGYAAAWARQRAERGKKGSLAQGLLHGVGCFLKMYLLKAGFLDGRQGLLLCLLSAHSTFVKYADLWVRTETSGPRE

SEQ ID NO: 2300 - protein, 255 aa, Halomonas salina
MTPISGIIITLNEADNVTDCIASLQRVCDEVIVVDSGSQDDTVALAEAAGARVIHQPYLGDGPQKAFAVPQAAHDWILALDADERLDDDAVAAIQGLALDDPQQAFRFRRRNFAGRHWIRAAGFYPDPVTRLYNRTTSGYLPKKAHSSVQAPSVTDLDAHLRHFTYRDLSHWISRIDALSSRDAWAMKERGKRPSAVRPALHAATATFRKLILKGGLFQGADGFTVAMTTAFHAYMKYAKLNELYENERAEQNER

SEQ ID NO: 2301 - protein, 265 aa, Cupriavidus taiwanensis
MKVSAVIITRNEAHNIGPCLESVSWCEEAIIVDWASTDDTVAIARAAGATVIQAEDWPGFGPQKNRAVQAASGDWILSLDADERVTPALRDEILHHLQRNPAQALALPRLSAFCGTFVRHAGWYPDYVTRVFRNGRGRFTDDLVHEHLKVDDPVTRLREPLVHYSYRTLSDVLRKIDSYSSAGAQQAYARGKRSSVASAAGHGLWAFVRTYLLKRGFLDGSAGFGVALMNAQASYYKYAKLAQLHAAAAAANHAAHQPAHNQRAR

SEQ ID NO: 2302 - protein, 269 aa, Pseudoxanthomonas sp.
MSSTSAHDPRPRISACIIAFNEADRIGDCLDSLAFCDECVVVDSGSTDTTLQIAQAKGARVLQRAFDGYRSQKDFAVQSASHDWVLCLDADERVDEALRLAILAARDRGFADAAGYRFNRLSDYFGKFLRHGNAYPDRVLRLFDRCRGGWRGTREIHEAASVDGALQTLAGDLVHFPYRSLEQQLAKTQRYALMMAQHEFARGKRASFGKLVVSPAWRFWRGYVFRLGFLDGWRGLVYAYVRANYVRQKAIMLWLLQHGQPVQDPPRKS

SEQ ID NO: 2303 - protein, 414 aa, Sulfobacillus thermosulfidooxidans
MRCVVAMIARNEEETIGQCIESVKPWVDGIIVGDTGSTDNTRRIAREKGAVVIDIPWTDDFSAARNAVLDSVVTDWVLVMDADEELPPGQGQILRELLTRPTSECYDVQILSPIGNGATINTAWVTRLFRLYPHIRYKGAIHEQISQSFINAGMVPANSKLQLWHWGYMDRVWREKNKTARNRHLLLNQVKDHPDDSYSWWQLAVSELNEENWNGAKAALEQARQHNMIAGLAPLIEYVDAKVAWGEQDFRRAIVATQRAESLASQWADPIWLRGEMHRALNNWAAAEIAYHQALKLGFQPESALTHEAGAGTYRSWYGLGATYLSRNEQRRAFATFAVAWQKYPYDVMLWNGICMGFRGQLASDAALELLEIIPNVAELRTKHLGPPRNNWEWVMWKVWADKGLCPPPFLQVS

SEQ ID NO: 2304 - protein, 259 aa, Unknown
  Description of Unknown: Hydrogenophilales bacterium 17-64-65 sequence
MTTRLPISVFIIAQDETDRIRLTINSVKEWVDEIIVIDSGSRDDTVAVSEALGARVVFNAWRGYGPQKVFGEGLCRNDWLLNLDADEEITPELGAEIRALFQSGLPGAAAYTLPILPLYPFQERGHRWTAFHHPIRLYRKTFAGFKDSPVHDSVVVHEGRVGHLKGMVNHRSFRSLSHHVDKANFASTARAQDLFQKGRNPSALSLLLIPLLAFFKSYILRREFVNGIDGIVVSHMYAFQRFIRLAKARELHRLARRGK

SEQ ID NO: 2305 - protein, 252 aa, Segetibacter sp.
MLPVSVVIICKNEADIIGRTIHSVQALTDDVVVVDSGSTDGTIAVIEAAGATLVRSEWEGFGPTKNKGIAAARHNWILSIDADEQPDQTLIDSLHQVNLSDTHAVYNLKFKTYLGRKLVRYGEWGTDAHIRFFNRSTIRWNEATVHEQLVLPPGTSRKTLNGFIHHYSMKDLADYTTKMTQYALLSGEHYYQSGKRAGWIKRYLSPAFSFYRNYLFKLGFLDGREGYLIARVTAYYTMLKYARLDELNRKTP

SEQ ID NO: 2306 - protein, 277 aa, Kandeliimicrobium roseum
MSISTLIMTLNEEENIGRCLASLGWCDDIVVLDSFSTDRTVEIARAAGARVVQHRYESELDQRMFGLTQVEFRHPWVYTPDADEVTPDDLRDEMLAIAADPDRPEAIFQARYKNMFMGRWIRRSSLYPTWITRMVRPEFVRFERKVHSRCVSDRPTGRLKSHFIHYSFNKGLSAWYDKHNRYSSVEAALATSKGRHPPIDWGGLVSSEGADRRAAIKAIAARMPFRPTLRFVYMYLLRGGFLDGWAGYTYCRMIASYELMIEIKTAERLRRDAGLPI

SEQ ID NO: 2307 - protein, 715 aa, Motilibacter peucedani
MKRSPASVVVVAQHGPEGRARADFLARALRPSLGVRDELVVVADGEPGMSEIAAARLDDAQDLAARRLSGARRAKHAVTVLVCADCLPPSHAIDPLVVAVAAGSVAAGPLHDLGVGRQCVTAPVKALASPQALRDWARVWRDEHRGETRTVPALGEGVIAVRTDALLADGGLPGLGERLGAVGTLTVVADSVWHHRGTRGCGLAPRRAPLLSAVYIVKDEEELLPSSLAALEGVADEVVVYDTGSTDRTVEIARAAGARVVLGYWDEHFGDARNRALSHAFGDWHLQVDADEVLEVGDVALFRRALQEATTEALAIDVENITGNGMGTPQTGLVRRLARRDEGWFAGRLHEEVLHREGRGPVQGALRGVTLVHSGYLAARTEERDKAGRNLRLASLGLADAVPEGLTKGTALANLARSQRFAGDNEGVLRTAALAEGESFPPINWRELCHAAAVAAASLGRFDVAHEWLDKLTASMTDPVGSYEIAAEVLLAEGRYEDVLDVVSRMPVEGKDENNRVVRRDGALTFEIAALSRLGRAPEAAWRVVEVVRTGSMNISLERVLALFEAEPAALDAYVAALHDSMVMLTLAESRWVRPERADALLEAMWRAGRARSAVLAAATVVAPRLTVLRALEWAARLRGAGVSDCALVALARDTGRSPRDRVLAAALVIEAFGDDRTMPDLVAAAELIPDAEADAVGAELRTVAPRVAAQLLAA

SEQ ID NO: 2308 - protein, 268 aa, Bosea sp.
MPPLSIFIIARDEADRIARTIAAVRALSDDIVVIDSGSTDGTQAIAESLGARVIFNPWPGYGPQKRFAEDQCRHDWLLNLDADEVVPPDLAAEIASLFANGEPAADAFELRIAEIFPGEPAPHRLAYALAPVRLYRKDKGRYSPSPVHDRVDLVAGARVARLKGTVHHFSVRSLGEQMAKLNGYSDAQADDLDKRGITLSVFRLVAEFPANFIKAYIGRRHALRGVYGFMTAMNYAFYRYLRVAKHWERRLQRRTDAAAPPQQKSDEN

SEQ ID NO: 2309 - protein, 345 aa, Sphingomonas sp.
MSRKPVIAAVLIVRDEARCIARCLDSVRPHVDRILVLDTGSTDGTPLLAAQCGAQVHHLPWPNDFSAARNHALDLVDADWNLVLDADEWIVSGGEQLRRWCRAPRLGQLCVHSAMEGTATGAERRNWLTRLLPRGVRYQGRVHEQPVSPLPRARIELHIRHDGYLAGQLARKRDRNPPLLRRDLRDRPGDPYLLYQLAKDAEIGGDLVEACAHYAAALEASPLEANWRHALVVRQLHCLGRTDRMDTALALADAEMAHYPESPDLFFVLGNLLHDRAQTDPVQALDQWLPLAIGAWERCLAIGERPDLEGSLQGCGSHLVRHNLETARTQMRLLGMQQELARLVA

SEQ ID NO: 2310 - protein, 262 aa, Unknown
  Description of Unknown: Candidatus Sulfotelmatobacter kueseliae sequence
MTISVAIAAMDEEANIGRTLASVRWADEIVLVDSGSRDRTCEIAREHGARVIAEPWRGYVAQKQYAIELCTKDWILLLDADEEVSPGLAEEIRAAIADPNAASGYRLPRKNLFLGRWMRHGGFYPDPKLRLFRRGQGFVTGHDPHDRCELMPGVPQDAPQRTRQFKNALVHYTYPNLTLYIAHMNRYSSLGAQLAVSKGHRSFSFINIALRPLATFMYNYFFRLGFLDGREGLLLHMYHALYVSWKYAKAWELSRNNRTQPD

SEQ ID NO: 2311 - protein, 265 aa, Microvirga aerophila
MLPLSVFIIAKNEADRIGETIRAVRDLTDDLIVIDSGSTDGTQAIAEELGARVIFNEWPGYGPQKRFGEDQCRHPWLLNVDADEVVPPKLAVEIRALFAGGEPQRQAYQIGIAEIFPGEAAPHPLAYTLWPVRLYRKDHGRYSPSLVHDRVDLQPGTRIGKLKAVIHHRSVRSLGDQLAKLNRYSDQQAVDLEIRRVSIPTWRVFFELPAAFIKAYIGRRHALRGTYGFLTAMNYAISRHLRLAKHYEKKRLNALKNGASRKDRS

SEQ ID NO: 2312 - protein, 355 aa, Flavonifractor sp.
MDTLSLCLIVRDEEDVLARCLESAAGLYDELIIVDTGSTDATVDIARRFTEHVHFFPWRDDFAAARNFSFQQATMSYCMWLDADDVLLPADREAFLALKRDVLPGPDVVMAPYHAGLDEKGAPLLTYCRERIVRNAPHLRWEGAVHECIAPVGEVIYTDAAVTHQKLRPGDPDRNLRILEGVLSRGRNLSPREQFYYGRELAAHGRFEEAVKVLEDFLTVGWGWKENNIEACRNLAQCYLALERPRHARRALLESLAFDGPRAEVCCDLGKLLLDQGDYVRAAAWYQEALKHPCDPRSGAFCLPDCHGFLPCIQLCLCCHHLGQRAEAEAWNRRAGTYRPDHPAYRYNLDFFART

SEQ ID NO: 2313 - protein, 280 aa, Leptospira kemamanensis
MTSIPISCAIITLNEADNLSRTLKAISFVDEIVIVDSGSTDDTVEIAKSFGAKVYHRPFENYADQKNFAITKTKHDWVFAIDADEVVSPKLKEEILDLFSKNNLKTKGFLVPRLTFYLGKWIRFGGYYPNYQIRLFQKSEGQFSGGLVHERVKLNGKPSKLKNPLFHYSYKNISDHLKFIDRYSSLFAEEEYRKGKRSSIFWAFMKGCFKGFYMYWIRLGILDGKQGFVLALLGFYYNFLKYLKLYEKSNSIPSFFVMVDSVHNVESKKSTKKNSDQIHV

SEQ ID NO: 2314 - protein, 572 aa, Unknown
  Description of Unknown: Clostridia bacterium sequence
MPACGLPIPRPRPWTATRLPSLCPSTSSSTPALPTLPSLMVRPSPLTPGSRLPYNQVTRGKPIRKGSLATFPGRVRRIIMEEIAPGVSLCMIVRDEEENLPRCLDSVAGLVDEIVLVDTGSADHTVSLARSYGARVFRLEWPENFAMARNFSLDQATRQWIFCLDADEELAPAGRASFRPLLAREGVEGYLSTILNLVDNPAGEREILRHSSLRLFRNRPGYRFRGPLHEEILTSIRESSPQAVIAASPVEIIHHGYTSPAKAARNKAGRNLGILRQALAGNPGDLFLQYNLGLEYWQLGDFPAAARWLGQVYAGCGREWPHAAALTRNYAICLLELGDPATAVAVLEQGAARFPAYTDLFYLLAVAHRRLGQPEKAVELASRCLELGEPPAGYVSTWGVGGHKACMLAGEMLEELEDYEQAARAYTVALQRHPQYVPALFGLVRVLGRLYDAQGCVSYLEQYFDFSTARAVEVLLEALATARMNEAGLLVARKAVRLWPENQRLRLLLARALMLREREVLAAARGRFRGVPVLEREWYGAALALERLEALISGRKRTGGEAECPPPPSACA

SEQ ID NO: 2315 - protein, 469 aa, Unknown
  Description of Unknown: Verrucomicrobia bacterium sequence
MNRKTVSLCLIARDEEASIGMAIKSVLALVDEVIVVDTGSKDNTRIIAEGYGARVLDVTWEDDFSLARNACLAEALSDWILVLDADEFLQPVRPVEFQRLLHDPQVAGYRLRMASSLEEEAGRNSTMIRLFRNDPAIRYSYPIYEQISESLNWWAEKEGLQVKDTNLTIVHEGGQQAAQVQKRQRNQRILHKAMAEFPIEPYFPYKMGCAGIQTLDEEVLPTAGLTVALGHLHTAWLRMESRDPKHLQTQRWLPDLAIKSSSGLLALDRVEEARNLIQKVGKHFPNDPRVILQTAAAEIRYLELHCDDMNPQTSRKMESDIQFRLQELLDRAPESDGFAIDRRILDLYPLRYLGELALLGGHVSEAVGYFEQALSLDPDYSFAWLGMAECSRFAGDPKRALKLYLRTITENEWNHRGWMRGCDLMKEMEFQDNAASWWRRVTTQFPEHPALKQTDHQAPEILRPLNPVG

SEQ ID NO: 2316 - protein, 342 aa, Butyrivibrio sp.
MVTVSLCMIVKDEEDKLATCLDCVKDLVDEMIIVDTGSTDKTVEIAESYGAKVFKFAWTGDFSDARNFSFRQATCEYIYAADADETIDEENRERFKQLKEDIDDLDIDVVQMYYCNQLSHNTVYNYDRELRPKLFRRVRSFVWQDPIHETIQLDPVVCNSEVEIQHNPTEDHGERDLAAFRRAVDMGSYISKRLHNLYARELYMVGTNEDFILAKKFFSDSIIDTGRDLDQIKEASCVLTHIAVIEDDVLGVLKYALKDVTTIASSEMCYELGEFYRKRGDIDEAIVWYFNAAYETSPILDVHHGGDMPMQKLAECYRELGNLEQAEDYEKEAARWEPPKPE

SEQ ID NO: 2317 - protein, 278 aa, Paenibacillus sp.
MAARRASEDAHRISVVIIAQDDETRIASAIVSCKPFADEIVVIDGGSKDGTKTVAEQLGCRVYENAWPGYAKQRMFGSRKASFDWIFVIDTDEVADARLIQSICERKRHLTDDGKAYAVDRIGDFMGRWMGRKEPLVRLYNRKRVQFRDTLVHEIPDVEAAQVVKLQGELLHYGFRSIGDHIRRFNRYTDLEAEGLVAAGKPFRLLRLLFRPPARFLHKYFWQGLYRKGVPGLAVAVFWGLYEFLACLKHYELLRIRTKTKPQEETLKEGKAYAGAIH

SEQ ID NO: 2318 - protein, 294 aa, Paenibacillus sp.
MNETKYKTCKSISVVIIAQDEERRIVAAIRSCLPFADEIIVVDGGSRDATREVASALGCRILLNPWPGYAKQRNFGADAAKYDWVFFLDTDEFVDEALAASLLEWKSAIDDGGHAYAVYRRGNFLGKWLERGETMTRLYNRRVVRIRDTLVHEEPDIPHRGVRTLAGVLWHDGFRSIEDHVIRFNKYTELEARKAFYEKKQTFRLLPLLWRPPARFVQQYVLHGLYRKGLAGLTVAVMWVFYEYLRHIKLYELTRQQESVKLSDQTAKEAEGETTRQRDASVEVDAAAVLGKEW

SEQ ID NO: 2319 - protein, 254 aa, Lysobacter sp.
MPEPLPLSGVVITLNEADRIERCLASMREVCDEVIVLDSGSTDGTIEIARGLGARVEHRDWDGFARQKNAAIERSRNEWVLLLDADEWLESPSLTGLRALFAGDLESADCWLLQRRTHFLGHTMRAGSFAHEPVHRLFRRELRHGDVPVHEYLDVKCWRVRMSDIALEHDTARSEDEYWGKLQRYARLWAEARVSRGRAPSPWRGAAAGAAYTLKNMLLRGGFIDGRAGWRFHRLHARYSMLKYRLLRELVRAG

SEQ ID NO: 2320 - protein, 252 aa, Unknown
  Description of Unknown: Planctomycetes bacterium sequence
MSGCVIAYQEEDRIGDCVRSLAFCDEVVVIDSGSKDRTREIAAELGARVIDNAPFPGHREQKQFAIEQAKYDYVFCLDADERATPALQKQIVALAARTLDAAAYEMPRQNHYLGRIVRRGLFWPDRKIRLFDRRRAKWGGTNPHDHVEVQDESPVVRLAEAIEHLSFRDFAHHVRTARSFSLIAARALAAKGRHCNPFDLLVRPPAVFVKSLLVKRGFLDGWRGFVIAAMAAYTDWLKYWQLFRLPRDGGVS

SEQ ID NO: 2321 - protein, 261 aa, Bosea sp.
MPPLSIFIIALNEADRIGDTIAAVRVLSDDIVLVDSGSTDGTQAIAEKLGARVIFNPWPGYGQQKRFAEEQCRHDWLLNLDADEVVPADLAAEISALFAAGPPPADAYKLRIAEIFPGERAPHRFAYALAPVRLYRRTKGRYSSSPVHDRVDLAPDARIGRLKGTVHHFSVRSLGEQMEKLNSYSDAQADDLDARGATVSVFRLIVEFPANFIKAYIGRRHALRGVYGFMTAMNYAFYRYLRVAKHWERRLQRRDRSRKDS

SEQ ID NO: 2322 - protein, 271 aa, Unknown
  Description of Unknown: Xanthomonadaceae bacterium P sequence
MPPATPRTGGDGAVTPISACIIAFNEADRIGDCIASLAFCDEVVVVDSHSTDATVAISTELGARVIQRPFDGFRSQKQFAIEQAAHDWVLCLDADERIGDALRTAIEAERARGFDGAAGYRFARLSEYFGRFLRHGNAYPDRVLRLFDRRRGGWRGKREVHEAASVDGAVRTLSGDLIHYPYRSLEAQLQKTQRYALMMAEHDFARGKRATLAKLVLSPAWRFWRGYVLRGGFLDGWHGLVYAYVRANYVRQKTIMLWLLQNGRAITTSKS

SEQ ID NO: 2323 - protein, 256 aa, Halomonas ventosae
MTPITGIIITLDEAENIADCIASLRPVCDEIIVVDSGSRDDTVAIAEREGASVIHQPYLGDGPQKAFAVPRARNDWILALDADERLEEDAVAAIRALALEDPDMAYRFKRRNFAGHHWIRAAGFYPDPVTRLYNRTTSGYLPKKAHSSVQAPQVLDTGGHIRHFTYRDLSHWIIRIDQLSSRDAWAMKQRGKGPSRYRPTWHALSALLRKLILKGGLFQGADGMTVAVTTAFHAYMKYAKLNELHERERSDHSESA

SEQ ID NO: 2324 - protein, 275 aa, Lysobacter enzymogenes
MDTPAPNDAARPRLSACIIAFDEADRIVDCLASLAFCDEIVVVDSHSADATVALAQAAGARVLQRRFDGFRSQKQFAVEQAAHDWVLCLDADERVSDELRASILAARDRGFDAAAGYRFARLSDYFGRFLRHGNAYPDRVLRLFDRRRGGWRGQREVHEAASVDGAVATLRGDLIHYPYRSLQQQLAKTERYARMMAEHEHARGKRATLAKLVLAPAWRFWRGYLLRGGFRDGWHGLVYAYVRANYVRQKTIMLWMLGNGQPVVTPERGAGDGTP

SEQ ID NO: 2325 - protein, 503 aa, Desulfosporosinus orientis
MDTKETVCLCMIVKDEEECILSAINSALDLIDELIVIDTGSSDCTPQLALEAGAKLFPFRWAEDFSLARNFALKQASSDWILILDADEVLDTINSKTFCSLLSNREVEGYFIRIKSILDSTMRVSNDEVVRLFRNKQDYRFEGAIHEQIAPSILRTNQGRGLASSPITISHYGYLKEHLDSKDKFLRNTAILKQELRQNPDNPFWHYCLGLEYYQQSFVYEGLNHLNNALKRMTGQEGYFEDVLLNTALGYLHLGENRTIISFITKALSMYPNQGDFYYLLGLAHLQESHYSQGVMNLEKSLSVGSMTLATHGQINCLLGDTHQSSGDFPRAHDFYQRALASAPASIYPLRQFVSLIQKGYPIETFLKQILMLESWPSEALWRELLTKHRNSDLKFCLLFLLLTLYRTINATTLCRKELLNILLQLPDSSKKTLHQFHSDSEVKLGGIYLMLALKEIQFRMILLVNDLDNDYFKGIESLSSLTQIGIHVLSYLSDTSLDSIIP

SEQ ID NO: 2326 - protein, 244 aa, Unknown
  Description of Unknown: Acidobacteria bacterium sequence
MPGITATIITFNEEDRIAEAMASLACCDEIIVVDSGSTDRTLEIAAAQGARVITHAWEGYSNQKNFAAGQSRHDWILSLDADERLSMELADEIVQWKKEQNTFAAFSMPRRAFYLGRWINHSGWYPDRKLRLYDRRRCLWKGDFVHERVEVDGSVGRLGGDLLHFPYRSWDDHLARVEKYTELAAEAARLNGRRGSVLKMLVAPPVAFIKGFIVHAGFFDGWRGLAIAYMAARYVFMREFRILR

SEQ ID NO: 2327 - protein, 683 aa, Wenzhouxiangella marina
MNLTEARSGSPPAWLQAGAAVVVFLALALGLVVPKLAGAGFLLLGLTAIVWLSIAKQWRPGDLVPIERLLCMAIVLFVVAWLLGWGINGLDPAGLEAVTRIARLLLIIPILLFIRQLDTIESAWWRGLTLGAIIAGAYAWWSFLSGQVGPFGERVVGTTNPLYFGGLSLAFALMLLPRLRDVSLPVSVRLLAVLALLLAISASALSGSRGAWVVLPLLLLIYLFTLGRSQPPVWRFGVPLAFMAIATAFLFSPASPMSERAMSGLDDLSALVRGEQAEGTIGRRMALWELAGEVIAEHPLSGSGPGAYPRRVTEAIAEGRIPEDFEDYEHPHNEYLSAWIQAGPLGLFALVLMFGIALRRHGRVWQTGLKRTRYLGWSGLAGLSTIAIMALSESLFERNIGIVWYGLIVALSAGLVHARRRVELSAPDSRRRHTISVIVICKDQAGEIDRCLGSVAGWADEIIVLDSGSSDDTVERCRRYTDQVHETDWPGFGLQKQRALDLARCDWVLSMDADEALSETLRREIDRVLAEDAPDHEGYRLCWVTHAFGQRLSFGHWARAPLRLFRRELGHFTPVAVHEKVVLEPGARIGFLEAPLDHYVYRDLAHARQKLSRYASLQARERYERGKRVRLAMTPLLRAGFNLLDNLILRTAFLDGRGGWTMSWLYTRYTYEKYRQLLELSRG

SEQ ID NO: 2328 - protein, 367 aa, Roseateles terrae
MSTRWRTCLVVIARNEAAHIGRLLDSVRPWLDDMLVLDTGSTDDTAVRAAQAGARVAHAPWPDDFAQARNTALDLANADWHLVLDADEWLISGGEALEALRQTAPDFVGTVALEDHFDDGVAHTRLSRLLPGDVRYAGRIHEQPVHQRPVYAVPLHIGHDGYLSARLRDKAGRNRRLLEAAIADQPASAYLWYQLGKDCSVYNNYAEAEDAFANCAGLLPSDAWPMCNAEDGAAGAHPAPATAPAWWPDLVARRLFGLKRLGRHADGVVFADGQLAICESSPDVFFALGDLLLDWAAEDPGQADVLLPMMEDAWRRCLLLGEQPDQPGAVAGRGSYLAAHNLALVLEGTGRAEEAQALREQFPAPRS

SEQ ID NO: 2329 - protein, 254 aa, Unknown
  Description of Unknown: Acidobacteria bacterium sequence
MVPLSAVLITQDEARHLPGALDSVRFCDEIVVVDCGSRDESRAIAEAAGARVVVHEPWPGFVAQRNFAAEAARHDWVLAVDADERVSPPLRAEIEARRAAGFDHDGYRIPRVARYLGRWIRGTDWYPDPQLRLWDRRKGRWEGALVHESVKVRGRVGRLRNDLLHLTYDDISDHLRTIDSYTTLWARQAYAEGRRTGPLEAVAACGWAFFRNYAIRRGVLLGAAGITVSTLNAYYTYVKLAKLLELQQGVVPPS

SEQ ID NO: 2330 - protein, 270 aa, Unknown
  Description of Unknown: Xanthomonadaceae bacterium sequence
MDNSLSNPGHPRPRLSACIITFNEADRIADCLASVAFCDEVVVVDSGSGDDTTAIAERLGARVLVRSFDGYRSQKAFAAAQASHDWILSLDADERISEDLRVAIERARDAGFAGASGYRFARLSWYFGKFLHHGNAYPDRGLRLFDRRRGGWQGQREVHEAASVDGPVLGLEGDVIHFPYRSLEQQLAKTQKYARMMAEHDHARGKRASLLKLVLSPAWRFWRGYVLRLGFLDGWQGLVYAYVRANYVRQKSIMLLMLERGQPLVDPPRE

SEQ ID NO: 2331 - protein, 266 aa, Hirschia baltica
MNKLPLSVFIIARDEADRILPVIRSVIDWVEEVFVIDSGSTDDTVEVSRNAGADVVFNEWAGYGPQKVFGETLCSQKWLLNIDADEEVSDSLRREITSMFEGGQEPPLAAYQIPILICFPFDKGPRPFAPSNDPIRLYNREKAGFKSELVHDSVVLKPNEVSGKLKHHINHRCFRSHHHAIEKINRYSSMQAEDMIKKGRKPSVLRLLTEPMTAFLKSMFLRRYVLFGVNGFTESVIYAFARFIRLAKAREAWKQHEANQSPRMHD

SEQ ID NO: 2332 - protein, 641 aa, Ferrimicrobium acidiphilum
MPQDRIVIVALLANEDMRRNAKKYLATVTPASFPVILLVEGQELEARDRQRLDNAQHAALLAPAASITKGWLDELLVIAEQHPDSVVVPGSPNVNGPQRLILEEKQSVRYLKDQGPYAVNIRKHFANITQPIHYATDLVACSRGAWVCEALDTGGTSSREAFSALYRDRPLLLAQGAAVFSSEIKSQLIPGAPMASPLVSLCMIVKDEEEVIADALDSARGLADEVIVYDTGSTDDTVAIATRHGARVIQGQWRDDFAWARNQTLQYATGMWILWIDADERVRGDKEALRVRLEDPLAPFESYSIRIENVTGGGLTSFNHYANRVFRRKDCFWRGALHETIWYRDELRTCHAVPAPEMYLEHFGYLDNTMIDKKKADRNIRISEGNQSAASPEEAAMHEARSLMMANRLEEAIALVETQVIDGDSRAMRRLGVLALGSWYRTVGRYDDAEIAIERYEGEGYDPSFAHKERAQLAFEQKDYAKALAYADLVTETVVDYDGLTVSPDGLIGLKARCLVKLDRPDEASRLVIEGLARGVMDIHLNELIELMNQGQVPMSELADALPNDKEQLIIAQVLQIDPSIADDILVELHALRPDDRTLLAAASLVARHLNDERRHYWLGVLAECGLEGSLGSSNADDMSA

SEQ ID NO: 2333 - protein, 286 aa, Unknown
  Description of Unknown: Methylobacterium sp. BK227 sequence
MSRAPAGAAAPRPLPGPDGPLPLSVFIIAHNEVDRIGATLRAVRGLTDDLVVVDSGSTDGTQALAESLGARVLHHPWPGYGPQKRFAEEQCRHVWLLNLDADEVVPPELAREIQGLWAAGEPRRPAWRIGIAEIFPGEGRPHPLAYMLTPVRLYRKDKGRYAASPVHDRVALEPGVKPGRLRGVIHHFSVRSLGDQLDKLNRYSDQQADDLESRGVVIPTWRVFVELPGNFLKAYLGRRHFVRGTYGFLTAMNYAISRHLRVAKHVERRRVAAARQDRVDPPDPTF

SEQ ID NO: 2334 - protein, 255 aa, Fulvimonas soli
MNRVPLSACIITFNEADRIDDCLASLAFCDEVVVVDSGSTDGTRERAAARGARVLERPFDGFRSQKAYAVAQARHDWVLCLDADERVGAELRASIEAARAAGFAGAAGYRFNRLSEYFGAYLRHGNAYPDRVLRLFDRRRGGWRGGREIHEAASVDGPVAWLRGDLEHHPYRSLSEQLAKQERYAQMMAEHLHAQGRRATLGKILLNPWWRFVRGYVLRGGFLDGWRGLVYALVRVEYVRRKFVKLWLLQHGLRP

SEQ ID NO: 2335 - protein, 250 aa, Unknown
  Description of Unknown: Chloroflexi bacterium sequence
MKTSPLLTCAILARNVAEHIGPCIDSCRFADEIIVFDTASSDGTQDRARAAGARVIDTPFVNFSQARNFALEHSTGEWVLFVDADERVTPELAAEVRDVIRRQDVAGWWVPRYNHIVGHVMKGAGWYPDYQLRLLRRGRAHYDPRREVHEVAIVDGAEGHLSHHLIHYNYDSWQQFHEKQRRYTAYEAATLRHQGVTFHPRHLFVRPLQAFWRRFVVWHGYRDGWHGLRLSLIMAWYEGLKYWWFWRGGP

SEQ ID NO: 2336 - protein, 259 aa, Albimonas pacifica
MPPPLSAFLIVKDEAARLPRTLAALEGLADQVVVVDSGSSDETVEIARAAGAEVFHRDWTGYGAQKRFAEDRCRHDWLLNVDADEVVTPELAAEIRATLAADPAPAAYVLRILNVYPGAERPRPLANDYAVVRLYHRSVGRYRDHPLFDRVEVEGPARRLRAPIHHFPFLDWHGLVAKENAYSSFQAEAAKPRKLWKLRLRLMVEGPFVFLKSWLARGHVLGGWNGFVFSVVIAFARFMRVAKMIEREEARRRERAQGG

SEQ ID NO: 2337 - protein, 269 aa, Labrys okinawensis
MSPPASPSGLPGPPPLSVFIIAFNEADRIGATIEAVRGLTDDLVVVDSGSTDGTQTIAEKLGARVIHNSWPGYGPQKRFAETQCRHNWILNIDADEVVSPQLSAEIRALFAGGEPKADGYEINIAEVFPGEREPHPWGYTLAPVRLYRFDRGRYAESTVHDRVHFSGQPRIARLKGRIHHYSIRSLGDEIAKLNAYTEQQAEDLDKRGKTLGSWRILTEFPLNFLKAYIVRRHFVRGLYGIATATNYAYFRFLRLAKHMERRRLRKLRG

SEQ ID NO: 2338 - protein, 244 aa, Unknown
  Description of Unknown: Acidobacteria bacterium sequence
MPGITAAIITFNEEDRIAEVIASLACCDEILVVDSGSTDRTREIAVAEGARVITRAWAGYSKQKNFAAEQARHDWILSIDADERLSVELADEIVRWKKVKQAFAAFSMPRRAFYLGQWIDHSGWYPDRKVRLCDRRRCRWEGDGVHEQMKVNGTVGRFAGDLLHFPYRSWDDHLARIEKYTELAAVAARSSGRRGSVLKMLVAPPAAFIKGFLLNAGFFDGWRGLAIAYMAARYVFLREFRILR

SEQ ID NO: 2339 - protein, 248 aa, Unknown
  Description of Unknown: Bacteroidetes bacterium sequence
MSTALSILYLSFNEEDVFGQSLESVESIADEIVVIDSGSSDSTVQIAERAGAHVYHRPLKNWGEQRNWGLKKCKHPWILVVDCDEVLTTELIESLKEWKQSEHDEQQPYSFKRVHFFKGKRMNFSGLQNDYVVRLLPKGVKYEELNVHEKVRSSSKRLKGNILHYTYKNAAHWEQKFRTYAKRQALDYEKEVGRIGPYYLNVKPSWRFFKHYIIKGGIFDGSRGFEYALWMYRAVKWRYIEVNKLRIK

SEQ ID NO: 2340 - protein, 252 aa, Luteibacter sp.
MPISLCVIAQNEADRIVACLASADFCDDMVVVDGGSLDATVALAEAACARVIHRPFDGFRTQKDFAVAAARNDWVLCLDADEWVDPSLRAAILARFARGTGDTAAFRIVRRNRFLGKVMKHGNAGSDRVVRLFDRRTAGWHGAREIHESVVVKGRTEAIDGWLDHDPYRSLSAMLAKQERYAHLMAEEAFAKRKRTGLAQIVLSPAFRFLKGYVFRGGFLDGWRGLIYALLRVEYVRRKYVKQYLLQKGFKP

SEQ ID NO: 2341 - protein, 261 aa, Methylosarcina lacus
MLTVVILTQNEQANLPGCLAAIPERYPVVIVDSGSTDDTLEIATQRGCRIYSNPWPGFAEQRNFAINRCDIGTPWLLFVDADEIYPQAFYDWFESEMAGSDAVDVLMVPSILYLRGKRLSHAPGYPIYHPRLVRRETTRFVQNHTGHGEAVVNSCRIGYSDIPYDHYFYHGEIIEWMHKHVGKAAQEVQLKPTQDALMTTRGRLSVLLGRSWFRIIARFLYHYVFRGGFMDGAAGLEFALMFTWYEATIYMQAKAGVQTRG

SEQ ID NO: 2342 - protein, 259 aa, Asticcacaulis taihuensis
MDAIEPTPLSCCIIARNEGDRIGDCIRAVQGLVSEVVVIDSGSTDDTVAVAEKLGARVIHHDWPGYGPQKRYSEDCASYDWILNLDADEIVTPALFNEIRALMAAGPKLNAYRFRIRNVYPGKTKPRLWADYHNYVRLYDRRVVRFRESLVHDTVDTKAEPVGQLHGAVMHFSARSYEHIRAKLDSYTNLQAKVLKKPAWAIWLRLPFEYPFVFLRYFIFRAHFTGGWDGLYSSHLAAEARLNRLRKILSAQKAVKDAA

SEQ ID NO: 2343 - protein, 713 aa, Paenibacillus catalpae
MLLGVHIIVRNEEDMLSECLDSIRGIADELIVVDTGSTDGTVDIALRYGARVINAEWKDDFSFVRNLALEHARTVWVLVLDADERLKGDGQALRLELRKAASSAYRLRMEHLLDASNTSCSMSSEAVRLFRADRGYRYHGEIHEQLVRISETVNGTIMMDIDSPLCPGSQHLVHVGYMPDVLQRKSKAERNLRVISRQLTRRPNDPFCLYNHGVTLCQLGKAGEAAEAFGKSLDYTPLSAPYRPTLVRDYATVLLALSRPAEAAELLKGETLRYPDYPDLFMLLGNSFAATGMMLEAKAAYEAAIESGARPHSYISENGAGSYQAELRLAAVLQRIGEAEAVQMRYESLLGRMPGWDDALSAWADYLHQLGIPDQDIRQKLSSYAGEEGAEQHKLLARILSRIGAYSAALPLWREVIQAAANTNAAAPAQLTFSDMRWFADCLIGTGQYMEAASQIRTWLQAVKPYAEAEPRKKTIRLGMAWALCRWNEGQRISREELAVVLGGSSQLARETELFNNWLPMTHETRNKIAKEQELASAVRWLDAAVGHGMLRLAHKLAGGIYGLRPHFETLLYDHGYVEAAAELMLDRFEKDGKLTGEQSFRLGELLYLKKLRSEALSLFESVAGSGNSGAYAERALLGASAACLQLAIEALQPDEYSGSRNWDGSWSEPDRMKLQEALLRVEWMGWQTNWNGRQRRRVNGGAAEADFLMHDR

SEQ ID NO: 2344 - protein, 261 aa, Unknown
  Description of Unknown: bacterium A52C2 sequence
MPASPSADPSPVAGLSVFLIAKNEADRIGAVLAAVRGITDDLVVIDSGSTDDTVAVAERFGARVIHNDWVGFGPQKRFGEEQCRHDWLLNLDADEVPSLELLAEIRALFAPGEPQARFFRFRIKHVYPGDTKPRLWADYHNYVRLYDRRVGRFRDSLVYDEVVTGTQPVGQLHQHALHYSIRSFEHMAEKLRAYSTLTLSEKKKKRRFAAARLPLEFPMQFFKYYVLRRHFSGGSKGFRFSLLYAQAKHNRIKAFLHAPRS

SEQ ID NO: 2345 - protein, 340 aa, Caulobacter mirabilis
MIVRDEARCIARCLESVRPHVDEMIVLDTGSVDDTAAIAASLGARVERFDWIDDFSAARNAALDLSDADWNLILDADDRLVGGAATLADLGRTPFIGELRIENTFEGASGAETAVSWALRLLPRGVRYEGRVHEQPVGGALPHRRLDVSISHDGYEAAQRARKAGRNEALLRAELATAPDDTYLLFQLGRELQAAERWAEAADYLARAYNGSSQTDRFRHALVVRTLFTLKSAGRHDEALAVTEMEFERWPHSPDFFFAVGDLYLDWGLHNPDRAVKEALPLVEYCWLRCLEIGEQPDLEGSVRGRGSWLAANNLAVFYGTLKLTDKAAEYERLAAALKQ

SEQ ID NO: 2346 - protein, 270 aa, Stenotrophomonas koreensis
MSSSTAPIERPRISACIITFNEADRIADCLASLHFCDELIVVDSFSSDDTVAIAQAAGARVLQRAFTGFRNQKDFAVGQARHDWVLCLDADERISPALCQAILAARDAGFAGHAGYRFARLSEYFGKFLRHGNAYPDRVMRLFDRRRGGWRGAREIHEAASVDGAVGTLHGDLIHYPYRSLMQQLAKTQRYAQMMAEHEYARGKRATLAKLVLAPAWRFWRGLLLRGGWRDGWHGLVYAYVRANYVRQKTIMLWMLHNGAAVSDPVKPPR

SEQ ID NO: 2347 - protein, 326 aa, Unknown
  Description of Unknown: Myxococcales bacterium sequence
MGEPPPTISVCMIVKNEEDLLPQALASVKGFADELIVVDTGSTDGTVAIAEAAKAKVYHHPWEHDFARHRNQSLDYAGGDWLFVLDADETLTEQGAAALKQAALDPAIDVISIPVVSPAAGGERESSHNSVRMFRRRTGIRYAGAVHNEVDHRGRATFVPARLIHHGYNLSRARMRAKFERTAGLLRREMERDPADPKWPHYLAVSLHTENFFAEARTEARRSLDLCAGEPAALSRWLPNYYVIASAELALGDLAQAERACREALAVNSDYLDAWAVLTSVAFKRDDLALLDEAAGRFRMLVEAYRQDPRRFGHTPLHTLAQLPQV

SEQ ID NO: 2348 - protein, 338 aa, Unknown
  Description of Unknown: Chitinophagaceae bacterium sequence
MAPLRPRRRLGGRRALHALDGAPAPRPQHSPQLSVVRPKLRRGLQLFIRYWAGGAIRGVRVRVRYLVVVEMADTRNQPGRMMQATFSIVIVCKNEEASIGRTLGSVRGVTDDIVVYDSGSTDGTGAVVEGAGITPRRGPWLGFGATRRAATALAKHDWVLCVDADESLTEDLRNELRHFTPQPGTAYAVRLRNHLGARYIRWGAWGADRRIRLFNRTGCNWSDAPIHEKVTLPPGTEVVHLKGTMHHRTAASIADYRRKLDAYARLTAEHYHREGKEATFVRRHLSPLYTFFKNYVLKLGFLEGRAGWQISVATARYTHKKYAWLWEMSHPEPESSVS

SEQ ID NO: 2349 - protein, 254 aa, Unknown
  Description of Unknown: Alphaproteobacteria bacterium PA1 sequence
MSLPLSIFVIAKNEVDRIGPTLESVTGLSDDIVVIDSGSTDGTQELAERLGARVIFNPWPGYGLQKQFGEDQCRHDWMLNIDADEVVTAELVASIRAAIGVSDVQPCGYETDIIEMFPGEAKPHAWAFRLSPVRLYHKQVGRYSPSPVHDRVDLVKGTPVRRLQGVIEHRSIRSLGHELIKLNAYADMQADDLDKKGRKIGAVRLVLEFPLAFLKAYIARRHFVRGLYGFMTAMNYAFYRYLRLAKYWERRLGR

SEQ ID NO: 2350 - protein, 264 aa, Nitrincola lacisaponensis
MTSTQLPVSVTLITLNEADRIADAILSVRDWVSEVVVIDSGSTDDTVQVAEALGARVLYNPWPGYGQQKRFAEDQATEDWILNIDADERILPELQQELQQLFQQPDRLAEGYHVAIHDRLYLTDRLSSYTPYNPVRLYRKSCGRYSDSPVHDRVIMQDGASTGQLKGRIAHDSLRSFSHRLDKMNAYTDAQARDMLNKGRKPSRIRMVIDFWISFISGYCFRGYWRGGLMGYIYAMNFAYSRFLRQIKLYELHQQAQNERADKS

SEQ ID NO: 2351 - protein, 263 aa, Sulfuritortus calidifontis
MPDKLPISVFIIAKNEADRIPVAIRSVLDWVDEVIVIDSGSEDATVTVSEALGARVVFNAWRGYGPQKVFGEGLCRNRWLLNIDADEEISPELAAEIRELFARGEPACVAYTLPILPLYPFQDRGHPWTAFHHPVRLYRKDKAGFKDALVHDSVVVREGRVGRLEGMVIHRSFRSLAHHVEKVNGYSSAQAEDMVAKGRNPSLLALLLTPAFAFFKQYVLRREFVNGIDGIVVSHMYAFQRFIRLAKARELNRLRRKAGGEDK

SEQ ID NO: 2352 - protein, 341 aa, Butyrivibrio sp.
MVTISLCMIVKNEEDCLKRCLDSLKGIVDEMVVVDTGSTDRTKEIAKECGAKVMDFAWTGDFSDARNFAFSQAACDYIYSADADEELDEENRKRFMQLKSDLSELDIDIVQMYYCNQLEFRTVYNFDRELRPKLFKRVRHFVWEDPIHEQVILDPVICNSEVEIIHRPKENHAGRDLESFRRAIDQGRRLSTRLHGMYARELFMAGTDDDFIKAKKFFTESALDNSRGLDEIKQSSCVLAHVAVLEDDPAALLKYSLKDAITEMSSEMCYELGDYYFGKRDIDEAIVWYYNAAYECSSILDIKKSGSLPRLALARCYRELGNEEQARDYEREASEVEENKD

SEQ ID NO: 2353 - protein, 254 aa, Unknown
  Description of Unknown: Bacteroidetes bacterium sequence
MPKLSAVIITQNEEQNIGRCIDSLKGVADDIVVVDSGSTDNTEAICKEKGARFFYNKWEGYIEQKNFANDLAEHKYILSVDADEALSGQLRDSILEAKESLKADGYEMNRLTNYCGTWIRHGGWYPDRKLRLFHRDKLEWGGEKIHEAMVMKEPNARIDILSGDLLHYSYYNISQHIAQANHFTNMTAELAVEKGKRSGMIKIIFSPAVKFIRDYIFKLGFLDGYYGYIVCRISAQATFMKYSKIRQIRKEQKA

SEQ ID NO: 2354 - protein, 343 aa, Sphingomonas sp.
MPQGGLAAVLIVRDEARCIVRCLDSVRPWVDRIVVLDTGSSDDTPALAAACGALVHHTDWTHDFSAARNRALDLADADWAMILDADEWIESGGEHLRPWCSAPPRLGTVCIHSGYDPVGAVATGAPPASNRSWITRLLPRGVRYRGRVHEQPVSPLPRARIDLHIGHDGYFDTQMAGKIGRNAPLLLRELGERPDDPYLHYQLGTDAESRHDHATACDRYATALALTPPAANWRHELVVRYLHCLGEAGRIDAALTLAEAEMPVWAESPDFFFVLGDLLLERAMADPSRAVGQWLPLAGSAWERCLAIGERPDLEGSVQGRGSHLAAHNLALLRSQLAMLGSA

SEQ ID NO: 2355 - protein, 421 aa, Selenomonas ruminantium
MIKISACVIVKNEEKNMPAWLHCVQNIADECIVVDTGSTDATVRLAKEAGARVYELTWQDDFSYAKNYALDKATGDWIIFLDADEFFPDEEFGLVRELISKYHGRKEVAGIFTQRIEVDVDNDYEALGSSRQIRIFRNSPFIRYVGKIHETLQNTGKRKQTMMYDNTLHIYHTGYSQKLIQSKVDRNLEQLLAERKRRGPEPMDAYYLADCYYAKGMYHEALQYADEAIKSPIEAGGLMNRPYAIREQSLIYLEADEQDIVQAMEQGQEAFPTLAEFALLLAAYYWDKQDYLLAERYNRQGLECYQHNKERNTLDYRITDHAETLLPNAWWRAGELYRWRGQEDKAGTAYRKGLALQPQHEKLRRSLEKLSGAKRALPDCKEAEKMIRRVSILYRWAAAERQGIEAIYPGALAQLLPEVQS

SEQ ID NO: 2356 - protein, 266 aa, Unknown
  Description of Unknown: Methylobacterium aquaticum sequence
MVAPLPLSIFLIARNEADRLGATLAAVRDLTDDLIVVDSGSTDGTQALAASFGARVIERDWPGYGPQKRFAEEQCRHVWMLNLDADEVVPPELATEIRRLFSAGEPPHPAYAIGIAEVFPGEIRPHRLAYTLWPVRLYRRDRGRYSPSPVHDRVDLDPGVTVGRLRAVIHHFSVRSLGDQLDKLNRYSDQQADDLEARGVRIPTWRLFVELPGNFLKAYFGRRHCVRGAYGFLTAMNYAISRHLRVAKHYERRIGGRTGPSGRRDG

SEQ ID NO: 2357 - protein, 260 aa, Unknown
  Description of Unknown: Betaproteobacteria bacterium UKL13-2 sequence
MDEPRPTVAHPARIALSVCIIAKDAASQIGDCIDSVGFADEVLVVDSGSVDATRAIAEVRGCRVIEQAWLGFGKQKQFAVAAARNDWVLCLDIDERVTPALEASIRKVVANGTIHAFKMPRRNRFLGRWLAHGEGYPDWSLRLFHRQYAGWSNDPVHEAVITTESIGHLQGDLLHDSAEDVATYLQKQNRYSTLHAEALYAQGVRAGYAKLVLSPLARFIKFYLLRRGFLDGGPGFAHVTVGCFAAFAKYAKLIELDKKL

SEQ ID NO: 2358 - protein, 245 aa, Unknown
  Description of Unknown: Deltaproteobacteria bacterium sequence
MTRLSATIIAQDEERDVPGCIESLQGFCDEILVVDGGSRDHTRELAARLGARVLERPFDDFARQHEFARTEARGEWVLSIDADERASPELRTAAFGAAAAYALPFKNHFRGVWLRHGGFWPDRHVRLFRRDACRYDPRRTVHEKLIVTGPIARLDAPILHYTYDSLADCLAKMERYGEQAARMLHAQGARAGAWDVAFRPLWRFVRGYLLRLGFLDGAPGAAMAWARAYEAFRRYALLWELSRFS

SEQ ID NO: 2359 - protein, 269 aa, Unknown
  Description of Unknown: Acidobacteriaceae bacterium KBS 89 sequence
MPRSTLSVAIITLNEEDNLARTLNSVRFADEIVVVDSGSTDRTVEIARSLGAKVFSEAWKGFALQKNSAIDKCTGTWVLSLDADEELTDELQAEIGKMLETDAQRSPQVDGYRLRLRHVFLGRWMRYGGYYPDLKLRLFRRVTGSGQAHFTDRPVHESVAVVGRVETMKNDFLHHGYPNLEIYLEHMNRYSTLGARIIADKGKTSPSWPAFCWNVALVPKLTFVWNYVFRLGFLDGREGLLLHLYHSAYISWKYAKAWQIGGVKGREKP

SEQ ID NO: 2360 - protein, 246 aa, Unknown
  Description of Unknown: uncultured bacterium sequence
MISTTIITLNEEDKIGRTIKNLKGLADEIIVVDSGSADKTVAIAESLGAKVFFREFDNFAAQKNWAVSKAKGDWVLAVDADEEIPISLAEEIKEAVKSDRYAGYLISRKNFILGKEIKYSRWSPDTHIWLWKKDSGKWMGDVHEELVVDGKVGLLKGSKIHHSHNTVSSFMKTNNLYSTLEALSLHKQNVRFSFGRMFWAAFFEFFIRFFYKWGFLDGKEGFVLAYIMGIYKLTVWIKLWELEQKR

SEQ ID NO: 2361 - protein, 266 aa, Pseudoxanthomonas sp.
MSLTSPHDPRPRISACIITFNEADRIGECLDSLAFCDECVVVDSHSTDATVAIAQARGARVLLRDFEGYRSQKDFAVRSAAHDWVLCLDADERVDAKLRAAIEAAREGGFAGAAGYRFNRLSDYFGRFLRHGNAYPDRVLRLFDRRRGGWRGQREIHEAASVEGPVRTLAGDLIHYPYRSLEQQLAKTQRYAQMMAEHEFARGKRASLAKLVVSPAWRFWRGYVFRLGFLDGWRGLVYAYVRANYVRQKAIMLWLLQHGQPLVKQK

SEQ ID NO: 2362 - protein, 254 aa, Unknown
  Description of Unknown: Acidobacteria bacterium sequence
MVPISAVLITQDEARHLPAALDSVRFCEEIVVVDCGSRDGTRRIAEAAGARVIVHEPWPGFVAQRNFAAQSARHDWLLAVDADERVSPGLRQEIQGRRAAGFTHAGYRIPRVARYLGRWIRGTDWYPDPQLRLWDRRRGRWEGALIHESVKVSGSVGRLRHELEHLTYEDIADHLRTIDSYTTLWARQAFAEGRRTGPLEAVAACAWAFFRNYVLRRGALLGSAGLTVSTLNATYTYVKLAKLLELQQGVVPGR

SEQ ID NO: 2363 - protein, 249 aa, Unknown
  Description of Unknown: Chitinophagaceae bacterium sequence
MQKISVVIICKNEAAVLGATLKSFSGLTDDIIVYDNGSTDDTKKMAEQYGAILMEGMWEGFGKTKNNAIASAKYDWILCNDADEAFDEVAKEELLNLDLADETIVYEFRFKNFLGNKWIRFGEWGSDKHIRLFNRNKVRWNEAAVHESLIFPNNYKKKLLKGFILHKTSATSFEFETKMRKYAKLSAEKYLRQGEKTSWLKIVLSPTFSFIKNYFFKVGFLDGKEGYQCARINALYTFLKYWELKNLHR

SEQ ID NO: 2364 - protein, 339 aa, Kineosphaera limosa
MNASSLVVIARDEERCLARALESAAPYVDELLVLDTGSTDATVEIALGCGARVEHFPWCDDFAAARNRALELASHPLRLVLDADEWVESGGEALARWGAVNPGRVGWVTRRDLVPDSSRAGVGPSVSVERLVRVLPSDVRYEGSIHEQPVHPDPAVASGLVLGHDGYLPAANTAKRGRNERLLRRALAGGFDPYLSYQLAKELEVQERYHEAVESYLVALERTPHEAAWRHPLVVRTLHLLTRTERFDEGVALFESERTRWSRSPDLFFAAGDLFLQMTATRKRDAGVLIELARTCWAQCLEIGDRPDLVGSVSGRGGALAQYNLDVVSGVTIGRGGVQ

SEQ ID NO: 2365 - protein, 251 aa, Unknown
  Description of Unknown: Planctomycetes bacterium sequence
MPSRSVVPVSVALIVRDEADRIGPALASVAWADEVVVLDSGSTDQTCAIAAASGARVVVEPWRGYGAMKNRAAEVCQHDRILSLDADERVDPDLAASIQALPADAPAAAWRVRRRNHVAGRAIRHWPWAWDRQIRVYDRRRARFVAAAVHESVCADGPVADLPGILDHLTYRDWQDGVDRNRRYAELWASAERAQARPSRWVDRKIRPAVAFWRHLLIRGHLLSGRDGWRWSQLTAEYVRWKYELLAEPQG

SEQ ID NO: 2366 - protein, 309 aa, Unknown
  Description of Unknown: Acidobacteria bacterium sequence
MLHSAFLTPHFAFCILHSAFCIPHSAFRISFRPPPPHPAPSRSLHSAFCILCILHFVKLPFVPKLSVTIITRDEAANIGPALESVAWADEILVVDSGSTDDTVALARRHTERVFVRDWPGFPAQKNWAGEQACHDWILSIDADERVSPALAAEIRALLASEPGPRGFRIPRVSHYLGRWLRSTDWYPDYQLRLYDRRVARWGGTHVHEGVEVPGPVGRLRHELQHLPYRDMSHHLRTIDRYTTLSATQMYEAGRRVSAPALVLRPAAAFVRNYVLRGGWRDGSVGLVVSGLNSYYVFLKFAKLWELGRK

SEQ ID NO: 2367 - protein, 253 aa, Unknown
  Description of Unknown: Chloroflexi bacterium sequence
MLSVVVLTLNEAKHLRACLESVRAFADEMLVFDSGSSDATIPIAREAGARTETRKFDNYAAQRNAALGAARGDWIFFIDADERADAAVGEEIRTETARVDSSGADEVLFWIPRRNFIFGKWIQHTGWSPDYQPRVLKKGRAHFDPLRPVHELVLAQGRELYLTQPLIHYNYETVAQFRSKQERYTRFEAREMFEQGVHPRLRSFVSMPVREFVRRFVTLRGYRDGLHGLLLSALMGYYAFRRQVWLAQMWRNV

SEQ ID NO: 2368 - protein, 255 aa, Halomonas elongata
MTPITGIIITLNEADNVADCIASLQRVCEEVIVVDSGSKDDTVSLAEAAGARVIHQSYLGDGPQKAFAVPQAQHDWILALDADERLDDDAVTAIQGLTLDDPRQAYRFRRRNFAGNHWIRAAGFYPDPVTRLYNRTTSGYLPKKAHSSVQAPSVVDLDVHIRHFTYRDLSHWITRIDQLSSRDAWAMKERGKPPSRYRPVLHALSATLRKLILKGGIFQGPDGFTVAMTTAFHAYMKYAKLNELHENERANSDDA

SEQ ID NO: 2369 - protein, 261 aa, Cohaesibacter gelatinilyticus
MDTQLPVSAFIIAKDEEDRILKAINSVKDWVDEVIVVDSGSTDRTVEIAKGAGAIVFFNEWDGYGNQKRFAEDQCRNDWLLNIDADEAVTPKLAQEMISLFTPAPEDDIYKVYIVDVFPHEKTAKDWAFGYWQYRLYNKGKGRFSESPVHDTVRPKEDVKLAKLSGRVDHYSQRSIQFSVEKLNRYSDMQVADMIKRGRSVSSWRLLTEFPLAFFKSYFARKAFLYGWWGVVVSVNYAFSRFIRIAKFYQHQLIEASKARN

SEQ ID NO: 2370 - protein, 358 aa, Clostridium sp.
MIVRDEEDVLGRCLDSVAGVADEVVVVDTGSKDRTRQIALEKGARVYDFPWCDDFAAARNFALEKGRMEYLFWLDADDVLLPADREALIALKGELDRSVDMVMLRYNTAFDQAGRPTFSFYRERLWRRDRGFRFEGAVHEAVTPRGRVIRREIAVTHQKLHRRDPERNLRIFEKEAAKGPLSPRQQFYFARELCYAGRLEEGERVLTAFLESGQGWVENQVSACRELARCLERQGQPERALRALFWSFAFDRPRAEVCCDIAGRFFDRGLWQRAMYWYRRALEIPFDPASGGFTEPDCYDFLPHIQLCVCYDHLGNWRRAEEENELAARSKPDHPSVQQNRAYFRARRQRETGTGKGG

SEQ ID NO: 2371 - protein, 288 aa, Unknown
  Description of Unknown: Methylobacterium sp. V23 sequence
MDPHSDPHSDPTAPIPLTVLIRTLNEADRIAAAIRSALPLHCEILVIDAGSTDATVSIAEALGARVVVNPWTGFGPQRRFGEALCRHDHVFSVDADEILTPEIVREIRGIFQRPAIPPLMIVRKAMVLPHHARPSPWAFCTENIYLYDRRVARTTDNPNWDKLAITTDAKPVTIRSVVWHHTFRDWNHAIAKSNYVGQLAADTQPIGSRFETGLRLVFEYPLNFLKFYVLRRFFLAGLDGFVMASVLAYGRFIRIAKMHEATRGQPSTGLPFLRRAKRPPADTRAGSG

SEQ ID NO: 2372 - protein, 339 aa, Butyrivibrio sp.
MVTISLCMIVKDEEDCLGRCLDSLKDLVDEMIIVDTGSTDRTKEIAKSYGAKVLDYEWKWDFADARNFAFAQATCDYIYSADADEELDEENQKRFRALKDDLCEFDIDIVQMYYCNQLSFRTVYNYDRELRPKLFKRVRPFIWEDPIHEQVCIDPVICNSEIEIIHRPKENHAGRDLHSFRRAINQGRRISKRLHNLYARELLMGGTPEDFIKSKDFFLRSALDNNRSLDEIKEACCILTHIGVLENDPLLILKYALKDAITEMSSEMCYELGEFYFGQGDVDEAIVWYYNAAYECESILDIKRSGTMPRLALAKCYRALGNEEQALDYEREAAELDEA

SEQ ID NO: 2373 - protein, 252 aa, Unknown
  Description of Unknown: Candidatus Fermentibacter daniensis sequence
MGLSVAIIALDEEDDLPGCLASVGFADEIVLVDSGSRDATASIAERAGARVLERPFDDFSSQKQFACDSTTCDWILVLDADERVSPCFGEAFSEALSSGEAAAYRIERRTSYLGRVLRFGPWSSDRPLRLFRRGSASFGAETVHESLRADCPAPVLRGAWIEHRPYCDVREHMEKMARYASLWAVQERARGRRATVLDILFRPQWRFFRGAVLQLGLLDGMPGLAASVSSAVYAYWKYLALYELSGRGTAPR

SEQ ID NO: 2374 - protein, 260 aa, Asticcacaulis sp.
MNHGTPTPLSCCIIAKNEGDRIGDCIRAVQGLVSEVVVVDSGSTDDTIAVAEGLGARVVHHDWPGYGPQKRYSEDCAANDWILNLDADEIVTPELFSEIKALMASGPSLNAYRFKIKNVYPGQKKPRLWADYHNYVRLYDRRVVRFRESQVHDTVDTRSEPVGQLKGAVMHYSARSYDHIRAKLDSYTNLQAKVLKKPAWTIWLRLPFEYPFVFIRYFFFRCHFTGGWDGIYSSHLAAEARAKRLLKILAAQKNADLTAR

SEQ ID NO: 2375 - protein, 536 aa, Unknown
  Description of Unknown: Chloroflexi bacterium sequence
MPRASSMGEAKRRAAGGSPRAAERLTLCMIVKNEAESIGRCIASVRGVADRVIVVDTGSTDGTPTIAERLGARVIHRNWRDDFSHARNESLNAARTPWVIVLDADEELAPGAAQPLRELVANDPAGPTLVFATVSSVDDAGGTQQTISPRIASNLPGLRYQRPVHEEWLWVGEGQLRQQVLPTIRIHHYGYTAAERTRQGKWDRNLRMLFDELAAKPGDLVTLFYLGQEYAAHGRLSDAIAVYEARLASMCAAFPPLVATHAVYGYVGALISAGLSARARAVSTEWARKVDSPTMWMQAANAALQDGDVEAAESLARTAHQSRGPAFGIDLLPRSQVVAAACVILGDAATARGNAVAGERLYRQALDTQADSTHALVRVAESTARGGDVEGARQILNDALAIRPRDPNMTICASRIDRAAGDLQAALDRLANFVADVPYLTSTRLELAETLIAGGENAIAADVLSAALDTPQLASSSAEFRANYFARYGDALTATGKLVEAVTAYQMAVDARLAAGPIPSSAGDRIGHVALAAATG

SEQ ID NO: 2376 - protein, 229 aa, Clostridium sp.
MIVKNEEEVLGRCLDSVAGFPDEILVTDTGSTDGTKAAAMERGARVFDFPWRDDFAAARNFSFSQGRGTYLFWMDADDVVRPDQRRKLLDLKERLGRADCLPDVVMMKYAAAFRRDGSLAAAFYRERLIRRGTGAVWKGRVHETVKPFGIIWKEDIWIEHRKMRIRDPERNLRILESMRKNGEEFGPREQYYYEMERAFARRCREAALENGQLLTQPRNERFVNGRYLW

SEQ ID NO: 2377 - protein, 301 aa, Frankia sp.
MLTALILTRDEERHIARAIESVKACADKIIVVDSGSTDRTVEIAVENGAEVLRNEWTNYATQFNWALDQLDSSPEWILRLDADEIVSEQLLAEIVATLPELGPEIAGLTVNRRMSFMGRVIRHGGLFPVQVLRIFRRNEGRCEDRWMDEHVIVKGGVRHLKGELLDDNLNSLTWWTNKHNSYASREVIDLLNLQYKFRPHDTVASLSGGEAGLKRWLKENIYTHLPGGARAFIYFVFRYVLRGGFLDGREGLAFHFLQGLWYRFLVDAKLLEVRRLIQREGVTPEDALKRVTGFDVAKRAA

SEQ ID NO: 2378 - protein, 467 aa, Hydrogenibacillus schlegelii
MRPTISLAMIARDEAASIGRAIRSAAPIVDEVVVGDTGSTDGTPAVARAHGARVIAVPWQDDFAAARNAVLEAVRGTWVFVLDADEGVVSVDRPALEAMLERPDVFGGVVEIRHHLGARPGAMLATDAVLRLFRRDPRIRYRGRIHEDVTPSITALPGARIVRAPVVLEHFGYLEPAVAAKRKNERNLALVLRAIADAGDDPRLWYALGTEWFQRGDVVRAAAALERAFRMAPPAAGYGPDLAMKLLFSLRQAGRLEEALRLTGEVLARYPGSPELWALAAELLLSAGRPAAALRAVRAAREAEAAHRSAESVGGWSAGRMVGSGTFVSDVLAGQAWEALGRPSCALRHYLRAVRENPRFLPAWGRFAAFGVRMGRVGPLVRAIRRYRDRWAPEDGIPSAILAACRTAAGTDPAAYAAIRQALGKALGEPAEAPEEPTPKGNRGFAEGKGGATVGEKAIMRAWDEDG

SEQ ID NO: 2379 - protein, 256 aa, Unknown
  Description of Unknown: bacterium HR11 sequence
MDWRDISVVMITLDEAERLPKMLNALPPDVGEIVVVDGGSTDGTPDVARQRGARVWVRPFTSFVEQKNWALARATRPWVLHLDADEVPSQDLLDEIAALDPPPDVHGYWVARRNFFWGKWVRHGGWWPDYKLRLFRRTSGRFVARGRRVHERVEVEGRTAYLRGYLIHETYRDLDDVQRKLRLYTTLSARDLYELGVRSRWWHRWVLPAWAFAYTWLLRGAWRDGRPGLWVAFLQAQTAWWKYWKLWELQRAGGWG

SEQ ID NO: 2380 - protein, 262 aa, Labrenzia sp.
MTDCLPLSVFIIARDEADRISRAIESVTGWADEVIVIDSGSTDNTVAVAESLGARVIHNDWPGYGPQKRFGEDQCRNDWLLNLDADEEVTPELRAEIQAKFADGSYRDADGWRVMIRDLYAHESAPAPWAYGYHQIRLYDRRKGRFSTSSVHDTVRPEEGATIASLKGIMAHRSIRSLDFQVAKYNRYSGMQVEDMRARGRKLPRWRLLSEFPVSFLKAYFVRRYLKYGWWGFILSVNYAHARFLRVAKAYEAELLEKRAGR

SEQ ID NO: 2381 - protein, 253 aa, Unknown
  Description of Unknown: Candidatus Schmidhempelia bombi sequence
MVNKISAVIITLNEEKNIGRCLSSLQGVADEIIVVDSGSTDDTQHIAMQYGAQFIVQPWQGYGKQKNIAAEKAKYEFILSLDADEALSEQLRSTLIAIKNQPMADAYQFNRLTNYCGQWIRHCGWYPDKKIRLWRKGMASWTTPRIHETIKLAGGVNAKPIQGDLLHYTYYTIAEHIAVANKYTTLVAQEYADRGKKPTLIKLFLSPIFGFLRDYFLRLGLLDGYYGFVICLVAAFSTFLKYAKLKQLLQEEK

SEQ ID NO: 2382 - protein, 268 aa, Marinobacter sp.
MKLPLSVYYITQDEELRLPESLAKLSGWVDEIIVVDSGSTDRTREIAEAAGARFVHNDWRGFARQKSFAESLCKHDWVLNLDADEVLSDEAVESLKAVFSSPIAKDVAGFSLIWVTRPPISGHPFRHDKHHRLLRCYHRDRAGFSSEEHSIHDRPEPYEGKVIALRGDVCHMTLLSLQQLEQKYCKMSSDQASHLVAKGRRITNFRLVIEFPLKFLRYYLLHKQILNGWFGFCVSIVSANRNFMRLAKAREIQLMKELKKSQPSRHSR

SEQ ID NO: 2383 - protein, 464 aa, Unknown
  Description of Unknown: bacterium CG17_big_fil_post_rev_8_21_14_2_50_64_8 sequence
MKRKTVSLCIIVRDEEANIGATIKSVLALVDEVIVADTGSRDNTSIIAEGYGARVVDVPWEDDFAAVRNRALATACGDWILVLDADEFLQSIRPVEFQRLLHDPSAAAYRVAVTDEEGRLLNRVPNCVRLFRNHPLLRFTYPLRDDLEAGLAAYCRETGHRVLESELVVVNEGQTPQRTSAARERDQRILRLARDSQPQEPFFAYLSGIQGLSLLDDEVLPTAGIKSSLEDLDQAWRLAVSWRGDVASAPAWLPELGCRLVSGRLAVGHTESARKIADELVSLYPHLPSVLLQSVAADLAHLVEIREARGSLEFRQCVARIDSLLDRISAQRIHAAASAVDNRRQALYPLHYRGRLALLEGMVSEAVTWFERALDLDPSYSFAWLGMAECCEFASDRKRALKLYLRTAAACPDNYRAWLQGSRLMRRMDCPGNAVTWWNRFCRSFPEHPAVKEPACEDADCQTC

SEQ ID NO: 2384 - protein, 344 aa, Butyrivibrio sp.
MVTISLCMIVKNEESCIGKCLDSLKGIVDEMIVVDTGSTDKTVEIAKEKGAKVYHFAWTGDFSEARNYSFSLAKGDYIYAADADEELDEENRERFLKLKEDIGELNVDIVQMFYSNQLAFRTVYNYDKELRPKLFRRVRNFVWVDPVHEQVSLEPVVCDSDIEIIHRPRENHAGRDLASFRKAINDGRKISRRLLGMYARELFMAGTDDDFLQAEDFFKKAALDNGRTIDEVKEACCVLAHVAVLKKDADQLLKFSLKDAITDMSSEMCYELGDFYFNKKDIDEAIVWYYNAAYESKSILDLKKNLELPRLALAKCYRELGNDEQADDYEREANDILNDLSSLS

SEQ ID NO: 2385 - protein, 258 aa, Nitrincola sp.
MEKLPISVIIITLNEADRITAAIRSVIDWVDEVVLIDSGSQDNTVELASELGARVMYNAWPGYGQQKRFAEEQAHNDWLLNLDADERVTESLRSEIAKHFEQPQKLADGYQIAIHDIIYPTEELNPNTPYKPVRLYRKSKGRYSDSPVHDRVIMQPDSQVEKLHGKIAHASIRSFAHRVEKMNAYSDAQVQDMVDKGRKPSVARILLEFWLSFIKRYFFKGYWRKGLIGYIYAINYAYSRFLRQIKLYEYYKNNQKNK

SEQ ID NO: 2386 - protein, 303 aa, Unknown
  Description of Unknown: Candidatus Gottesmanbacteria bacterium GW2011_GWA2_43_14 sequence
MISAVVHTLNEENNITRCLSSLSFADEIIVVDMGSKDGTVARVKETGARVYHHPYTGFVEPARNFALNKARGDWILVADADEEVPRPLSLLLAEIAGKNESAVNFYRIPRKNLVFGKWIKHAGWWPDYQIRFFRKGTISWIDKLHGVPITTGEGRELPQQEESALIHYHYQTVEQFLERMNRYSTIQAKEMYLSNRKFSLDMLMLNPANEFVRRFFLYEGYRDGLHGLSLSLLQALSETVVALKLWELSNFQQEAVNLDSFAKLADKESRLRKYWLYNELLKKKPGILRELIYRFMRKVASYA

SEQ ID NO: 2387 - protein, 272 aa, Stenotrophomonas sp.
MSSTTAPTERPRISACIIAFNEADRIGDCLASLAFCDEIVVVDSHSTDATVAIARAAGATVLQRAFDGFRSQKAFCVEQASHDWVLCLDADERVSDDLRAAILAAQSDGFTGHHGYRFARLSEYFGKFLRHGNAYPDRVLRLFDRRHGGWRGKREIHEAASVDGRVGVLRGDLIHYPYRSLEQQLSKTQRYARMMAEHEFARGKRATLAKLVLAPAWRFWRGLLLRGGFRDGWHGLVYAYVRANYVRQKTIMLWMLQHGQPVSDPPRRSDAA

SEQ ID NO: 2388 - protein, 370 aa, Nocardioides sp.
MANRARPKRRYPISVAMIVRDEEAVIGRCLASLQGLVEEIVVVDTGSTDRTIEIARSYGATIHHFDWIDDFGAARAYSLEQTTHPWRLCIDADEWIADRDAARELLDQVGQATPDFLGLVDVLQADEDGRIDDATLPVEIGRLLPRHVSFTGRVHEQPTPEIPAQRLHLLLGHSGYSAAALEAKEGRNLALLTAAVTADPTNAYLWYQLGSEFSARDRYEEALPHLVEAFNLTHPASPDVPGPEPRPWWHRLTLRLMIALTALGRHDESTAVGEMEAGRWSASADFQVVYGRAIRALAVSLPDEHAGVAEQLVLASLELWRGAVELGDRPEYAGVLAQRATVAAALLVADDYETLGRPEEAQRYRALVPA

SEQ ID NO: 2389 - protein, 264 aa, Unknown
  Description of Unknown: Acidobacteria bacterium sequence
MRPGRYTAAVTPLSAVLITCDEERNLPRALESVKFCDEVVVLDGGSRDRTRDLAAAAGARVETSIPWPGFVQQRNRALAAASHDWVLAIDADERVTAELRDEIRAEAARGFAHAGYRIPRLAFYLGRWIRGTDWWPDPQLRLFDRRRGRWEGNLIHESVRVDGSVGRLRARMEHFSYDDISDHLATIDRYTTLWAEQAAQEGRRSGPLDPAFAASWAFFRNYVVRGGVLLGEAGLTVSALNSYYTYVKLAKLRERLDGAGPPRT

SEQ ID NO: 2390 - protein, 271 aa, Unknown
  Description of Unknown: Gemmatimonadetes bacterium sequence
MRTSRCSPSNVPINIGNMASPAPLTVVIPTLNEASQIGDCVRGLSWTSEVIVVDAGSKDGTVASARAAGARVLDAAEPGIAAQRNAGIAAAKNEWVFALDADERIGPALATELAGVVIAPRHEAYRVKRRNVFHGEVLRRGHWGHDWVLRLFRRERRFGGKAAHPGLQLPATAAPAIGALTNELDHTPYRDLGHHLDKIVLYGRLGAAELAAKGRRASFSDVALRPAFRFWRDYILHGSILDGRLGVIHAGMSAASVFFKYAFLWERQRSG

SEQ ID NO: 2391 - protein, 303 aa, Thioclava atlantica
MLTVVILTRDEERHIARAIGSVTGIAERIFVADSGSTDRTVTIAEALGAEVRFNPWRNYATQFNWALDQLPQDTEWVLRLDADEIVTPELAREIGAQLAGLGADIDGAWVSRRMTFLGRPIRWGGVFPVRVLRLFRHGRGRCEDRWMDEHVLVSGPTADFSGEIVDDNLNSLTWWTAKHNAYASREVVDLLNLRYRFMTHETVADLRGGKQAEVKRWIKEHLYARLPGGSRAFIYFVYRYFIRLGFLDGREGTAFHVMQGFWYRFLVDAKLFEVERHMQRHGSDAPAAIKAVLGIDVTPDRNR

SEQ ID NO: 2392 - protein, 271 aa, Bosea lathyri
MPPISIFIIARDEADRIGRTIMAARGLSDDIIVVDSGSTDGTQAVAEQLGARVVFNAWPGYGPQKRFAEDLCRHDWMLNLDADEVLPSDLAAEIAALFEGNGPGADAYKLRIAEIFPGEQAPHRFAYALAPVRLYRKAKGRYSPSPVHDRVDLDPDARIGRLKGTVHHYSVRSLGEQMEKLNAYSDAQADDLDQRGVTVSAFRLVVEFPANFIKAYFGRRHGLRGVYGFMTAMNYAFYRYLRVAKHWERRLQRRSPPKAALPPANRESRDV

SEQ ID NO: 2393 - protein, 254 aa, Unknown
  Description of Unknown: Deltaproteobacteria bacterium HGW-Deltaproteobacteria-1 sequence
MALEKPKISVAIIAQDEADRIGNLLKSLSFADEIVVVDSGSTDGTQDICREAGARVISNAWPGYVAQKQFALEAANDEWILCLDADEEVPAELATEMCEAVSAAGMDTCGFSMPRLSRYLGRWIRHGGWYPDRKVRLVRRGRGKWQGVNPHDKLVVEGGVKHLTNPMLHYVYRGISDQVVTMNRFSEIYAGQGHPLGGWFVAAGLVHAFGKFLECYLWKLGFLDGVPGLVIAVNSAEYVFLKHAKRWEKSLPRK

SEQ ID NO: 2394 - protein, 264 aa, Marinobacter nitratireducens
MKLPVSVYYITQNEEVRLPESLDKVADWADEIIVVDSGSTDRTREIAEAAGARFVHNDWQGFSVQKAFAASLCRNDWVLDLDADEVLSNELVENIKACFAHPISDDVAGFRMRWVLSQPDPRHPFRHDKSKKILRLYNRTRAAIQPERDSNDDRPRVRDGKVLELKGDVLHRTLISLEQMEKKYCQLSSEQARHLVAKGRRISSARLFVEFPLKFLKYYLIHRQILNGWFGLSVAITAANRNFMRLAKARELQMLEQLEKDARS

SEQ ID NO: 2395 - protein, 265 aa, Bosea sp.
MPPLSIFIIARDEADRIGRTIAAVRSLSDDIVVVDSGSTDGTQAVAAELGARVITNPWPGYGPQKRFAEEQCRHRWLLNLDADEVAPPELVNEIAALFATGEPAEDAYKLRIAEVFPGEGAPHRFAYALTPVRLYRSDKGRYSPSPVHDRVELQPGVRVGRLKGTIHHYSVRSLGEQIAKLNSYSDAQADDLDQRGATLSALRLALEFPGNFLKAYIGRRHALRGVYGFMTAMNYAFYRYLRVAKHWERRLQRRGERHEGGHDGR

SEQ ID NO: 2396 - protein, 278 aa, Marinobacter santoriniensis
MTRKLPLSVYYITLNEEERLPESLASVRGWVDEIIVVDSGSSDCTVDIAEQFGARVVYREWEGFASQKAYAASLCRNDWVLDLDADEVLSDELAANIRSLFSRPVSSDIAGFRMRWVLSQPDPRHPFRHDKTKKILRLYNRKKAVINAVADSNDDRPKVLDGEVRDLKGDVLHRTLISLEQMEKKYCQLSSEQARFLEATGRHISSGRLFVEFPLKFLKYYLLHRQILNGWFGLSVSITAANRNFMRLAKAKERQMLAEFARQDRASEVSVPPDQAAR

SEQ ID NO: 2397 - protein, 739 aa, Lautropia sp.
MLLVNVAHGLLALYLLTLLAVPKVQTPLVALTCLLAIIGGQWLKAPPLGRRLREGWAMAVPLVGYATLFAVQIEMGWLRWRDWDQVLICALGLGVLLSNLPARGPAVHRWLLPAAALGAVGALGLASWQYFQLGIPRPHGHLGAGVVGSGALKYGDLSAVLALFSLQLVLRGPQVWRRVLGGVGFMAGLGAVALTQARGALLGVALALAVLGLLWWLRRRAQSLAGTESGRNGREGRRPWWRQRQAVLAAVLGVVVLAGATDYMGARFADIGPQYERFQAGDNNSEVGQRLALWGIALRAARHAPFTGVGFDGFGAETQRQRDTGELARDALVLYQGPHNEYLAGLSAAGIPGLIVIVLFFWAPLVVGCRRFLRGQQTETALMLVLFTASYAAFTMTDSLLDRQISLLAYVLLASWLMSASGPAAAAADFVGMGRPKGGAGNIAPNVAAVSAGTVTTADGLSVPGGLSVAIIACNEAHRIARCLQSVAFADQVVVLDSGSTDDTVAIARGLGADVEVTPDWPGFGPQKNRALARCRYRWVLSIDADEQVSDALAAEILRVLREAPAEATVAGYWLRRSSRYCGQVIRHGLWGNDRVLRLFERQRGRFTDARVHESLVCDGETRVLEGILVHDSVDSPEDARSKARRYAFLGAEALRARGRGGALQGGVHAGWSFVRGYLLRAGFLDGRFGLTLARLNAAGTFWKYHWAALPEAKWEQLRASLSASEPNASFVPNARSSP

SEQ ID NO: 2398 - protein, 489 aa, Unknown
  Description of Unknown: bacterium DOLZORAL124_64_63 sequence
MVARNWNPTRQPREPALSRPDLSLCMIFRDEETMLPDFIASVEGLWDELIAIDTGSTDRSAELLRTAGAQVRKFTWRDDFAAARNASLEPATGRWILFLDADERPTPELRNQIRALLRDPAAGAATLVMRNEWPDGTVRRSHLLRLFRNDPAIRFRHRIHEDVHDAIHDYLPRHGLTLRHLPGTVHHLGYTREVARNRDKKERDLALLRLSLQEDPRDFYCWFKVMEIARFWGDEPLWEETATQVVELLAGLTAQESTRLRAHRFSGELVALAAARLPGDDTARLAWLEQASTHAGGRTDAHPALEMRRGLLLENLGRLEEAAEAFTRALDQSRARGDQELRPRLALCRLALARGDLPQAVDQIAAAVALNPHDPEARLAALSLGRNLVGNGVVDAAAHILEPLATADPEAAIGYLVCCLCLDKPVDLQVDVTAQQAEILLKTWVRRLWESRQVPRLEAFATASGSIAGLFPWLPSFLAAETARLQTPA

SEQ ID NO: 2399 - protein, 257 aa, Ralstonia sp.
MSASNRATLAVIIVAKNEAADIGDCIRSVRDWADDVIVFDSGSTDGTQDICRELGARVFETDWPGYGEQSNRALREARTDWVLSLDADERISPELRAEMIAVLESGSSHTVYSMPRSSSFCGRFMKHSGWWPDRIRRFFKREQVTFFDAPVHSHLVFQGTVGDFRAPIIHYSIPDLRAALDKANDYSTAGAAAAYAKGKRASLGSAIGHGLWAFIRTYIIQRGFLDGAEGFMLAVSNAEGTYYRYIKLMMLHRHGKR

SEQ ID NO: 2400 - protein, 374 aa, Paenibacillus sp.
MTDNIRLSLCMIVKDEAKRIADCLQSARQLVDEIVVVDTGSTDDTPAICESLGARVLSYPWHDSFCDARNFGLAQAGGEWAMWLDADERLNPAEHTLIRQALDDPIFDVISLSIINYYGDNLEQVNVNHAHIMPQARLFRLGRGIRFAGDIHETVTLPPDYDTSRIKKLDASVHHYGYMEPIIREKAKHERNTSLLLKQVEQPDHNPWFDYHLAAEYYRVSSWQTALDYVNRSILGFLQNGSLPPSLLYKLKYDTLLRCGSIRSAWPGILRAIQLYPDYVDLHFYKGIILMHMDMAAEALAVFEHCLELGEQPTSYLRLKGLGSFYALHYIGRCLERLGRQAEAQLYYAKSGLEPEDIFSVVAAAADMPDSSSD

SEQ ID NO: 2401 - protein, 362 aa, Paenibacillus contaminans
MITISLCMIVKNAEDTIGDCLASVRGLVDEIVVLDTGSTDSTESIVRSYTDRIYRFAWIDDFAAARNESFRYASCSHILWLDADDVLLEEDRGKLLELKQTLSPDVDSVTMIYHYAFDEYGRVTVSLRRNRLIKRENGFRWHGAVHEYLAVSGKIEDSGIVVTHKRRHRQGGRNLAIFERKLENGETLTSRDRFYYANELTDNRHYEKAAAIYRELIEKNDGWSEDLLTSCGRLADICEAEGDDEEALRWALHSFAYDIPRAEFCCRLGYRFLQENRLTQAVYWYKLATELRKPEQSWGFFNDACWTWLPHIQLCICYYRLGDYPEAYRHNEKARAYRPDDPAVLSNKALLEGAFPHVFPPS

SEQ ID NO: 2402 - protein, 277 aa, Unknown
  Description of Unknown: Phyllobacterium endophyticum sequence
MSISVLIMTLNEEDSLPACLASLTWCDDIVVLDSYSTDRTLEIAKAAGARIFQHKYETETKQRMYGLKEIEFKHKWVYMPDADEITPDDLRDEMLAIAADPDRPEAMFSARYKNMFMGRWIKHSSLYPTWITRLCRPERIQYERECHSRPVGDGPTGRLKSHFVHYSFNKGMTAWFDKHNRYSGFEARESLQILRSKKIPWTSFFSATPEARRRALKELSYRVPFRPAARFAYMYFLRGGFLDGWQGYHYCRLIASYEYMIVIKMRELQRRELGLSV

SEQ ID NO: 2403 - protein, 253 aa, Unknown
  Description of Unknown: Xanthomonadaceae bacterium NML93-0831 sequence
MSIPAPAVPLPISGVVITKNEGDRIGRCLDSMRGLCAELIVVDSGSTDDTVAVATAHGARVVHQDWLGYAAQKTFANTLAAHAWLLLLDADEWLSPGTEAKIRVLFAQGRVESADAWLLTRRNWFLGHRLRGGEPMERLVRAGWRYLPSQVHERPDLEGKTIATLDADFEHDTSRSHAEHVAKLSKYAALWAGQRRDAGKRANALDGPLHAAAYLLKQYLLRGAWLDGAPGWRFHRAQAAYVLEKYRRLRAMS

SEQ ID NO: 2404 - protein, 495 aa, Desulfosporosinus sp.
MMTKDTVSLCMIVKDEEDSVLAAIESVRDLIDELIVVDTGSKDKTPLVALEAGAKIFTFNWTMNFSAARNFALQQASSNWVLVLDADEVLEPINSETFMTLLSDNQVEGYYFRIKSVLDSMANESFDQVVRLFRNKQDYQFEGAIHEQIAPSILKANNGCGLASVPFTILHYGYQKDRLEIKEKFNRNSQIILQELKSTPDNPFLLYCLGLEYYQQNSILKGLNYLTESLTLLTGNEGYFEDVLLNIALGYLRLEKTLELNDFTNKVLSMFPNQADFLYLRGLAYLQNENFLHASADFEQSLCLETNTLATLYQVSCLLGDAYQSSGKFPLAQDAYNRALGFKPCSSYPLQQLIGLIRKGYPVTSLLNRSLVFKNWPNFKSWHIGLNSLINIGIEPHLLMLFLTLHRTINTVSYSPDELSPFIKYILKITPGQKSYSSLDTIQNVSSLALRLVLNEILINCMALMKNMEHDNFKLITKMNKTIEQAISILCFRSI

SEQ ID NO: 2405 - protein, 265 aa, Salinarimonas rosea
MPPLPLSIFLIVKDEADRIGATLDAVAGLAAEVVVVDSGSTDGTRAIAEAKGARVVHHDFAGYGPQKRFAEEQCSHPWLLNLDADEVVPAEMVAHIRALFAAGEPDKDAYTTRIAEVFPGEEDVHPLAYALAPVRLYRRDKGRYSASIVHDRVDLAPGARVGALHGTIRHRSVRSLGDQIAKLNAYSDRQADDLEARGATIPTWRVFVEFPAAFLKAYVVRRHAVRGVYGFLTAMNYAIARHLRIAKHIERRRLAGRRDEARPDG

SEQ ID NO: 2406 - protein, 251 aa, Unknown
  Description of Unknown: alpha proteobacterium MED-G09 sequence
MNEKLPISCFIIALNEADRIDKTIKSVKDLVDEVIVIDSGSNDGTQKLAEDLGCKVFYNEWNGFGPQKRFGEECSKNKWLLNLDADEYLSHEISNEIRDLFRANLEANFFSMRVIPIYPNWTKPRFLSAYHLCVRLYNIDYGRFSNSKVHDSVETNSQKVITLINPVFHKSVRSFKHLIIKENNYIKMQASTLKKSNKFILFFRLLVEFPLAFIKYYLIRRHFTGYFTGFFTAVILAFFRWKRIILFLKTK

SEQ ID NO: 2407 - protein, 272 aa, Unknown
  Description of Unknown: Flavobacteriales bacterium sequence
MEPNAGISVVIIAYNEANKIGDCIDSVIGIANEILVVDSFSTDDTPIIARGKGARVIQHAFEGHIQQKNWAKDQASFDWVLSLDADEYLSAELQERLTLAIANGLTFGKVKGYAFSRLNHLANQPIRGCGWYPDTKLRLWDRRCGCWSGRNPHDKFVLEKGYALGSISGDILHFTYADLTAVKQQALKFGKIGGQALKHEFTNHPGYFIQRRGLDFYLLFKLLTAGFARFIRNYLLKGGWKFGYNGLLICFWQSVEVSYKYGFALFGKVSNK

SEQ ID NO: 2408 - protein, 271 aa, Luteimonas mephitis
MNASSRPRPAISACIIAFNEADRIGDCLASLSFCDEIVVVDSFSTDGTADIARAAGARVLQRRFDGFRSQKAFAVEQARHDWVLCVDADERVGDTLRGSIEAARRAGFDDAAGYRFARLDHYFGRFLRHGNAYPDRVLRLFDRRRGGWRGSREVHEAASVDGPVRTLAGDLVHFPYRSFEQQLAKTQRYARMMAEHDFARGKRASLGKLVVSPAWRFWRGYLLRGGFRDGWHGLVYAYVRANYVRQKTIMLWLLQNGQPLATPAPPAASND

SEQ ID NO: 2409 - protein, 257 aa, Paenibacillus sp.
MARQLRLLVGTRISKPKQVPMPYRHLFFIRSQGESTLSQPISACIMTKNEQDNIGACIDSVKPYVKEIIIVDTGSEDDTVKIAISKNVRVHQMEWKNDFSIVRNEMIKIATQPIILMIDADERVLPNQEESFRDTCNLLFDDHDKIGRVTILNEQENKETLKSSISRIFKNSSSFSYAGAIHEQIQSESSNTTYFQSGITLEHKGYLNSSLIAKDKYERNLSLLFNELKNARNGSYINFQIGRTYYVMGENKKLLII

SEQ ID NO: 2410 - protein, 296 aa, Yoonia tamlensis
MTALTVIILAKDESLHIARAIGSVAAIASRIIVVDSGSTDDTVHLAQQAGAEVLHHPWINHATQFNWALAQIAGAPGWVLRLDADEFVTPQLAEQISAGLPDVAGIYVNRHVHFMGQPVRWGGVFPVRVLRLSRNGAGRCENRWMDEHIIVDGPTAMLAGAIVDDNRRSLDWWVAKHNQYASREAIDILNQIYQFAPRETIGQLRGGQQAAIKRWIKENIYARLPGGARAGAYFFYRYVLCLGFLDGRQGRAFHVLQGFWYRYLVDAKLAEVRRHMAAHDCTPQDAILSVLGIDLG

SEQ ID NO: 2411 - protein, 270 aa, Thiomonas sp.
MSTNTATAVSAILITRNEAHNLPACLAGLAWCDEIVVLDSGSTDETVEIARRAGARVQTSSDWPGFGPQKNRVLELARCDWVLSVDADERVTPELAAEIRATIAGADPCNAYAIARLSSYCGQFMRHGGWYPDRVVRLFKRGTARFSDDIVHESVQTHGRVGRLREDLLHISYRSFEDVLDKMNHYSTAGASKAAARGRSSNLLSAWLHSRWAFIRAYILRLGFLDGRLGYVLACSIAHETWYRYVKLWHRPHENLLKDTLDAAPRTERR

SEQ ID NO: 2412 - protein, 251 aa, Kangiella spongicola
MSKIPVSVFIVAQDEEQHIGRVLDSCQAFDEIIVVDSGSTDQTKSIAQSKGAKVIHHDWPGYAKQKQYAKDLCQHEWVLNLDADEELTPQFIDEVKQFVSAEHDYVALKCRRNDLFIGKFFSTLTRLPTNTRFFKKDKVAYRVEDLVHEGPDIHGKTKQTSVAFNHYGYADIAQLTDKYNKYSSLKAKEKYLKGKKASALKLLLIYPLEFIRNYLVYRYCFSGLRGFIFSHLAAYYALSKEAKLYEFNKSS

SEQ ID NO: 2413 - protein, 510 aa, Kineococcus xinjiangensis
MHGDEVFISGSYIVKDEEELLGGSLDALRPFVDELVVYDTGSTDATRDVARAHGARVVEGYWDDDFGAARNRALEHCAGEWVVIVDADEVARGNPRALRRRLRLTPADALSVMQVSHTWQGAGVGLSVWSVRVFRRARCRWEGAIHERVVGRWGELSGEQTTDLELDHSGYTPVRTRERNKGGRNLRVAERELADALARGASDTWRFLINVARSGQLEGDPSRSLEALALVDRAAVAPQQGILAGHTALGIAVANADMALGLDWLASMAQWGESPDVLRAMEGQLAMATGDLQRAEALLRPYVESGDQGGVVLTDLSFTDSLIDCLWLQDRHEESVELLLDHLATGKSHIAAAVVLARVHESRTDSRRLVDALPESLVLPYVGQLQATGFAYGEPFFEAMWDAGRARTAVLVAISGLGGSLPFEKALLWSLRMREAGLGEHCPLWRILRSTERDDRTRIMCGAALVEIGEEAALPLLEPLLARVDDDAAGALVEELRQFAPGFTAALIAG

SEQ ID NO: 2414 - protein, 250 aa, Paraburkholderia sacchari
MVVAMNEAHDIRDCLESVRGLAMETIVFDSGSTDGTPDICRELGARVFETDWPGDGPQKNRALAEARGDWVICLDADERLSPELRTEIATLLAQGSTHAAFSTPRRSSFCGRFMKHSGWWPDRIVRLFRRGSARFTDVRTHTHLEIDGTTGRFDGPFIHISMPDLHEALDKTNVYSTEGALTMAEAGKRSSLAKALGKGFWAFFRTWVLRAGFLDGAEGLMLAINNAETTYYRYVKLALLTRDGKVAKKR

SEQ ID NO: 2415 - protein, 261 aa, Labrenzia sp.
MTNRLPLSAFIIARNEADRISRPIRSVIDWVDEVIVIDSGSTDDTIAVAEKLGARIVHKDWQGYGPQKRCGEDQCRNDWLLNLDADEEVTEDLATEIRAKFSDNSYRDADGWRIMIRDMYAHETEPAPWAYGYNQIRLYDRRKGRFSDSSVHDTVRPVDGATIANLSGIMAHRSIRSLDFQVGKYNRYSGMQVEDMRTRGRKLPRSRLLTEFPVSFFKAYFVRKYRKYGWWGFILSMNYAHARFLRIAKAYEAELLAGKQR

SEQ ID NO: 2416 - protein, 274 aa, Unknown
  Description of Unknown: Planctomycetes bacterium sequence
MNSVSTTNTGELSLERLPAPPLPITALIITLNGATHLGRVLSSVAFCHERLVIDSGSTDNTICLAEAAGARVLHQPFLGYGPQKQAGVELAIHDWILSLDDDEVLDAEAIAAIKRLDFSDPSACWSLRRRTFIGNHEIFYGPWRNDRVVRLFNRHTAAFKPLWVHEEVAYQTPPKRLPGSIQHFSYDHLSDVIARSVSYAPLKAEIMQEKGERVHFWKLPVRGLATFVRCYFLQGGWRDGARGFVIALSRVIDSTLPRAILLEAEGVKAKRRTP

SEQ ID NO: 2417 - protein, 268 aa, Unknown
  Description of Unknown: uncultured Pleomorphomonas sp. sequence
MVLPIEGISMSPLPLSVFVICKDEADRLELVLEALAGLTDDLVIVDSGSTDGTLDIARRYTTRVHHRDWTGFGEQKVYAEGLCKYDWVLNLDADEVLLDEVKASIRAVFALPEEARAAAYSLRIRHVSRLAPSLRPGFFNPTNVTPRLYDRRRAGFKSSAVHDKVEIRDGGKPVTLKGDVAHISMKSFAHMWDKIRSYSELSARDWAEKGRNPSVARLIADPVWFFVKNYFIRRLFAVGAEGFVIAISLSAGRALRIAMTWEERRKGA

SEQ ID NO: 2418 - protein, 267 aa, Chelatococcus asaccharovorans
MSTTRRTLPLSVFIIARNEGDRIAATLRALRDLTDDLIVVDSGSTDDTVAVAERLGARVIHNDWPGYGPQKRFAEEQCRHPWLLNVDADEVVPADLAAEIAALFARGEPDADAFRIRIAEIFPGEGKPHPLAYALSPVRLYRSDKGRYSPSPVHDRVQLVAGARVKRLKGTIHHFSVRSLGDQLAKLNSYTDALADDLDARGEKVSTLRLFVEFPAAFLKAYIGRRHAIRGLYGFMTAMNFAFYRYLRIAKHVERRLVSRARDEGRL

SEQ ID NO: 2419 - protein, 714 aa, Paenibacillus sp.
MLLGVHIIVRNEEDMLPECLDSIRGIADELIVVDTGSTDGTVDIALRYGARVIKAEWKDNFSSARNLALEHARTIWVLVLDADERLKGDSQSLRQGLRKAASPAYRLRMEHLLDGSNTGRSMTSEAVRLFRADRGYVYHGEIHEQLVRVRETEDGAVLKDVDGPLCAGDSHIAHIGYMPDVLQRKSKAERNLRVISRQLTKRPNDPFCLYNYGVTLCQLGKAEEAAVAFDKALGYTPLSAPYRPTLVRDYATTLLALSRNGEAAELLRGETLRYPDYPDLYLLQGNSLSAAGMLLEAKAAYEAAIEAGSRPHSYISENGAGSYQAQLRLASVLQRTGEAEAALLAYEALLGAKPGWEEALLALADYLQQLGVPDQEIRQKLSSFTGNDVADPHKLMARVLSRIGANSMALPLWREVVQSTSVSTAGAPMPEQLPWCDIRGFADCLIGTGQYAEAASQIRSWLQAAQPSADAEPSYEILQLGMDWALCRWNDGLQISREELAAVLGGGRLAHEAEHLNGWLPAAQGPQNKIAKEQELAAAARWLDTAVSRGMLRLAHRLAGGFYGLRPYFETLLYDHGYVDAAAEQMLDRFEKEGRLTGEQSFRLGELLYLKKLHNEALSLFDSSAESDKSGVYAERARLGAAAACLQLAIEALQPDEYSGTRNWDGSWSEPDRMKLQEALLRVEWMSWQTSWNGRQRRRVNGGTAEADFLMYDR

SEQ ID NO: 2420 - protein, 272 aa, Unknown
  Description of Unknown: Gemmatimonadales bacterium sequence
MQTALLDTGVGARPSEGHRISACLIVMNEADRIGDCLASLDFCDEIVVVDSHSTDATRELAAAAGARVIERDWAGHRAQKQFAVEQATHNWILALDADERLSAELRKEIMDLRETNFMGADGWSMPRLSHHLGRWIRHGSWYPNRQLRLFDRRHGQWGGRDPHDRWETQGSVGRLHGDLLHFPYRSFDEHLQTLAGYASISAARMHEEGLRANVFDLVFRPPLRFLRGFIFKRGFLLGWRGLILALLDAQSAWLKYTRLMLLARDQDQDSQL

SEQ ID NO: 2421 - protein, 783 aa, Unknown
  Description of Unknown: Clostridia bacterium 62_21 sequence
MKAGTISLCLIARNEGENIGRCIESAGDFVDEIVVVDTGSADDTVEIARALGARVIEAEWKGDFGAARNVSLDHAGGEWIFFLDCDEELAPESGPELRRVIQNTRYEAFFVLVTNPTETGIELTFPSIRLFRNRKCFRFTGRIHEQIVNSIVQHCGQHCIGETRITVIHRGYDTRFANIRAKILRNLAILNTYRDDEKDGFFYYNLGTEYLRLGERKKALEHFVIALGLTKPTQTYGPILVKRAMTTLMELHRYRDAVRQLRYYQGIYTEFSDLVLLEAVCHLNCGRYSAARSRLEDYLAMPPPPMWYPTEKVWHGSSAQEFLDRVRGLSIGEGRPSLSVCIIGRDEAGLVGRSIQSVNEIAREVIFVDTGSTDGSAAVAYQMGASVYHCPWDDDFAAARNFAIGKAGSEWILVLDADEVLPDESRKGIIDLLRNPRHEGYVLKICTFLDRRLSPANCQVKGACRLFRNKRYRYRGAVFEDVTRSIVTSGGALTPVDIAIHHLHCLAEDETIARKRKWKAAAIARGLAGRPRKLAYARGVEAFYARDFALAADQFARAGNIGGAHRSDFYYFYALSLVNLKQYFLAVGLLDEGVRLFPDYTDLFYLKAIGHFMQGETDRAEALLCRCLAMGDAPWEKYVASPGAGSFLALCTLGTIYAQKGDINNALAMFVRAAGMPGAYEEALERITFVCRRLSVPPEHFLEKHGMRNSRSLSTASRALTKMGRFGESLRYLDLAGRLVAQEPPPRDFGHILQALDFLLAGFSRHIARGLPENSPLRSQLVI

SEQ ID NO: 2422 - protein, 258 aa, Unknown
  Description of Unknown: alpha proteobacterium AAP38 sequence
MSGKLPLSVFIIALNEADRIGPVILSVRDWVDEVLVVDSGSSDGTPELARSLGARVIHHDWPGYGPQKRFAEEQCRHDWLLNLDADEVPEPALEPAVRALFAAGQPVLQGYRIRTVMTLAGQKRPHRFAPRHNYVRLYDRRHGRFADSATHDAVEMHSGRVGALSPIIAHYSIRHHGDLIAKLNRYSTAQAEEIVARGKGRRYGAFRAMTEFPVNLVRYFFLKGYWVFGLYGLELAAIIAFFRFARIAKVREILRRPS

SEQ ID NO: 2423 - protein, 252 aa, Unknown
  Description of Unknown: Bacteroidetes bacterium sequence
MKIKISAVIITFNEERNIGRCLDSLQGVADEIIVVDSFSSDATEEIVKSKGATFISHKFEGHIEQKNWAIRQAQYPHVLSLDADEALDEHLRKAINTVKENWQGEGYYLNRLTNYCGKWIRHGLWYPDRKLRLWDSRKGAWGGQNPHDTYILEEGSRSQHLSGHLLHYSFYTFEEHLKQIKKFTDISSAAAFKNGKRSSWLKIVVSPSLKFVRAYIFKLGFLDGKAGWTIARWSAYATYLKYTKLKALNHGQ

SEQ ID NO: 2424 - protein, 271 aa, Marinobacter pelagius
MKLPLSVYYITQNEEKRLPESLEQVHDWADEVIVVDSGSTDNTVAIARSFGARVVHRPWEGFASQKAYAASLCRNEWVLDLDADEVLSGQLVANIKALFSAPLPEGVAGYRMRWVLSQPIPGHPFRHDKTKKILRLYNRSRAAIHAEKDSNDDRPRVLSGKVLDLKGDVLHRTLMSLEQMERKYCQLSSEQARYMAARGRKISSGRLFVEFPLKFLKYYLIHRQILNGWFGLSVSITAANRNFMRLAKAKEIQMLAELEASGKSDAQSSGA

SEQ ID NO: 2425 - protein, 278 aa, Unknown
  Description of Unknown: Candidatus Fermentibacteria bacterium sequence
MLPDLLRTYGFFSWQLFQVAQRTLLCYFASMKLSLAVIALNEEDRLASCLDSVPFASEKVVVDSGSTDSTASVAEKCGARVLKRKFTTFSEQKQFALDNCTGDWVLVLDADEALSSELALEIQKLVKKNSQIAYRLHRRVRYMGRLLKYGPWKGESVLRLFPGGSSEYDSSSVHERLVPSVPVVLVRNGWIEHRTYRSLSEQFETTGRYASLWAEQKSAAGVRSSILKIALRAKWRFFSAYFLQLGFLEGYSGFMASVMAAVSVFIKWSILREKQCGR

SEQ ID NO: 2426 - protein, 252 aa, Luteibacter yeojuensis
MAREPLSVVVTTFNNADTIGACLASVAFADEVVVLDSGSTDATRAIAEAASARVHVQPFAGYSAQKQAAIDLATHRWVLLLDSDETLPADAAARVRDALVEPTVAGYEMLRREWVFWRWQPARARLNHYVRLFDRGRARMSGHEVHESVVVDGPVRRLAAVIDHHGERDIEGRVDKANHYSTLQVRDRHTREPGALRLRMVAYPTVAFFRYYFLRGHWRGGWAGFIAARVHAFYAFLKYAKLYERRVSRRRG

SEQ ID NO: 2427 - protein, 279 aa, Unknown
  Description of Unknown: Methylosinus sequence
MSFLDHVAVLVLTLDEAPNIGRALEALRDFPEIVVLDSGSRDDTLRIVAAFPNARIAQRSFDTHANQWNYGLFRCGIERPFVLALDADHIVPPALVEEIAHLSPSSATCGFRARFRYCVFGEGLSGALYPPSIVLFRRERCHYIQSGHTQRLVIDGAVVELVGVIDHDDRKPLARWFGSQQKYAALEARHLLGTPRDRLRLSDRIRRLGWLSPWLIGLYTLVVKRCALDGWRGWFYVLQRVLAETLIALEIIDRRRRVEATVIGQERRGVGAASAKKGR

SEQ ID NO: 2428 - protein, 249 aa, Herpetosiphon geysericola
MLLSVAIIARDEERHIGAALASIANVADEIVVLLDPRTSDRTAELCTQAGARVIAAPFESFPAQRNRALAECKGQWVLFLDADERVTPSLQHEIRQLLPSQPSHAGYWIPRFNRYWGRALRGGGWYPDRQLRLLQRAKAQYDPSRLVHELVILAGSEGQLSQHLEHINIESWAELREKQQRYAQAEAATLYRNGVRVKPQNYVLQPLRAIWRRYVTWGGYRDGFLGMLLALVMGWYEFKMYLALAKHWG

SEQ ID NO: 2429 - protein, 262 aa, Marinobacter pelagius
MKLPISVYYITLNEEQRLPESLERVRGWVDEIVVVDSGSTDRTKEIAEAAGALVVHRDWEGFALQKSFAESLCRNEWVLNLDADEVLSHKLVESIKARFSTPVPSDIAGFSFRWVIRPPMPGHPFRHDKTHVLLRLYNKKRASFVSERHSIHDRPEPHTGRVEKLKGDVYHMTLISLEQLEKKYCKMSSDQALHLVARGRRISSVRLFSEFPLKFLRYYFLHRQVLNGWFGLSVAITAANRNFMRLAKAKEMQMLRDLGTGE

SEQ ID NO: 2430 - protein, 305 aa, Streptomyces sp.
MHPLPIVVVIPTKNEAENITSTVRSVAGHFRAVVVVDSDSTDDTRALAAKAGAEVVPYSWDGGYPKKKQWCLEHVHTGTDWLLFLDGDETPSAQLLAELRRIFAVPAGRTLRPAAFDIPLGYWFAGRRLRHGYTIVKRALLDRTRCRFPEPDDLAAPGMGEQEGHYQPLADPVHTLKGTIEHQDLDPVRTWFDRHNRYSDWEAWLAGHPLVREQIRQAKTRQGQLFHRAPFKPLVSFGYAYLYKRGFLDGRAGLDYALAMSFYRWQIGLKAREYGQRPDLATGPGPGSDPGAAVSAAPAAGRAPR

SEQ ID NO: 2431 - protein, 256 aa, Asticcacaulis sp.
MTNHTSLSICIICKNEADRIVACLNAVAGLSDDVVVVDSGSTDDTVQKAEAWGGRVFFNPWSGYGPQKRFSEDQARYDWILNLDADEVITPSLRDEIRALMQSDPALPAYRVKIMTIYPGKERPRLWADFNNYVRLYDRRRVRFANSPVHDTVDTGPYPVGQLTGQVLHFSARSYEHIRQKLAAYTDLQSRTLHKRRWVIAVRLPFEYMFVFLRYYLARRHFTGGWDGIVSSHLAAESRFSRLIKMWRVGGASQLS

SEQ ID NO: 2432 - protein, 264 aa, Luteibacter sp.
MRAEPLSVVVTTFDNADTIGACLASVAFADDIVVLDSGSTDATREIARRHGARVEVQPFAGYSAQKQAAIDLAAHRWVLLLDSDESLPADAAPRLRAALAAPRAAGFVLLRREWVFWRWQADRARMNHYVRLFDRTRARMSGHEVHESVVVDGPVERLDVVIDHYGERDIEGRVDKANRYSSLQVRDRDARKPRLLRTRMVFYPAVAFARYYFWRGHWRAGWAGFVAARVHAFYAFLKYAKLYESQRSGGEGERRPPDAERGDD

SEQ ID NO: 2433 - protein, 340 aa, Butyrivibrio sp.
MITISLCMIVKNEEESLGRCLESLKGIVDEMIVVDTGSEDRTVEIAKEYGAKVYDFKWTGDFSEARNYSFSLATCDYIYSADADEELDEDNRQRFIQLKKDIEELDIDIVQMYYCNQLSFRTVYNYDRELRPKLFKRVRSFKWEDPIHEQVAIDPVICNSEVEIIHRPKENHASRDLSSFRKAVESGRRISKRLHGMYARELFMAGTDDDFIKAKDFFAEAVKDSTRSVDEVKEASCVLAHIAVLEKDAEALLKYSLKDAATEMCSEMCCELGEYYFGKDDYDEAIVWFYNAAYECASILDIKTSKEIPRLALAKCYKALGNEEQAADYEKEAAEIEKGE

SEQ ID NO: 2434 - protein, 334 aa, Unknown
  Description of Unknown: Rhodomicrobium sequence
MALPPGRGASAISWPSRVSGEGRVCRAEKTPIPHRKPDFSCQTRHSEGKRKGVAQHFAGRVMSKHDLAPARAEERPAGAGRDAATPISCYIRTLNEERRIGEVIRAALQVADEVVLIDSGSKDATLAIAAAEGARVVHQPWLGNGRQKRAGEDAARHDWVLDLDADEVVSPELAAEIRALFAAGPRHRMYELTLITVPPFGEPWWNFKHAERIKLYDKRHIRIPDHAAYDQFEIPPGERPGKLRGPLMHYAFTGIEHVMTKLNRASSVRARELKLKPLWLVVLRILFGFPTYFFKAYIVNGLIRGGVYGFAYACALAFGRWLRDVKMYERHMRR

SEQ ID NO: 2435 - protein, 259 aa, Nesiotobacter exalbescens
MCTQQKIPVSVFIIAKDEEDRICDAIDSVKEWVEEVIVIDSGSSDQTVKVAEEAGAQVVFNEWPGYGLQKRFGEDCCKNKWLLNIDADERISATLANEIQDVFRRGPDADIYKVHIVDVFPHEKTAKAWAYGYWQYRLYNREHGRFSDSSVHDTVRPEKSATIRKLKGKVDHRSQRSIAFTVDKLNRYSDMQVEDMQRRGRSMSRIRLLTEFPIAFLKSYFIRRAFLYGWWGLVIAHNYAYSRFVRVAKYYETGIVSRD

SEQ ID NO: 2436 - protein, 303 aa, Unknown
  Description of Unknown: Acidobacteria bacterium sequence
MPATGGVVRDPARFLSSAVAGRIAVVICAQDEELNLRICLQSLNFADALFVVDGGSTDATVEIAEDLGAKVFRHRWPGYAMQKNWALDNLPITADWVLFMDADERVTSALAQEILAVVASTSGNHAGYYIARRMIFMGHWLRHTYWYPDFNLRLFRLGSGRFEDRLVHERVVLDGTAGYLRNDLIHEDHRPISDYVLRLNRYSTLEAQEMLGMREANARLRVASSFRGDWAARRRALKERVWYRMPFRAVVRFIWTMTVRLGFLDGRPGFIFTVLACWNEWLATAKLYEMRVSASEAGHTESK

SEQ ID NO: 2437 - protein, 262 aa, Halomonas xianhensis
MAPITGVVITLDEADNIEACLASLARVCDELIVVDSGSRDATRELAERAGARVIAQPYLGDGPQKNVGPAQANHRWVLSLDADERLTDEAVQAIRGLDLATTTRAGFALRRRNFIGSRWVKTCGWYPDYCIRLYDRERTGFSDSRQHASVTTREVTRLEADIDHYSFANLSELFTKASGRFSTRAAKIMYLKGKRANALSPFVHGANAFVRKYVFQRGFLSGIDGVSVALSAAVNAYLKYAKLLEYQRDRKVRDAEDFDRVW

SEQ ID NO: 2438 - protein, 258 aa, Unknown
  Description of Unknown: Hydrogenophilales bacterium 28-61-23 sequence
MEKLPLSVFIIAKNEADRIPIVIRAVRDWVDEVIVIDSGSEDDTVAVSESLGARVLFNAWRGYGPQKVFAEQQCRNLWLLNLDADEEISPELGREMRALFTGRAPPCVAYTLPILPLYPFQDSGHPWTAFHHPVRLYRKDMAGFKDELVHDSVVVHEGRIGHLKGMVIHRSFRSLAHHVDKVNSYSSAQAEVLAARGRNPGLLALLLTPILAFFKQFILRREFVNGVDGIVVSYMYAFQRFIRLAKTRERQRLSRRKN

SEQ ID NO: 2439 - protein, 286 aa, Tistlia consotensis
MTLSVVILTLDAEATLGRTLDSVAGLADEVFCVDSGSRDRTAEIARAAGATVVEHPFEHYGAQRNWAIDNLPLTGDWELHLDADERLTPELAIEIRGLLDGAPAALAGCYLPRLVHFHGQPLRHGGMYPIWHLRLFRRGRGRCEDRLYDQHFYVEGPTERLSAPMIDDMRGSFAVWKARHRRWARLEAEQLRRGAGPRPGVIAGRFGGSPVERKRALRRLYEGLPPLVRPFLLFAYRFLLRGGFRDGWWGWRFYWHQTLCFRLLIDWYLVKLRLERDPIRPARPGR

SEQ ID NO: 2440 - protein, 259 aa, Morganella morganii
MTDKKRLSVVMISKNNADVIGDCLNSVQGLADEIIVLDSGSQDDTLTIARNAGAQVYENREWPGFGRQRQIAQQYATGDYILMLDTDERVTPELKQSVKQVLTAPQKNTVYRFARRNLFLGRFMKHSGWYPDHVLRLYPREQYQYNSNAVHESLETQGANVITLKGDVLHLTCRDLPEFQQKQLRYAADWAKARHLAGKRCSFLSVLTHTAGAFCKTWLLRAGFLDGRQGLILAFVNAQYTFNKYATLWSVSNNDESAS

SEQ ID NO: 2441 - protein, 492 aa, Selenomonas sp.
MKISACVIVKNEAENLPRWLTSMRSFADEMIVVDTGSTDQSVAIARAGGARVLRFDWINDFSAAKNFALDAAMGDWIVFPDADEYFTEESNPRVRPLLEEYDAHPYLDGFIVHLVNIDVDTGALLGTSAEVQRIFRRAPHIRFVGSIHEHIENLSGDTARQMMIAPGLTLYHTGYSPRIIKGKSQRDLELLLARRARGECARLDEYHLMDCYYTLEDYPQAAHYARLARDSADRPVGSENRPHAVLLQSLILMGASDAEIREAYDAARAALPEKADYPLIYGTYAWDQSYIMTACAAYAEGIHLHEEHYREGDFSAVLLPTAYMRLGEAALLRNAREEAILSAEHALRLNPRHAPLLAAFLRIMAAVGADDAAMIEILNGIYDREADAAFLASVLAGADVPLAALYYDRRSTAKFPPRRRLLLAGDANAAAASLIEEMECAAAVGAACGVTLSPEQQSALAMLLPRSCTEVLAAPEAQRMLRRVARLAEVRQ

SEQ ID NO: 2442 - protein, 262 aa, Labrenzia aggregata
MTDRLPLSVFIIARDEADRIARPIESVIGWVDEVIVIDSGSTDETVAVAEQLGARVIRNDWPGYGPQKRFGEDQCRNDWLLNLDADEEVTPGLAAEIKAKFADGSYADADGWRIMIRDLYAHETAPAPWAYGYHQIRLYDRRKGRFSASTVHDTVRPEEGARISNLSGIMAHRSIRSLDFQVGKYNRYSGMQVDDMRARGRKLPKSRLLTEFPVSFFKAYFVRKYRKYGWWGFILAMNYAHARFLRVAKAYEAELLDRTKTD

SEQ ID NO: 2443 - protein, 251 aa, Unknown
  Description of Unknown: Lewinellaceae bacterium SD302 sequence
MIKLSVVIITLNEAENLPRCLASVEGLADEILVVDSLSTDDTVKIAAAAGARVIEQAFLGHREQKAFAIENAANNCVLSLDADEALSDELKESIGAAKQNWTHDGYYVNRLNRLNGIWIRHGGWYPDRKMRLFDRRKYRMGGTNPHDRFDPTPASRTTRLAGDLLHYTNDDLDSRIVTINKFSSIAAQAFFDEGKRGNWWRVLVKPTGRFVSEFWLKSGWRDGYYGYYIAKTSAQYVWLREMKLLRLGKAS

SEQ ID NO: 2444 - protein, 264 aa, Marinobacter hydrocarbonoclasticus
MKLPLSVYYITQDEELRLPESLAKVSGWVDEIIVVDSGSTDRTREIAEAAGARFVHNDWQGFACQKAFAASLCRNEWVLDLDADEVLSDELVANIQALFSKPVDPDIAGFRMRWVLSQPDPRHPFRHDKSKKILRLYNRKKAEIEPEKDSNNDRPQVKAGRVVELKGDVLHRTLISLEQMERKYCQLSTEQARFLAAKGRRISSARLFAEFPVKFLKYYLLHRQILNGWFGLSVSITAANRNFMRLAKAREMQMLSEFEKENTR

SEQ ID NO: 2445 - protein, 632 aa, Quadrisphaera sp.
MAQSTVVVTDTSSPRALQQTLGFVVRTVPGTTEVVVVSPRSLKLDGALARRVRRVRVRGRSEVQDAALAEVRTDRLTAVLGAGCHLSPTWWADAEDAAHGRPTAVTDLGEGAARVLVHPVGVIPTARRPVPVSASLIVKDEEEVIGECLAALARFVDEVVVYDTGSTDATVALARAAGARVVEGHWDDDFGAARNRSLAHCTHDWVLCVDADEVVTGDPAALRALLARTSANVVRAVVVSTAHRGTAVGAETVSSRVYRRSEVMWSGSLHEQLVARPGHRLVLAPEQAPVRLLHSGYQVTTMHERGKAERNLRIARAAAEALAPGDPRAADVWGDCGRSLVQAGMLDEAVDAFENVLQLGAGPHTSVIAGRSAVLTLLQLQRYDDAERWIAALEGAESSGALALWRARVALGRGDLPGARSALRDAVSGTDPWGVRFDPATATTTAVLIDVEAGDHEAAERTLRHQIATAPDHVHLRLLVQHASETGRPLAGYLAGCPASLVERSLREAVLMDGDTADRWLTALHETRPADLGPIVAGCVVAARHTLEARLRWSVVAREAGITDPCPLRLHATDEQAPPASRCLAWAVLADACGEEDARAEWLALLPAVPDDELPLLGALLEELAPGLLVAT

SEQ ID NO: 2446 - protein, 631 aa, Fonticella tunisiensis
MKYFTMPIDNDIGLSIKTDSPNIPYKGVWGMSISLCMIAKDEEENIGRALESIKDVVDEMIVVDTGSTDSTVKIAESYGAKVYYFEWNNNFSDARNFSLEKASGDWILIMDADDEFVREDAQKLIDLTKKDGVDAYFMETLSFVGDRPGYDIVMNLNVRLIKNKKEYRFLGTVHEQIACNIMAVNKDARIETARIKFYHYGYLNKTVSEKNKRRRNIELLEKSLELEKDNKFLFFCMGNEYLALKDFSKALEYYMKTYENFNPDTGYSPHLLARMAICFDELEMYDKEMEIINLGLGIYENFTDLEFLKACLYHRQNKFTLAIKSFKRCIEMGEPPSNLALMAGVGSFKACCALSEIYLDMKDYDEAYKCCIEALKLNPGYTPCLYIIAEALFKKYERNMDIDYIKSALEDLFGGRLDGRACMALSNVFYKQRKYDIAYEYITKAEKLMGQSPEILYYKGTCLFYLKNFNKAIECYKKIKSGEFYQRAINKLFLSHILTNNTRRAARLLSKDKEIIGNKTVLVYKTFKEIMEGKNCKPVSADKDESREYLSIILDLLNILLKISEFDIFEKALQFLNLIESDEVLLGLAKLYYVNGFYQMAYNELIRSIKIFDRIDAEGIEMMRNILAGTV

SEQ ID NO: 2447 - protein, 705 aa, Unknown
  Description of Unknown: Gammaproteobacteria bacterium HGW-Gammaproteobacteria-8 sequence
MSVLRRRVRAAGLNVKASDPGAVPVPRGVQPIPETNWLARLAALLLLLALALGLVVPKIAGGVYLLLGLIGIIWLEPGLLRRRWQLDGHDRLLSFVALLFVAVWLIAWLVHGLDAVGQDDVGRILRLLLVVPIYLFLRKVDGLERAWWSGLTLGALIAGGYAIWFSVLGEPGEWYMRVGGPTNPIYFGGVVLAFSMMLLPRLTDSELRPALRVLVGIAILFGLVASALSGSRGAWLALPLLLVLYLLTLGSRQPPMKRYGIPLAVLAAGALLTLIPGIPLGQRVADAIASMSGNIGMLSEEDTLAIRWQLWSLALDTIGQQHWLGGGPGAFRAALEQAVLEGRLAERYLEFHHPHNQYLSVLLIAGLPGLITLLLLFGVPAWRFVTLWRSRWERTRMIGWSGLAAVAVLAVMCISESIFQRNSGVIWFALFTATASALVQVLQRREIAQRLEPRLHSLSVIIISRDEADRIGKALASVVDWADEIIVLDSGSTDATVEIAQQYTDRVEVTDWPGFGIQKQRALDRATCDWVLSLDADEIVSEALKDEIQLVLSRPQPRFSGYRLPWMTRAFDQDLHFGRWARAPLRLVRRDAARFTEVSVHEKLVLTDGSRRTGRLEGALFHDVFRDAAHAREKLARYARLQAEARHAQGKRATPIGAWLRAAANLFDNLILRGAFLDGLAGWKMSRLHAAYTLAKYRELARLGR

SEQ ID NO: 2448 - protein, 256 aa, Alteromonas sp.
MIPCSVFIVAQDEANNIERVLRSVSDFAQVLVVDSGSTDNTVALAEAMGAEVIHQDWLGYAGQKQFALSLCQQDWVLNLDADEALTPECIAVIKQTIIRNDIAALRFARNDIFMNQLPNKWMKKPNNLRLYRRQLAHFDTSEQVHESAIVEGKEIRTQVAFTHFGYNRIDALVAKNNLYSSFRAEDKFARNKRPSLIKLALVLPFTFLQKYFLQGRITNGKRGLILATIDAFYAFLKEAKLWEKYLVDSDPNKKSK

SEQ ID NO: 2449 - protein, 259 aa, Desulfosarcina cetonica
MNTDAHGRAVSVAIVAKDEAGRIGACLDSLGFADEVVVVVDDRSRDDTLAIAEAHGCRTLSMAWMGYGRQKQFAVDACTHDWVLILDADERVPPETGDRIRRLIDESAPPAAAYGFLRRNIFHGRWFKRCGWWPDRVLRLVDRRQGRFSDDMVHEQWICDGPVERLDAILEHYSFPTYADLIEKMQNYSTLAARQMEADGRQAAWWSPILHGLWMFFRSYVLELGVLEGFDGFVISLTNAGGSFMKYAKLRERRLCKLS

SEQ ID NO: 2450 - protein, 264 aa, Chelatococcus sp.
MSLPLSIFVIAHNEADRIGRTLEAVRHLTDDLVVVDSGSTDATVAVAEAHGARVVFNPWPGYGPQKRFAEDQCRHPWLFNIDADEVVPPDLAAEIAALFAAGDPAADAYETRIAEIFPGEAAPHRLAYALAPVRLYRRSMGRYSDSTVHDRVVLAPGARVRRLKGTIHHFSVRSLGDQLAKLNSYTDAQADNLEERGERVSMLRLYLEFPAAFIKAYFGRRHFVRGVYGFMTAMNFAFYRYLRVAKHIERRLLAEAAAKGRLTK

SEQ ID NO: 2451 - protein, 263 aa, Unknown
  Description of Unknown: secondary endosymbiont of Ctenarytaina eucalypti sequence
MSQRKRLSVVIITRNEAEVLTDCLESVSWADEIVVLDAGSTDATRYIAAQAGGRVFQTTTTAADWPNFGIQRRLAQSYASSEYILMLDADERVTLPLRLAIQAVLLHPDPEVVYNCARCNLFLGRFMHHGGWYPDRVVRLYPRKRYQYNALPVHESLETNSASIVTLAGDLQHLTCRDLPDFQRKQLLYAETWARERYRQGRKCSILAIITHTYGAFLKTWLLKTGFLDGKHGWLLAMVNAQYTFNKYTTLWALNKAMRGPDL

SEQ ID NO: 2452 - protein, 289 aa, Unknown
  Description of Unknown: unclassified Marinobacter sequence
MIILLLPKSQLKPQHKSADKLPVSVYYITQNEEARLPESLAKVTGWADEVIVVDSGSTDKTQTIAESAGARFVHNHWQGFASQKAFAASLCRNDWVLDLDADEVLSDALVNNIKERFSTSIADDIAGFQMRWVLSQPYPEHPFRYDRPKKILRLYRRSKAAIKPEKDSNNDRPQVREGRVAFLKGDVLHRTLITLGQMEEKYLQLSSEQARFLAAKGRRISSLRLFGEFPLKFLKYYLLRRQFMNGWFGLSLSIIAANRNFMRLAKAKELQVLAQIERRKSAEAAANKE

SEQ ID NO: 2453 - protein, 275 aa, Luteimonas arsenica
MPKPVPLSATVITFNEADRLGDCLASLAFCDEIVVVDSGSTDATRDLAAAAGARVLVRPFDGFRSQKQYAVAQATHDWVLCVDADERVTPALAASIQAARAGGFEGAAGYRFARCSAYFRRFLRHGNAYPDRKLRLFDRRRGGWRGEREIHETASVDGPVRTLAGDLLHLPFRSFEHQLAKGRQYAQMMAEHAHARGQRASWTKLVLAPWWRFWRGWLLRGGFRDGWAGLVYAYVTADTARQKTVRLWLLQRGLSGPSAPSSPARDGSAGPGTGR

SEQ ID NO: 2454 - protein, 277 aa, Nostoc punctiforme
MNSDINAVILTRNEICNLNRCIDSLQWCEEIIVVDSGSTDGTIQLAESLGAKVFIHIPLPPFKISEQRNWALKNCNLKSEWVLFIDADEVVPSNLATEIQRICSISNQQYNAYELPARYLFWDKWLKLTQGYPNWHSRLLKLGEVTFTGGVWEHFASDAKVGRINIPYDHYANSKGFGDWLERHDRYSSWDAQNVVEFLETGKASALGTERKLKLRLLAAKLWFLRPLVRFIQMYFLRLGFLEGITGLIFCLLYTMYEFMIVIKIIELRRKKSGLPL

SEQ ID NO: 2455 - protein, 267 aa, Unknown
  Description of Unknown: Candidatus Nitrospira nitrosa sequence
MLKISAYIIAYNEAGKIADAVNSVLWADEIVVADSNSTDGTDRIARELGARVVQIPFEGFGHLRNRAVQACTHDWVLSIDTDEQCTSEVRDEVLAILSGTPAHDAYLVPRRNYFMGRWIKHSGWYPNFRQPQLFRKGAMKYAESPVHEGYELLTSKPVGRLEQAIWQVPFRDFEEVVKKANRYSSLGALKLADRRVSMGAALGHGVWSFLKHYLAKRGFLDGWPGFVIAFGNFEGTFYRYAKRFEQQELWPLPTHAPLRRPGDSHSK

SEQ ID NO: 2456 - protein, 252 aa, Burkholderia singularis
MALIALNASARLAQCLDALSFADDVVVIDGGSTDGTAAIARAHGARVIVQTDWPGFGPQKNRAIAELSTDWILSIDTDEVVSPELAASIRAALAAPAASVYALDRLSSFCGAWVRHSGWYPDWVPRLFRRGAARFSDDLVHERLIFDGAPARLPGKLFHYSYENFETVLRKIDSYSTAGARQRHAAGRRGSLAQALARGAWAFVRTYVLQRGFLDGRTGLMLAVSNAEGTYYRYLKLMLMHDAPSVPREDRP

SEQ ID NO: 2457 - protein, 264 aa, Nitrospira sp.
MSVSILILTLNEEANLPECVQSVRWSDDIVVLDSFSNDQTVKIAEEMGARVVQRRFDNWSTHQNWALEHIPFKHPWVFYLDADERMTEELKAELISIAHDPNRTAVAYYCGRRNMFMGRWIRHAMPPGMIMRLFRPSHVRFERLVNPVPVIAGPYGYLSGMLVHYNFSKGISEWIEKHNRYSQLEALEGMKLIHQPSEAQPGIFSADRALRRRALKNLSFRLPWRPFLKFLYLYLWHCVLQSFYEYMIVVKMRELERREEGLPI

SEQ ID NO: 2458 - protein, 257 aa, Unknown
  Description of Unknown: Bacteroidetes bacterium 4484_249 sequence
MPKISVVIITLNEEANIGRCIDSVEDVADEIVVVDSYSTDKTEEIAKTKGAKFILNKFEDYVKQHEFANTQASYDLILSLDADEALSDDLRESIINVKKYWKHDGYSMNRKTNYCGKWINHSGWYPDIKLRLYDRRKGKWTGQKIHERFSLFEGSTKGHMKGDLLHYSFNSITQHVNQANKFTDLTAQAAFENGKKSSMFKIIFNPVLKFIRDYFFNLGFLDGYYGFVVCQISANATFLKYVKLKQLNKSSKTLQTH

SEQ ID NO: 2459 - protein, 249 aa, Marinobacter mobilis
MKLSAVLIAKNAGPDFKRCLDSLQFADEIVVLDSGSTDDTVRLAEEAGATVVSSEGWPGFGPQRQRAQNHAQGEWVFWVDTDEVVSEELAQSVLKAVSAAPANTVFQLNRLSWFFGRFIRHSGWYPDRIVRLYRRAEYGYDDALVHEKVACEGAHVETLAGDLLHYTATDFSDYMSKSVRYSDAWAEGRARKGKKASLGSAVSHSVGAFLRKYLLQLGFLDGRHGFLLAVFTAHYVFNKYAALWIRSRR

SEQ ID NO: 2460 - protein, 247 aa, Unknown
  Description of Unknown: candidate division Zixibacteria bacterium sequence
MPTLSVILITNNEANNIRRALDSVKFADEIIINDSGSTDGTIEIAQSYGCSIIQSEFVGFGIAKQTALNAAKSDWVLSIDADEEIDQPLATAIVQAIKNADYSGYHLNRKSQFLGRWILHSGWYPDYLPRLFRRDRGRFTSDSVHEQIQIDGDLGKLEGHILHYTDPDIEHYLQKLNRYTTLSADGLQRQGRRFKTLDILIKPPATFIKMYLLKGGFRDGIQGLMLALLSSFHVLCKYAKLWERQRR

SEQ ID NO: 2461 - protein, 331 aa, Unknown
  Description of Unknown: Alphaproteobacteria bacterium HGW- Alphaproteobacteria-5 sequence
MTDATASGVSSGTAAPARVSWKSGSVPIAVVMISLNEAHNMAAVLENLKGFAHEVFLVDSYSSDETVDIALSHGVYVVQRKFKGFGDQWNFALRELPVSAPWTMKLDPDERLTGALKQSIGEIIERKDADAFNVRRRLWFMGQPLPVTQVILRGWKTGTCRFSDVLVNEHPLVDGRIVATKGDLEHHDSPDLHHWFDKQNRYSTAEALSAYNGHPLAASPRLFGSKLERRMWLKNHFSKLPMRFALLYAYNLLATGAWRAGQGGRAWARSRVEIHRAIELKLIEMRKLGYAYSPPLPNTAKAHPGALQADRLRAAGNTGDVYERSAPAHEE

SEQ ID NO: 2462 - protein, 245 aa, Unknown
  Description of Unknown: Flavobacterium sp. LB2P30 sequence
MTTLSVILPTYNEASYIEDAVKSVEFADEIIVIDSFSTDGTKEKAIAMGCKVLERKFDNFSSQKNHAISYATGDWVLFIDADERVSQKLKLEILSVIQKGEHLGYKIQFPHFYMNRFLYHKVDKVVRLVKNDSISFSGDVHEKLLFKGSVGTLKNFMIHYTYKGLFHLLQKKDSYAWFQANTAFKKEKKATYFHLFFKPFYRFFSSYFLKRGFMDGIPGLALASINAYGVFSRYAKIILIEKGLK

SEQ ID NO: 2463 - protein, 275 aa, Polycyclovorans algicola
MAEQYRDAPSSRAGGDHARPSGASTVNRPGLSAYVLTFNSERYLQSILAQLNRFADEVVVLDSGSADATQAIAASAGARFVTHPFSDFRTQRGVAEQACSHDYIFFCDCDKRPDDVLVAAIRAVRTAGLDQAAYDVQRHWQAYGQPVRVVYPIVSPDRVPRLYDRRRCHWAPDKRVHEGLLVDGPRRLLAGRLVHLTFETQAEVDEKLARYTDLAALGLLDRCQRKGQSPRWAAIRHGVQAWTFSPLGAVIKSYLRRGGWRDGRVGLRLMIYALR

SEQ ID NO: 2464 - protein, 285 aa, Unknown
  Description of Unknown: Bacteroidetes bacterium sequence
MISVLILTKNEEQDLPGCLESVSWCDDIHVFDSYSTDNTVEIAMNAGARVTQRQFDNWAEHQNWGLKNIPFKYDWVFYIDADERISAGLKEALLNFDTATTGAVAYEIQRRDFAWNGNWLKNSQISPFYLRLFRPEKMRYERLVNPISVANGPVKRLPGYLDHYPFSKGFRAWWSRHLSYADMEAMMRMKDKDNNTTFSFKKAIWSRDFSERRYHQKGLFYKVPGRPFIKWLYMVIGRKAFLDGMTGITYATLQAIYEYFIVLKTKELQTSNGHIKKRQQQTAVL

SEQ ID NO: 2465 - protein, 257 aa, Polynucleobacter acidiphobus
MPTLSVILITRNEEANLGDCLTSLDGLADQIVVVDTQSTDKTLEIAKAYGALISSPEDWPGFGPQKNRALDLANSDWVLSLDADERLTPELRAEIKSVLNQPQANCYAIPRLSWYCGRFMRHSGWTPDYVDRLFKRGTARFSSDLVHERLIPQGQVLKLKHQMLHYSFMNAEQVRAKMERYSTDSAQQAFAKGKTGSPIKAVLHGAWSFVRTYFLRAGFLDGPQGFSLACSNAQGTYYRYMKLWRLQQMARAQNQKG

SEQ ID NO: 2466 - protein, 272 aa, Unknown
  Description of Unknown: Candidatus Pacebacteria bacterium CG_4_10_14_0_8_um_filter_42_ 14 sequence
MNKITISALIIAKNEAAMIQRCIATLRWCDEVLVLDDGSTDNTVELAEQTGARVISFKHKSFARLRNEALKHCKTDWLIYVDADERVSPKLAREILVHLETASVSALTLKRENVFYGATFQHGGWSPDLVTKVFKRSSLKEWTGDVHESPNYEGEAGYLQVPLLHLTHRSVRDGLLKSAEWTRVEARLLVASELGKISFLTILRKGVMEFLRRGFFWKGYKDGEQGLIEALTQGINKMLVYMQVWELQQKPSIPESYEKIEKDIADAWKSEL

SEQ ID NO: 2467 - protein, 256 aa, Unknown
  Description of Unknown: Betaproteobacteria bacterium sequence
MSAKLPLSLVVITRDAAADIADCVASASFAADVLVVDSGSRDDTVELARRSGARVIEREWTGFGPQKQFATTEAANDWVLCIDADERVSPELAASIAALFAAGSPRACAYAIPRRNRFLGCWLAHGEGYPDWTIRLFDRRRARWSDDVVHERVIANGPVKRLAGDLMHASAESLDAYIAKQNRYTSLQAAALYANGSKAGAMHLALSPLARFVRFYVLKLGFLDGAAGFAHIAIGAFASFLKYAKLRALDAEARSR

SEQ ID NO: 2468 - protein, 272 aa, Terriglobus sp.
MISVMVLTLNEEHDLPGCLESVAWSDDVWVFDSLSTDRTTAIAEVSGARVIQRKFDNWAAHQNWAMENIPFKHPWVFYIDADERMTEGLREAIHQAVSAAGGHVAFEVERRDFLNGTWLKHVQLSAWYTRLFQPSKMHYERLVNPVSVVDGTTGRIAGYLDHFPFSKGVTYWIQRHNDYSTKEAQQLMLNQADAPAFRLRDAFFASDFQTRRKQQKQLFYRLPGRPILKFILIYFAKRGFLDGSAGLTYALLQSIYEYFIVLKTRELRQHPQ

SEQ ID NO: 2469 - protein, 252 aa, Bordetella avium
MTLSVIIITKNEAANIRGCLESVAFADEFIVVDSGSTDNTVELARDFGARVSITPDWPGFGVQKNRALDLATGDWVLSIDADERLTPELAQAIRTAMASPQATAYEMPRLSWFCGRFIRHSGWWPDYVLRLWKRGTARFTDAAVHERVVPHDGQVFRLAPHLEHYPYPDLDTLVTKANRYSSDAAAMMYAKGRRANVFTALGHSFWTFVRIYLIRRGFLDGRHGLVLAVTAAAGSFFRYAKLMFKSEPEPPK

SEQ ID NO: 2470 - protein, 245 aa, Ferrovum sp.
MSLSVIIIAKNESHAIEDCLESVSFADEIILIDGGSTDDTVEKAKALGATVHVNSHWQGFGFQKNLALHHATKNWVLSIDADERVTPELKNAIQRAMAEHQFDVYRLPRSSSYCGHFMRHGGWWPDYVVRLFKRGVAEFSADRVHERIETDKPIGTLRHPLIHLTYETLEEVIDKTNHYSTLGAEMLFDKGRRGGLGVASLKALWAFLRTYILRAGFLDGGYGFLLAVSNAQTTFYRYAKLWLKR

SEQ ID NO: 2471 - protein, 262 aa, Unknown
  Description of Unknown: Candidatus Glomeribacter gigasporarum BEG34 sequence
MPGKLRLSVIIITLNEAHHITECIDSIKSIASEIIVLDCGSEDETQALARAHGARVMQNTGWPGFGPQKNRALARAQFAWILSLDADERATPALCAEIARAVRNEGYTAYAIPRRTQFCGRWVRHSGWTPDDVVQLFRRGQARFSEHAVHEHVRVEGSIGHLTQPLEHYSYRSQREVNEKVQRYARAGAQELHRAGIRGGFCKALLHGGWAWWRTFIWRLGFLDGWTGWAIAAMNARTAWLKYKYLGAARGAAPTSAAVRNS

SEQ ID NO: 2472 - protein, 248 aa, Pseudolabrys sp.
MPRLSVIVIAKNEAANIGACLDSVAFADERIVVDDNSSDDTRAVAEAAGARVIVRALDGFGAQKNFALAQASGDWVFSIDADERVTPALAAEIAQAIGQGAADGYELPRLSSFCGRQMRHSGWYPDYVLRLFRRGSARFSDDAVHERVICDGKVARLANDLLHAPVMRLEDALSRMDRYSTAGAAMFTTRGKRVSFSSGITHGLWSFFRTYVLRGGFRDGREGFLLAVANAEGTYYRYMKAWLAGRKS

SEQ ID NO: 2473 - protein, 351 aa, Bacteroides pectinophilus
MIVKNEEAVLARCLDSLNGLMDEIIIVDTGSTDSTKDIAGLYTDKVYDYEWTDDFAAARNFSFSLATMDYIYAPDADEVLDDINRMRFEQLKAALLPEVEIVQMKYHTVTGFDTVLNSKTEYRPKLFRRLRTFTWIDPIHETVRTSPVVYDSDIEILHMPQSMHSKRDFSIFLKAYKRDGMLSPRICNMYARELIKGGDENDFKDALPVFLQLYECTESEDARKEYACVLAHAYRLMHEPDFFFKYALKDMVTSACSEMCYEIGLYYEAAADYNEAVVWFINAYSETDSILDIHTGGDLALTHLVSCYDNIINTLEASDGDYDYELIAAYRTERDQYKSALDNWTLPNELA

SEQ ID NO: 2474 - protein, 299 aa, Unknown
  Description of Unknown: Verrucomicrobia bacterium sequence
MSEQSGARVPLSVLVPVKNEAANLRDCLASVAFAQEIVVVDSASTDDTQAAAEAAGARIVQFVWNGKFPRKKNWALESIRWQHEWVLIVDADERVTPELEREISQAIRRTDVDGFYLNRRFWFLGGWINHCGYFPSWNLRLFRHRLGRYERIEIDDNIASGDNEVHEHVLLKGRAEYLPAPMEHYAFPNIATFVEKHNRYSTWEAAASAKVHQRTGGKTLRATPLGTPVERKRWLKKLAIRVPCRPSLRFLYHYVWKQGFRDGYRGWVLCRLLAWYERMIVLKEREMKNRSCNSNAVPC

SEQ ID NO: 2475 - protein, 409 aa, Rhodoferax antarcticus
MLPVTSASEPACRKTDKSGNDTSSKGPCVAFKARNCPLRSRSACTMDEIFWVEVACPLKGAMLMGTCVRPTPETSTRNWANAWLSKPKNKRRANVNPDAMTNPRLSKSRRNPRLVPNAQGDRPNIEKKVTTAMENLDGLKGPNIMENGSMKKVTLSVIIAAKNEGAQIGECINSVSFADEVLVLDSGSTDDTATRARKAGANVHTTDWPGYGPQQQRGINLATSDWVLSLDADERITEHLHDEIQAAICRPDFDGYFLPRHSSLCGVFIEHGGWRPDYTLRLVRRPLAGFTDHFLHAHMTVNGKAGHLKSPIVHYSYRTLDDLLEKMNRYSKGAAIDSFTRGGSSSLTKALAKGIWAFVRTYFVRQGFRDGHIGLVLAIYNAQTTYYKYLRLWMMTNDKLKETPKKFFK

SEQ ID NO: 2476 - protein, 264 aa, Desulfomonile tiedjei
MTQSPDSQQPLLSVAVIAKNEADRIRALLDSVKFADEVLVVDSGSTDETVELCRSLGARVIHQDWMGYAAQKQFAMDSASGQWVLSLDADEAISPESANEITAAIRSCGHEVHGFSLPRLSRYLNRWIRHGGWYPDRKIRLVQKGFGTWTGDGLHEKLEVSGIINKLQCPILHYVYRDISDQIDTINRFSTVHADHRRPAGPIHILFGLFHAAGKFLECAIWKLGILDGIPGFIIAVNSSFYVFLKHAKAWEKSLPDTNAHSKE

SEQ ID NO: 2477 - protein, 288 aa, Paraburkholderia silvatlantica
MSDLPLSSCASSTQSTRAPSTKRATLSVIVVAMNEAHDIRDCLESVRGLAMETIVFDSGSSDGTPDICRSLGARVFETDWPGDGPQKNRALDVATGDWVLCLDADERVGDELRREIEQLLEHGTTHAAYSTPRRSSFCGRFMRHSGWWPDRIERLFRRGSARFTDVRTHTRLVIEGTIGRLDGPIIHIAVGELHEALDKANSYSTSGALTMAENGKRSTLGKAIGKGLWAFIRTYVIQRGFLDGAEGFMLSVTNAEGTYYRYAKLALMTRAMQASKSRGGAEQPGQSR

SEQ ID NO: 2478 - protein, 262 aa, Mesorhizobium sp.
  MOD_RES (253)..(253): Any amino acid
MPKLSVIVITLNEEACIERCLGSVGFADEFVVVDNNSTDRTREIARDMGAKVIVTEDWPGFGVQKNRALAAATGDWVLSLDADEWVAPPLAREIEHAIANPRGCAGFEIPRRSRFCGRVVRHGSWSSDRVLRLFRRDAGRFTDYPVHEKVVLKGRVSRLAQTMEHDCITDLDDAHRKIWMYAQASAKQIGDMGKRGSTTKALLHSAWAYLYSYIIRFGILDGSVGLLVAGYCASYTYRKWAAAPSETGASVSXRDTPAVKMN

SEQ ID NO: 2479 - protein, 256 aa, Leptospira neocaledonica
MLPISACIITLNEEDNIERCLSSLDFVNEIIVLDSGSKDRTETIAKQKGAKVVLRKFDDYVSQKNHVISLAVSPWILTLDADEELSPGLKEEIKNLFKNGEPEEDGFLIPRLTMYMGKWIRHGGWYPNYRARLFLRSKGKFVGGKVHEAVELSGKRKKLKHPVFHYSYENLFDHVTFINRYSELAAAEKFGKGKRSGLVLALLEAGYKSFWMYFVRLGFLDGRRGLILAIMGFYYNFLKYTKVFEMSLAEKQKTDN

SEQ ID NO: 2480 - protein, 265 aa, Luteibacter sp.
MAREPLSVVVTTFNSAATIGACLASVRFADDIVVLDSGSTDETRDIAASHGARVSIQPFAGYSAQKQAAIDLAIHRWVLLLDSDEALPAIAAERVRAALVTPDVAGFEMLRREWVFWRWQPGRARLNHYVRLFDRTRAGMSGHEVHESVLVRGPVRRLDAVIDHYGERDIDGRVDKANRYSTLQVRDRQTREPRMLRLRMVVYPAIAFARYYFWRGHWRGGWAGFIAARVHAFYAFLKYAKLYERRVSGGQRQDHGAFESERPED

SEQ ID NO: 2481 - protein, 253 aa, Neisseria elongata
MASDISVLILARNEEANIRECIESCTFAGEVIVIDDFSTDDTEKIAEACGARVIRRAMDGDWGGQQTFAVEQARCGWIFFIDADERCTPEAAEEIARTVEKGEKAAYWLRRQNRFRHNKAVHGVLRPDYVCRLMPAEGVRVEGYVHPAILHPYADKKLQHFLLHYTYDNWDQYFNKFNKYTKLSAEKYKDAGKPVGFWKDIVLRPIWAFIKVYIFDRGFLDGKMGWILSVNHYFYTMTKYVKLYTLYKSDGKL

SEQ ID NO: 2482 - protein, 275 aa, Humibacter sp.
MRLPISVLVQTKNEAAGIRQCLASLEDFDEVIVVDSLSTDGTADLARMMGASVVDFKWNGEYPKKKQWQLDNVSTRNRWVLFLDADESPSPQLISWLATAFASERLNVAAFDIRLDYVFSGRTLRHGHRVVKRALVDRNRVRFPEVDDLGAPGMGELEGHYQPNVRGKVGAAGGRILHNDLDPVRTWFDRHNRYSDWESYLRTRIMSRKAVAQSRSIQGRIFERVPFKPMAFFLWSYVVRAGFRDGRAGLDYAIALSMYYWQIELKVRERKRTGG

SEQ ID NO: 2483 - protein, 436 aa, Austwickia chelonae
MKRRRKGHQKSSGQSLIDVAMIVKNEEAHIADCLRSVKALRPLLGRICVYDTGSTDRTVELARAEGAIVREGYWDDDFSRARNESLAMTSAIWVLWIDADERLVVDIERLAVVLRMTAQAPRLEAGWLINKMADDPGGAVQARALRILRNKAATFVGRVHERPMRVEDGCPLQPFTLPERIIHLVHHGYTSETIEGKLHRNLALAENYVERLRAGQPTDEELSTALLDRGRTHAGLGRRAEAEADLEEVLTLQAHSAVRAEAACRLAEFQLMDDHPDEALGFLKAIETGAEENSHVRWLRGRALHAKQEFAEALEIIRSVDRPTTPQGYMAPWREVLLLRMELAARQGHTEEALSAGLALATRHGGAHVVAGLMIALWGKKEASQLAVLLAQASQDYDADVEAAFANHSESGRLVAQEYRSHWGRPANATPTGRTT

SEQ ID NO: 2484 - protein, 260 aa, Bdellovibrio exovorus
MKGCDIKNVSEQKIKIPITVTLIALNEERNIQRALSSVQWAEDIVVYDSGSTDNTIEIAKKMGARVVQGEWLGFGPSKRMAVQNAHCDWILSLDCDEEVDMALQQEIQKRLPDLNPKVAYKVPRLSYHMKRWIRHGGWYPDYQIRLFNRKFANWNEAKIHEKVEASSYEKFVSHLNHYVFLNVADQVRTNNKYSSLQAQEMWDRGKRFSLFHFLTKPYVKFVECYFWKLGLLDGWAGYVIARNAAYSVYLKWVKLKELEG

SEQ ID NO: 2485 - protein, 262 aa, Marinomonas sp.
MTEKLQKNTISAVLIVKNESKNLDMCLNSLNGWVDEIVILDSGSTDDTQKIASKYTQQFHQKLDWQGFGLQRQAAQKLIKTDYILWIDADEVVTETLKNSILTALKQNQKKTAYSINRKSWVFGRFIEHSGWYPDRVTRLYRADEANYSDDLVHEKVLLNNDVRLLPLEGDLIHYTYDDLQHYLVKSASYAKLSADQKEQQGKTSSLSKASLHAFACFVKMYLIKRGFLDGKQGFLLAILSAHSTFVKYADLWIRSQPKPHN

SEQ ID NO: 2486 - protein, 286 aa, Unknown
  Description of Unknown: Verrucomicrobia bacterium IMCC26134 sequence
MIKVPVSILIPIKNEAGNLPRCLAAVAWADEIIVVDSHSTDDSAGIAQAAGATLVQFDFNGTWPKKKNWSLETVPFRHEWVFILDADEVLPPGAETELRSIVENPGHPVDGYWINRRFMFMGKWLRHAYYPNWNLRLFRHKRGRYEKITDAPTASGDNEVHEHVIVRGTTGRLRTEMDHYAFPSVEVFVEKHNRYSNWEARVEVDGLLSNKSLQNRDVGWRRRLKSWTQKLPFRPWLRFSYVYFWQRGFLDGREGYYFARLHGMYELMTVAKTYELRKQPSPSRPR

SEQ ID NO: 2487 - protein, 264 aa, Unknown
  Description of Unknown: Candidatus Macondimonas diazotrophica sequence
MTVSAERPLPLSVAIIARNEEARLPRCLESVSGLAAEIVVLDSGSADATVAVAERFGARVEITDWPGFTVQKNRALVACHQPWVLSLDADEAVSPALADAIRALFAAGDPPRTGYFINRRNRYLGVWLRHAWTPEWRLRLVARDQARWTGGRVHEQLTVTGPTGRLAGDLLHESYDRLDDHLHRTIAYARLGAEDLIARGKPFRAYKLLLSPLGRLMRILLLQQSWRDGWRGVLIAASSMLAAFAKHAFVLEHHLRNTERNRRP

SEQ ID NO: 2488 - protein, 255 aa, Unknown
  Description of Unknown: Deltaproteobacteria bacterium sequence
MPKPITATIITLNEEANIEGVIASAARLCDEVIVVDSASTDRTVELAEAAGARVFVQPYLGDGPQKNYGVKFAKNDWIFSIDADERFEDDAVEALLALDLERAEADAYAVRRKTFIGDRWIKLWYPDWVTRLYDRRVCAYEDSIGHASVKGGRVKKVPCDLLHYSYRDYSDIVKRVDKFAARGAKQVLARGGMITPAAPLLHGISRFLKQYLIRGGVLQGVDGLNVSVISAFGAYMKYAMALEARRSGAATERKP

SEQ ID NO: 2489 - protein, 373 aa, Paenibacillus sp.
MITISLCMIVRNEESSLQRCLDSIKGLVDELVIVDTGSTDNTKAIAANNGAIVYDFEWIDDFGAARNFAFSKATQEYILWLDADDVVDPKDHAAFKQLKEMLSVSRHIDSVTMPYVLTTNEKGEAIFSLRRNRLVRREAGFIWHGAVHEYLAVGGQIYNSEIAIYHKKDKEYTDRNLRIYEKRLAAGEEFSARDLYYFGNELKDHARYKEALDFYEKFLQTKQGWYEDCIQACLKMEGCHHELQNENDRLPALFRSFEYDKPHSDICCQIGEILLQREMIHPAIYWFEQATQLVIPSDQLTMTQASFWTWVPHLKLCLCYDQLGQTERACYHNEIAMSFYADHPSMLHNQSYFQKILGDRYESIRASARGPVQ

SEQ ID NO: 2490 - protein, 297 aa, Roseinatronobacter thiooxidans
MTVTVVILTLNEARHIERALRSVAPFATRCVVVDSGSTDDTAERAVAWGAQVLTHPFVNQAQQFNWALDQLPEDTGWVFRLDADEVVSPKLAAEIVARLYDLPNDVAGLTVPRRIAFLGRPIRYGGVFPVHIVRLMRHGRGRSEERWMDEHIRVDGSVEALAGELLDNNLNPLGCWIDKHNRYASREALEMLLAERRGQDGSAAEMGRQAATKRWIKSNLYGRLPIGLRALTYFLYRYLLRGGFRDGYPGLAFHVLQGFWYRFLVDAKLYEARQHLSEHNGNLAATARAVLDLDIDD

SEQ ID NO: 2491 - protein, 279 aa, Klenkia soli
MQSIGIIILALNEEEAIRTCIESAKLLTSNVTVLDSGSKDQTGRIAVAAGAQVVQFRWNGAYPKKKQWSLDNLYLDTDWVLLMDADERLSPALASEIKEVLAGSPVSAFEIPVQYHWRGEVLRHGQTVYKRTMLRRGACKFPEIDDLDAPGSTEVEGHYQPLVRGAIGRLQSRLIHDDPDPIHDWFARHNRYSDWEAFIQIRPEVRAATRAAKSSQGRIFDRMPLKPVVIFIYNYFIKQGFRDGRPGFEFAFSLMFYHAQIQMKIREAAAKSQEQYRSN

SEQ ID NO: 2492 - protein, 249 aa, Catalinimonas alkaloidigena
MPPISAVIITYNEERNIARCLDSLQGVADEIVVVDSFSTDRTEEICRARGVRFLQHAFEGHIEQKNFAAAQARYPHVLSLDADEALDPTLQRSILAVKADWQHTGYQMNRLTNYCGHWVRHGGWYPDRKLRLWNRQFGQWGGTNPHDELRLTPEHSVGHLAGDLLHYSYYSLHDHVRQVNYFTDIMAQSQQHKGGSLLKVLLSPWVKFIKSYFFQAGFLDGYYGLVIAIISAHATFLKYAKIRELRKNR

SEQ ID NO: 2493 - protein, 279 aa, Unknown
  Description of Unknown: Gemmatimonadetes bacterium sequence
MAGLATRTQPRIALTVVVPTLNEGAQIGDAINALPFADEVIVADGGSTDDTVAIARARGATVIERAGVTIAAQRNAAIARARNEWVFALDADERITDALWQELREVVAAPAHRVYRVRRMNSFLGRERRRGRWGRDWQVRLFTRERRFVPDRVHERLEPAPDAGSLRASLGHVPYRDLRHHLEKMIVYARWGAEQLHARGRRATLWELAFRPAWRFVRDYVVYASWLDGAFGFLTSALAAYSCFVKYAYLWELGRLRRESTATRPSAPSEVDRRQAAGG

SEQ ID NO: 2494 - protein, 257 aa, Derxia lacustris
MPTLSVVIAARNEAANIADAVRSAAFADEVLVLDSGSTDATADLARAAGARVLATDWPGYGPQQNRAIDAATGDWIYSLDADERITPALATEIRAAIAAGRFEVFDVPRRSLFVKRFMKHSGWWPDRTRRLFKRGSARFTTHVIHANLATDKPVGHLAAPMTHYSYRDLASVLEKMNRYSSGSAVDLHERGKRGSLGGAIRHGLWAFARTYVFKLGFLDGAEGFMVAVVNAETSYYKHLKLREIQRAGQPLIDEPGP

SEQ ID NO: 2495 - protein, 268 aa, Enterobacillus tribolii
MERARLSVVMIAKNEAELIADCLRSADWADEIIVLDSGSTDDTVAIAERHGAKVFTHTQWEGFGKQRQQAQRYASGDYIFMIDADERITPPLRQAIESVLENPQPHRVYSCARRNLFLTRFMRHSGWYPDRVIRLYANAGYHYNDNLVHESLDYRDATVCRLDGDLLHLTCRDFFVFQRKQLGYAEEWSRQRFQAGKRCGLFSATAHGLGAFLKTWVLRAGFLDGKPGLLLAFVNAQYTFNKYAALWALARQQKAKHHDDESHLSGHL

SEQ ID NO: 2496 - protein, 303 aa, Nitrospira sp.
MARIHVSCRHDSGQRNGGHHGGTGGSTGTSIAKSLAEDFVGEPACKPTVACLVITKNEERNIVDCLESAQWANELIVIDAESGDKTVELARACGANVFVRPWPGFGLQKNFGMAQTSADWILILDADERVTEELRGEVRGCIEGWRPGASVAYRIPRRNFFYGAWVRGGGVYPDYQVRLFRRGIAQYNDVAVHENLIVDGEIGTLVGHLDHYTERRIKDHFKKFGHYTTLAAQEKAKKVRTVGWSDLVFRPLVVWAKTYLLKQGYRDGVNGLIVCLFASMYTFVKYAKLWDTTRQDASHQDAR

SEQ ID NO: 2497 - protein, 267 aa, Salinicola salarius
MAAITGVVITLNEADNIEACLASLKRVCDELIVVDSGSRDDTVARAEAFGASVIHQPYLGDGPQKNVGPRAASHRWVLSLDADERLTDDAVAAIQALDLDAESNGEGNHDAYALRRRNFIGSRWIRHCGWYPDYCIRLFDRDRTGFSESRQHASVQATHPRRLDADLEHYSFANLGELFGKASGRFSNRAAKIMYLKGKRANAFSPFLHGANAFVRKYVFQRGFLGGLDGVSVALSAAINAYLKYAKLLEFQRDAKVRDAEDFDRIW

SEQ ID NO: 2498 - protein, 274 aa, Leptospira idonii
MLGKSKRKLSVAIITFNEEKNIQACIDSVKNICDEIIVLDSFSTDKTKEIATKETLVRFYEGPFHGHVEQKNKAIGYCSNEWILSLDADERADDVLQKSILEFLESETEEVDGFQIARLTFHLGRWIYHSGWYPQRRYRLFRKEKAVWVGENPHDFIELKDPKKGKILKGDILHYSFADFSHQITTINQFSSIVANTRYAKGHSFSLLKSILKPIGKFIEIYLMKRGFLDGVPGLYIALASSFSTFLKYAKIYELDKKYIERPSNIRKDYGTKK

SEQ ID NO: 2499 - protein, 286 aa, Unknown
  Description of Unknown: Planctomycetes bacterium sequence
MTQKLTALIPCKNERRNIRPCIESVRPIADEVLVADSGSTDGTLDIVREMGGCRVIEREYVHSANFKNWAIPKAQHPWVLIVDADERVTPQLAAELRSVLAEPQAGIDGYWIGRKNHFLGYHIAHCGWESDDVLRLFRRDVGRYRERWVHAEIELDSTRVRRLKHPFEHFTSWSSDDYWRKMNRYASWGALNMRDEGRRPSLLSMVFRAPMRFLQLYFLRLGFLDGMPGFHVCAYTAFYTFMKQARLWELEHALAQPDPEADLLPFSGESQAARRTAERSESLRAA

SEQ ID NO: 2500 - protein, 327 aa, Unknown
  Description of Unknown: Gammaproteobacteria bacterium HGW-Gammaproteobacteria-4 sequence
MALAWRGTQVGSKRVVLEPTHQPTRPVGSTPAAFEPTCDAKASNIHHYIVLRARCFGVFMAVIDAERSLPISGVVIAKNEADRIERCVRSLLGLCAEVVVLDSGSTDDTVARARAAGARVEHQEWLGFSSQKNVAIARAAQPWVLLLDADEWLVPSGARRVRALFAARPDGNASIERADIWRLRRRTRFLGRSLRHGGWGSEAVERLFRSDCRYLPARVHESLDRRGKRVLRLPARIEHDTARNRAEYETKLDGYAELFARQRHAQGVRGFWIDAWLHAGAYWLKNYWLRGGFLDGRAGAIYHYLHSRYVFRKYRTLWRLRDTPIEP

SEQ ID NO: 2501 - protein, 246 aa, Hahella ganghwensis
MPKLSVTIITLNEAKRIRECIASVSFADEVLVVDSGSSDDTTEIARAAGARVIEEPWRGFGPQKQFAVDQAQNDWVLCLDADERPSPELAAEICQIMQQPMFKAYTMPRCNTFLGRWLRHGEGYPDLSLRLFDRRNAVWSKDPVHEKVETESEIGQLKADLMHFSEDGINAYLAKQNRYTSLQAEQMHTRGKDFSVGQMIFSPLFRFFKFYILRRGFQDGIPGLIHILIGCMNSFLKYAKLYELKR

SEQ ID NO: 2502 - protein, 260 aa, Unknown
  Description of Unknown: marine gamma proteobacterium HTCC2080 sequence
MPRRKISCFLIVCNEADRLEASLRPLAGWVDQLIVLDSGSTDGSVEIAQRYSDDVYQTDWPGFGPQRNRALAYCKHDWVMTIDADEVMTEELKAEIDTVLSKPNLTANFIRLPWHTFLFGKPLKYGRYSTPQGKLFLKTGAKFKDRQVHETLIMPKRQTITLKSPLLHYSWRDYQHVSEKHLRYGVLGAQDKAKNNKKASIVYAFFRSITDFLQQYILRLGFLDGQRGLLMAVILSQYAFHKYAALWTMTDDISKQSGNH

SEQ ID NO: 2503 - protein, 316 aa, Pseudohaliea rubra
MTLTVIILTKNEARHIQRAIDSVATVADSILVIDSGSTDDTIAISERLGADVIHNPWRNYATQFNFALDHLPEETDWVLRLDADEIVTPDLAREIEATLHKLGPEAKGVYVSRRMHFLGRRIRRGGVFPIRVLRLFRHGAGRCEDRWMDEHILVDGATADLSGEIIDDNLNSLTWWTEKHNSYASREVVDLLNLEYGFMAHETVADLSGGQQAGVKRWLKERIYARLPGGFRAFVYFIYRYVVRLGFLDGKEGTAFHVLQGFWYRYLVDAKLHEVRLYMQRNDVDAGRAIRDVLGIDVESSANTNEQNSRQEAQHS

SEQ ID NO: 2504 - protein, 252 aa, Neisseria elongata
MASDISVLILARNEEANIRECIESCTFAGEVIVIDDFSTDDTEKIAEACGARVIRRAMDGDWGGQQTFAVEQARCGWIFFIDADERCTPELCGEIMQAVADGTQYGYWVKRINHFQHKLVRYGPLSPDWVCRLMPKDGSRVEGFVHPKIIHGCRDKKLKAPMLHYTYETWEQYLDKMNRYSTLSAEKYRNEGKRIHTFADIWLRPWFAFFKMYFLKLGFLDGAMGYILAKNYANYTMNKYVKLKYLQDSRKK

SEQ ID NO: 2505 - protein, 281 aa, Unknown
  Description of Unknown: Microbacterium hominis sequence
MTRISKISVVVLTKNEEAGLGNTLDRLTAFDDLIVVDSHSDDRTVEIATAHGARVVEFDWNGRYPKKKQWALENAGAVNHWVLLLDADEFPSPALVRELGELESSLDVSGHAAYDINLLYRFGGRYLRHGHVVTKRSLLDVRHARFPEVNDLEAPGIREVEGHYQPESDGTVGKLKGRIVHDDRDPVSSWFARHNRYSDWEAHLRTAPAARREIASKRTTKGRIFDAVPFKPALFFAYAYVAKAGFLDGRAGFDYAMALSMYYWQIGVKHRELLRGDADAR

SEQ ID NO: 2506 - protein, 311 aa, Burkholderia multivorans
MSRGAARGARPPGILPVGPAPKMAQHYSRTAPSRPAADAAGTMRAGRYTAAHVFFAFPTIFMAEPTLGVALIALNASARLAQCLDALTFADDIVVIDGGSTDDTVAIAQAHGARVIVERDWPGFGPQKNRALDALDTDWILSLDTDEVVSPELAQSIRDAIRTPAADVYALDRLSSFCGRWIHHSGWYPDWVPRLFRRGTARFSDDLVHERLVFDTPAQRLSGKLMHYSYEDFETVVRKLDAYSTAGARQRRAAGQRGGFGKALARGAWAFVRTYVLRRGFLDGRAGFMIAVFNAETVYYRFLKLGHPPAR

SEQ ID NO: 2507 - protein, 223 aa, Xanthomonas citri
MRGLCAELLVVDSGSTDDTVAVATAHGARVVHQDWLGYAAQKTFANTLATHDWLLLLDADEWLSPGTADTIRALFADGRVEQADAWLLTRRNWFLGHRLRGGEPMERLVRAGWRYLPSQVHERPDLAGKTVRALAADFEHDTSRSHAEHVAKLSRYAQLWARQRFDAGKRAGALDGPLHAAAYLLKQYLLRGAWLDGAAGWRFHRAQAGYVLEKYRRLRALAP

SEQ ID NO: 2508 - protein, 257 aa, Rhizobacter sp.
MSLSVTLITHNEGANIVDCLKSVAFADEWVVVDSGSTDNTRELAESLGARVVRSDGWPGFGPQKNKALALATGDWVLSLDADERVSPELAARIQAVVAGQGGAALGFELSRLSRFCGQWMHHGDWYPDRVLRLFRRDSGRFTDDQVHERVVVDGPTARLQGHLLHETMPSLDDAIDKMNRYSRGRAIDKVRGGKRGGLGAALSHGVWAFLRSYVMRRGFLDGKLGFVLAMYIAEGTYYRYLKMGILSGQLGHSIEPS

SEQ ID NO: 2509 - protein, 366 aa, Streptacidiphilus jiangxiensis
MARVSLSMIVKDEAASIADVLADASAFCDELVVADTGSTDGTQELARAAGARVVDVPWTDDFAAARNASLDACTGEWIVWLDADDRVPPASQEAFTRVLAVLADDDVDVLVSPYHCAFDDHGAPTFTTLRERVLRRDAGLRWGGAIHEVVDITSARTRDEPELVVEHRRTEAQAAQDEGRNLRILEKLYADGDRSPRTLYYRANELRDSARHEEAAAAYTEVLALDQPAWERYFALMSRAECLQTLGRHAEAEASAVLAVLLDPTRPEAWMVAGMIPYERGDWARAVPFFSAASVAQARPSGGFVRGRDYAWAPWDYLSVCLGNSGRHEEALAAGVRSLRGNPQADRVRENIGWFVSQLPSSGAAD

SEQ ID NO: 2510 - protein, 361 aa, Ralstonia insidiosa
MQSTPTKLALVVIARNEATCIERCLLSAKPFVDRMVVLDTGSTDDTIAIAQACGAHVSQMTWQNDFSAARNAALEAANADWNLILDADEWLESGGEHLRALSNAKPVLGILCIKNDTDASDATSQLIAWLPRLLPRGVRYVGRIHEQPVSSLPAERLSIVLRHDGYTAAKMQKKGERNTQLLLDELKHRPDDPYVLFQLGKEIELHQEDYARATDYYARAFALAPQDAPYRRGLALRYLYSLGKSDRLDEAMAHADTSIHAWPDFPDLCFALGLVLVDAAVKHPEHANTQWLPLAEQAFCRCLEIGDQAGMDGSVVGRGSFLAAQQLATVYQMQANVLARKSEQYLALSKQMQGAPAPREG

SEQ ID NO: 2511 - protein, 410 aa, Unknown
  Description of Unknown: Candidatus Rokubacteria bacterium sequence
MRARRASDLRRSQRRELPRSPVARPASRAQASSAGGVLLSACLIVKNEEQFLDRCLLSLEGLVDEIVVVDTGSTDRTREIAAARGARLHDFPWRDDFAAARNHGLDLARGEWILYIDADERVRPASVSRLRTQLADPWHVAHYVLLHPRPGFTPYWEMRLFRNDPRIRFRGIIHENIWPGIHAYRAARGGRIGRSELVLDHEGYERDQEVKHRRNLPLLRKALKEDPGKVFSWCHLATIYASLGKDRRAEKAWKAGLAVVRKRPRSRSGEDTLPYLGLIQWRLARGRDTRRLLAEALERFPHNHQLHWLRGITLMRAGRPGEALPFFERLVACGRTGEIDRFLAYDARLFDVFAYDSLATCHFKLGHYAESRGYFELAAKHDPEKLEYRLKRALCARLEGSSTDGSPGGR

SEQ ID NO: 2512 - protein, 290 aa, Thioflavicoccus mobilis
MRTEGPPLTVVMISLNEQHNMEAVLDNLQGWAQEVFLVDSYSSDRTVDIALQYGAHVVQRRFRGFGDQWNFCLEKLPITSPWTMKLDPDERLSDDLKSALVETIEAGKAAGISMERRLWFMGKPLPVRQTLVRAWRTGRCRFTDVAVNEHPIVDGPIVHVPGEIEHHDSPDMEHWLEKQNRYTTAEAIIAHQQSPLADSPLLFGTALQRRMWLKRNFARLPLRFSLLFLYNWLGKGAWRAGWVGYAWARLRSDVMRMIEYKCREMEITGRVPRARYYGPGRADPRVKQFD

SEQ ID NO: 2513 - protein, 259 aa, Unknown
  Description of Unknown: Verrucomicrobia bacterium sequence
MSEQADARVPLSVLVPVKNEAANLRDCLASVSFAEEIVVVDSASTDGTQAIAEATGARVVQFVWNGNFPRKKNWALENIPWQNEWVLIVDADERVTPELEREVKEAIRRTDVDGFYLNRRFWFLSGWINHCGYFPSWNLRLFRHRLGRYEQIEIDDNLVSGDNEVHEHVLLNGGAEYLTAPMEHYAFPDIATFVEKHNRYSTWEAAASGKLHERAGEKTLRASPLGTAVERKRWLKKLTARAPFRPSLRFLYHYVWKQG

SEQ ID NO: 2514 - protein, 489 aa, Lucifera butyrica
MTTGISLCMIVKNETDTLAACLDSVKGLVNEIILVDTGSTDQTVELARSFGATVFSCPWQGDFAAARNFSLAQASGNWLLVLDADETLAPGSPAILLQEIRQPGVEGFYIPIRNFIADGHTYVADQAVRLFRNKPAYRFTGAIHEQVAGSIQDTNHGQGLAVSQATILHRGYLAAVIQRKEKQARNITLLKSALASAPSDPFLLYSLAAEYMQAEDFNQAENLLHQSLSHMHGTEGFGAPALYALLFCLYQNKKWEELSRLLADALRSNPENANLFFFRGLLAAASNDAPAALADFATAARQGADTVPRHYIATLCGNLCLALEDWPQAANWFLLAWQEQPRSPYVLEQFLFLNRQESVQINWEELASSYPGEPEEPLANPRLVWANWLLSILRFSAGATSAAACLDRKSGLPVPGGASLPPEWRYLTLVAAEIHGILLLCNNHPAYKPVCLTAKIRHTAIAGLEILSRLDSSDPKTLSELPPKERSSL

SEQ ID NO: 2515 - protein, 255 aa, Thermocrinis ruber
MGLSVLILTKNEEKNIKRAIESVKDIADEIVVLDSGSTDRTVEIAKSLGAKVFFHEWDGYPQQLNRGIGLCSEDWVLVLDADEEVSEELRNSISKAISSHTAEVYMVCRKTYYLGKFLEHTWYPEWRVRLFKKGLVRFEGDLHEQAVFKGKAHKLKGDLYHYSYENLYHQYEKTLKYAKIMAEAYHKKGRKFRFYNLLFNPLWSFFKVYFLQRGFLDGVRGFLVAFSSFFYTFLKYMFLLELELKEKYKENLWKR

SEQ ID NO: 2516 - protein, 255 aa, Unknown
  Description of Unknown: Bacteroidetes bacterium sequence
MEKLSVVIITFNEEHAIGRCIDSVKSIADEIIVLDSYSTDRTVEIAIEKGARVTRQKFAGYIEQKNDALALASFPFVLSLDADEAVDEQLGQSISQIKSSFPSPAYTMNRCTNYCGQFIRHGSWYPDKKLRLFDKRIARWGGINPHDKVIMDKAAQAIHLKGDILHFSYRSVDEHVQQNNRFSTISAAAIYGLGKRTNLFKIVINPFWAFLQSYFVRAGFLDGFYGFVIAINIAHLTFLKHVKLYLLQKPPEIVS

SEQ ID NO: 2517 - protein, 252 aa, Frateuria sp.
MPISACIITFNEADRIDDCLASLAFCDEVVVVDSGSADDTRERAQARGARVLVRPFDGFRSQKAFAVEQASHDWVLCLDADERVDATLRASIEAARAQDFAGAAGYRFNRLSEYFGAYLRHGNAYPDRVLRLFDRRRGGWRGRREIHEAVSVDGPVKRLRGDLQHHPYRSLAEQLAKQERYAQMMAEHLYAQGKRATLRQILLNPCWRFVRGYVLRGGFLDGWRGLLYALVRIEYVRRKFLKLWLMQHGQRP

SEQ ID NO: 2518 - protein, 342 aa, Butyrivibrio sp.
MVTISLCMIVKNEEACLGTCLKSLQGIVDEMIVVDTGSTDRTKEIARENGATVYDFEWTGDFSDARNYSFSLAKCDYIYAADADEELDEDNRKRFLKLKGDIDELNIDIVQMYYCNQLAFNTVYNYDRELRPKLFKRIRTFKWVDPIHEMVSLDPVICNSDVEIIHRPRENHAGRDLASFRKAISEGRAISNRLHGMYARELFLAGTDDDFIKAKEFFAASVKDNNRSIDEVKQACCVVAHAAVIEDDAETLLKYTLKDAITDMSSEMCYDLGDYYYKKRDLDEAVIWYFNAAYECTSILDIKKSRELPRLALARCYRELGNEEQARDYEREAQQVADNYIE

SEQ ID NO: 2519 - protein, 252 aa, Bordetella pseudohinzii
MTLSVIIITKNEAANILGCLESVAFADEFIVVDSGSTDNTVALARDFGARVEVTPDWPGFGPQKNRALDLATGDWVLSIDADERVTPELAQAIRGAMEDPRADAWEMPRLSWFCGRFIRHSGWWPDYVLRLWKRGAARFTDAAVHERVVPDSGRSARLGPHLLHYPYPDFDALITKINRYSSDAAAMMHAKGRRANVFTALGHSFWTFVRIYLIRRGFLDGRHGLVLAVTAAAGSFFRYAKLMLKSEPEPPK

SEQ ID NO: 2520 - protein, 259 aa, Bacillus sp.
MTGREPLSVVVTTHDNAATLDACLRSVSWVDEIVVLDSGSTDATLAIAAHYGARTHTQPFAGYSAQKQAAIDLASHRWVLLLDSDESLAAEAIPLLQQTLVMPTHAGYQLWRREWQFWRWQSMRSRLNHYVRLFDRQRARMSGHEVHESVLVDGTVGVLDAVIDHYGEADIAGRTAKANRYSTLQLVDLAPRRVSWLRLRMVAYPTVAFLRYYVLRGHWRSGWAGFIAARIHAFYAFLKYAKLYELRRRERPEAGRLDQ

SEQ ID NO: 2521 - protein, 256 aa, Unknown
  Description of Unknown: Chitinophagaceae bacterium sequence
MQLSVIIITFNEENNIQRCLNSVRGIADEVVVVDSGSKDNTKTVCRQMAAKVYDHPFRSYGLQKEFATRLTAFDHILSLDADEELSEELRDSISRVKLHWEKDCYSCHRITNFCGQWILHGEWFPDKVIRLFDRRKAKWIGNIHEKIVPYDRHNMGDLRGELLHYSYHSLNHFRIKSEKYAAMSARELYRQGVYPGFYHFYIKPAYRFLSAFLLRRGFMDGNAGYHIARLTADRVYMKYEKLKQMHEQKEDPSADI

SEQ ID NO: 2522 - protein, 298 aa, Unknown
  Description of Unknown: Zetaproteobacteria bacterium CG12_big_fil_rev_8_21_14_0_65_54_ 13 sequence
MHGVLLPVIRPNRLVYAIWTRRNKPVPVSILLLTLNEEQNLPACLDAISWCDDIVVMDSFSSDRTVELATKAGARVEQRKFDSFAGQRNFALQHIEFKHEWVFHLDADEIFTEALFEEMEKAIRNPCFDAYNIPSKMMFMGKWLRYSGMYPSYQVRLTRRPVFQFKMVGHGQRADIAVEKIGTLHEPYLHYSFSKGLDDWFERHNRYSADEARASLAHRLNEQVNWAGLFARDADQRRLAIKGLVFRLPFRPFFRFIYMFFLRFGFLDGMAGLTYCYLVTTYEFMISCKIREIQTLEK

SEQ ID NO: 2523 - protein, 277 aa, Mucilaginibacter paludis
MLDLTIAIPVRNEEVNLPGCLSAIGQGFVAEIVIIDSGSTDRTKAIANEFGAKVIDFVWDGKFPKKRNWFLRNHCPKTKWVLFLDADEYLTEAFKVELAAALNNSGDQVGYWLNYTIYFLGKQLRGGYPLRKLALFKVGAGEYERIDEQQWSKMDMEVHEHPILEGEIGVISSKIDHRDYRGVSHYVIKHDEYATWESERFLKFYNDPAIVKNFTWKQRLKYKLMGSIFIGPLYFLGSFFLLGGFRDGARGLAFAILKMAYFTQVYCKLKEKMQPQN

SEQ ID NO: 2524 - protein, 280 aa, Arthrobacter sp.
MTEVMGANMERSDIAVVILTLNESETIEHAISSVGWSDDVFVVDSGSTDGTVEKASKLGAKVLVHRQDGPFLITEQRNWAVKNLPTEKPWVLFLDADELSTPEFVQAILDEINSNTRIDGLYAAPAFMYHGVWLRRCSGFPNWHPRAVRRGSGLRFTGGVWEEFTQGYPLSNVQVPYVHNTNAKGLTDWLEKHDRYAKWEANMISEGVGRKSERRSLLRRLRYSLGALRKYFALIYLAIVRGGLLDGPEARSYLKRMFIYELLIDEHYREMTHLRRGKGL

SEQ ID NO: 2525 - protein, 264 aa, Paraburkholderia sp.
MNSPQTASASVQRASLGVAIIALNAQPRLAQCLEALRFADDIVVIDGGSADETVAIARALGARVVVEPDWPGFGRQKNRAVAALDTDWILSIDTDEVVTPELAASIRQAIDSPRAEVYSLDRLSSFCGHWVRHSGWYPDWVPRLFKRGAARFSDDLVHERLVFDGRIERLAGHLLHYSYDDFETVLRKVDAYSSAGARQRHAAGKRGGFARAVLRGFWAFVRTYLLRGGILDGRSGFMIAVFNAETVYYRFLKLHLARQGDRKH

SEQ ID NO: 2526 - protein, 261 aa, Unknown
  Description of Unknown: Photobacterium aquae sequence
MSTEKPTLAVALIVKNEADNLQQCLASVAGWVDEIVVLDSGSTDNTEAVARQYTDKFFVNADWPGFGPQRRLAQSYVESDYILWLDADERVTPELRASIEQVLAAPQANTVYSIARLSWVFGRYIRHCGWYPDRVNRLYPTKLTQYNEDLVHEKVELGDGITVSPLEGDLLHFTYNDLNHYLVKSAGYAKAWADQREKRGKKSSLGQGLLHAVGCFLKMYVLKAGFLDGKQGLLLSILSAHSTFVKYADLWIRTNTDPRTP

SEQ ID NO: 2527 - protein, 286 aa, Unknown
  Description of Unknown: Opitutae bacterium Tous-C1TDCM sequence
MSAACPISILIPARNERANLRACLESCRFAAEVVVVDSGSTDGTPDIAREFGATVVDFKWDGRFPKKKNWALAHVPWRHEWVFILDADERITPELAEELRRTVAAPEHDGYFVNRRFWFIDGWLKHSGYYPSWNIRFFRHRLGRFEQFSGADASGSGDNEVHEHVVFTGKLGRLRHDMDHFAFPTIDIWVEKHNRYANWEARLLASPAGADAANTAPLDPSLARKRRLKVLAARLPFRPTLRFFYHYVLRRGFLDGYRGFVFCRLMGFYEFLSTAKAAELRRSGRA

SEQ ID NO: 2528 - protein, 356 aa, Cohnella sp.
MKTISLVMIVLNESDKLKRCLESVHDIVDEMIVVDTGSSDNSKEIALSYRAKVYDFTWTQSFADARNFALSHSTSDWNLTLDADEYISNDCALAIRTFINRKDVEIGRIKKVNKVMHKDGESYENSYTSRLFPAGIKYSGRIHEQIDSDLPRVKIDVEVQHDGYFEIKKSDRNIPILQMELRDHPNSSYYLYQLAKEYNGLGNFAEANSLYKKAYRLISRREIYAPNLIVDYIYNIVAGGLYEEGIEVIQEKQQFIHDYPDYHFACGVFYLEYILSDVAKNAHLLNKIEESYLKCIEIGETEKYDSVIGTGSFVAYYNLGTYYEVVGNIKSAEACYRKSAEYDYQPALSRLQLLSL

SEQ ID NO: 2529 - protein, 299 aa, Sphingorhabdus sp.
MTLTVVILTKNEERHITRALASVSGIADRCVVVDSGSTDHTVELAVAHGAEVMKNPWVNYATQLNWGLDQLPHDTEWVLRLDADEIVTPELLTEITQKLRELGPQIEGVYVSRRMTFLRRPINWGGVFPVRVLRIFRYGKGRCENRWMDEHIQVEGATAEFDGEIIDDNLNSLSWWTEKHNSYASREVVDVLNLEYGFMPHETIANLQSGQQAGVKRWLKEKVYARLPGGLRAFVYFFYRYIVRLGFLDGSEGAAFHVLQGFWYRYLVDAKLFEVKKYMERTGSDVVTAIDHVLGIKVQ

SEQ ID NO: 2530 - protein, 257 aa, Unknown
  Description of Unknown: SAR324 cluster bacterium sequence
MRPKISATIITLNEEKNIEACIQSLQWVDEIIVVDSLSTDRTKEIALSLGAKVVDQKFLGHVKQKQLAVDHCQNDWVLSLDADERMTATLKESILQLFETTDPGQLLHGYTVGRRSYHLGRWIMHGGWFPDRKARLFNRKHGHWAGVDPHDGIVVEGASGDLPGSLDHYVFKDLAHNIHTNNFYSSISADILYQEGKASSFLKLLFKPPGKFIETYIIKAGFLDGLPGFIISVGAAYSMFLKYAKLWEHHCRRDKED

SEQ ID NO: 2531 - protein, 258 aa, Oceanimonas baumannii
MSRPTLAAVLIVKNEAENLADCLATLDWVDEIVVMDSGSTDATQAVAEAAGARFFVNAQWPGFGPQRRLAQSKVNSDWVLWVDADERVTPELRASIEEVLAAPAENTVYSMARLSWVFGRFIRHCGWYPDRVLRLYPKALTGYNDALVHEKVETGPGIRTVPLRGDLLHYTYRDLQHYLVKSAGYASAWAEQRQRRGKKSSLLQGLLHGVGCFVKMYIVKAGFLDGKQGLLLSLLSAHSTFVKYADLWIRTETAPPKS

SEQ ID NO: 2532 - protein, 270 aa, Paraburkholderia sp.
MSDIAKPDAISVIVIVKNEAHDIRACLASVQGWVDEIVVLDSGSTDGTQAICREFGATVVETDWPGFGPQKQRALETARGPWILSLDADERVPTALRDEILASVKANAADLFQLPRRSNYCGQWIRHSGWSPDYVTRLFRRDAARFSNDLVHERVLYSPDSRIAALREPLLHYSFRDFSDVLGKIDSYSTYGATQGAVRGKRGSLGKALMHGFWTFVRTWIIQRGFLDGKMGLVLAISNAEGTYYRYLKLMLLDTKQPAAAAPGDRASGR

SEQ ID NO: 2533 - protein, 258 aa, Unknown
  Description of Unknown: Photobacterium rosenbergii sequence
MKKHTLSVILITKNEADRVEACLQSVAPIADEIIVLDSGSTDETVDICRRYTDNVTETDWPGFGKQKQRALEKASCDWVLSIDADEALDGTMQQALTALLGQDVIEHTAYRLPWGVTLYGKTLRYGRSARSVLRLFKREGSQYTLDEVHETVIPATGSTGVMKGYLLHYTHRDYGHGLDKAAKYAWLGSQKYHRKGKKSHGLFLALLRAIWTFFLIYIIRRGFLDGSVGFIVAMTYAQVNFNKYVGLWLMEQDDKVKE

SEQ ID NO: 2534 - protein, 257 aa, Acidihalobacter ferrooxidans
MAREACSAVLVTLNEAARLPACLDTLRFADEILVVDSGSTDDTVAIAERYGARVIHQPWLGYGPQKHYAVEQAAHDWVLCIDADERLTPELRASIEEALTHDRAKACRLTRRNRFLGRWLRHGEGYPDYVVRLFHRAHAQWSDDDVHETVLTDETPLITLHGDLLHESETSVGAYLDKQNRYTDLQAAALFAQGKRAGVAKLLLSPLVRFIKFYVIRLGFLDGLPGLVHILIGCFNSFVKYVKLIQMHRQQTKGTPP

SEQ ID NO: 2535 - protein, 255 aa, Shewanella halifaxensis
MKKHSLSVILITKNEADRVEACLKSVVDLADEIIVLDSGSTDDTVQICQKYTSNISITDWPGFGKQKQRALDKATGDWVLSIDADEALDEEMKLALIKLLSQDNIKETSFRLPWGVTLYGTTLKHGRSARAVLRLFKREGARYTLDEVHETVIPAAGETGKLDGLLLHYTHRDYGHGLYKAGQYAWLGSQKYARKGKHSKGLAAALLRGFWTFFHIYFIRRGFLDGSVGFIVAMTYAQVNFNKYVGLWLIEHKRS

SEQ ID NO: 2536 - protein, 259 aa, Unknown
  Description of Unknown: Sodalis endosymbiont of Henestaris halophilus sequence
MSQRKRLSVVLITLNEAKLLRACLESVSWAYEIIVLDAGSSDETCHIAAQAGARVFQSTDWQGFGIQRLRAQAYANGDYILMLDADERVTPPLKRAIQAVLRQPDAKAVYSFARRNLFLGRFMRHSGWYPDRVVRLYARKHHRYNAQPVHESLEKGECGIIPLTGNLEHLTCYHLPTFQRKQLEYAESWAQEKHRKGYKCSMCTIISHTYCAFIKTWLLRAGFLDGKHGWLLAVVNAQYTFNKYATLWALHHVVKGNYH

SEQ ID NO: 2537 - protein, 248 aa, Frateuria aurantia
MSEPISVVITSFNSAATLDACLASVGWAEQRLVLDSGSTDASPAIAAHHRADFHRQAFAGYARQKQAAVDLARYDWVLLLDSDEALPVGSETLIRAALATGHARGYQLWRREWILWRWQSPRSRLNHYVRLFDRRHARLSDLQVHETVQVEGDVSRLAVVLDHLGQPDIAQRVDKANRYSSLQLGDLRQRRDTGVCWRLCLYSSVAFWRYYLWRGHWREGWAGYVSARIHAFYAFLKYAKLYEADRRD

SEQ ID NO: 2538 - protein, 284 aa, Nibricoccus aquaticus
MTAPPASDPMFSIVILTLNEEQNLPATLASIRDCDDIVVLDSGSTDRTHQIARAAGARVVVNRFENFGQQRNFAHTDIPFHHDWVFHLDADEQFTPELFAECVRLSSENPPALDGFFVAPRMIFRDRWIPRCTDFPAYQARFAHAKRFRFIQTGHGQREAPDMRLGKIQANYLHNLSAQSESELLDKHLRYARQEAAAFLARATDPAPLNRRIRSADPLIRRRALKELSHHFPARGFLRFLYQYIARRGFLDGAPGFAYCRIMAKYEHWVSQEIHRQRRARAST

SEQ ID NO: 2539 - protein, 261 aa, Vibrio ostreicida
MSMPTIAVALIVKNEAQHLKACLDTVYEWVDEIVILDSGSTDQTEDIARSYTDKFFVNAEWPGFGQQRRLAQSHVTSDYVLWLDADERVTPELKLSILSAMKENKPETVYQAARLSWVFGRYIRHCGWYPDRVLRLYPTQLTQYNDALVHEKVEVAPQMEVKTLQGDLIHFTYNDINHYLVKSAGYAKAWAEQREKKGKKSSLSQGILHALGCFLKMYVFKAGFLDGRQGFLLSVLSAHSTFVKYADLWVRTETAKMPDTY

SEQ ID NO: 2540 - protein, 268 aa, Unknown
  Description of Unknown: Rhodobacteraceae bacterium D4M1 sequence
MVHSPAGKAPLSCYIRTLNEERRIADVVRAALRVADEVIVVDSGSTDRTLELAAAEGARIVHQPFLGQGFQKRVGEEAARHDWLLDLDADEVVPPALAAEISALFEAGAPEGPVYALPMIICPPDGPAWEGFSISWRNKLYDRRSLRMPEHKRYDQLELPQGVTPRRLANPIHHFAFRDVANLVAKMNGSSSRGAEGSRRKGRGVLALRILFGMPAYMFQHVVLRGRWRGGLYGVSIGTVLAWGRWLRDVKMYELHRREQWRRRTPPE

SEQ ID NO: 2541 - protein, 257 aa, Paenalcaligenes hominis
MLSVIIITKNEEAHIVACLESVQFADEIIVLDSGSTDKTCELATAHGAQVHHTTDWPGFGVQKNRALALATHEWVLSIDADERVPEALAAEIQSVLRAPQANAYSVARLSCFAGRWIRHSGWWPDRLVRLFKRDAGRFKDVRVHESVVVEGLVAELRGHLLHYPYDSLETLITKTNFYSTAAALSLYEKGKHIPIAGIALKAFWTFIRIYVLRRGFLDGRAGFILAGVAASGSFFRYSKLWLLNRKTNWQPKPPPGE

SEQ ID NO: 2542 - protein, 295 aa, Bordetella sp.
MIKSTNTTGSSLAVVLITLNEGHNLRRCLDQIIGWASEIYVLDSYSSDDTVDIALEYGATVYQRRFRGFGDQWNFALRTFPITSAWIMKLDPDEIVTDELKASISTITDSSDSPDAIKLRLQLYFMGKSLPVFLEMTRVWRTGSCNFSGVDVNEHLLVQGKIAIAGGIIEHRDSPNLDHWIRKQNKYTTAEAKSQYEQKSLSVEPKLFGSALERRMWIKRNFWKVPGRYKLLFLYHYLYLGTWRAGRVGWIWSHLRTEVYRTWEYKKYEMDLLGGPGVDIPSAIGQPDPRAQQFD

SEQ ID NO: 2543 - protein, 346 aa, Unknown
  Description of Unknown: Anaerolineae bacterium UTCFX5 sequence
MAGRVRAEGRRNAPRRPKYVQNPPAERDQSVDEPHAAVRQVLSEVESRAGVEADRRGHGAQGESRARPRTAICLRDGALHSNRNAMTRLTAVILTFNEEANIADCLASVAFADARVVFDSGSTDRTAEIAREAGASVIQRPFDNYANQRNAALESVAGSSAWVLFVDADERVTPALAAAVRRAVDQGDAYAGWRIARHNYIFGKLTLGAGWYPDYQTRLLRCGAAHYDPERKVHEVVLLDGPLGTIDEPFVHINYTRFDQFVAKQQRYTAYEAGILYEQGVRPKLRNFILQPLRHFRWRFITLKGYRDGLHGLRLSALMAWYELRKYQLLAALWRDHDRRSASDPQ

SEQ ID NO: 2544 - protein, 250 aa, Achromobacter spanius
MKLSVIIITKNEAANIAACLKSVSFADEFIVVDSGSTDGTVELAQALGARVEVTADWPGFGPQKNRALDLATGDWVLSIDADERVTPELAREIQDVLANPRADAYEIARLSNFCGKDIRHSGWWPDYVLRLFKRGTARFTDAAVHERVVPAQGQPLKLQGYFNHYPYDNLDALINKVNRYSSDAAAMMYAKGRRTSVFGALGHGFWTFVRIYLIRRGFLDGRHGLVLAVTAAAGSFFRYSKLMFLAEKQK

SEQ ID NO: 2545 - protein, 253 aa, Unknown
  Description of Unknown: Alteromonadaceae sequence
MMSTPISVFLITCNEQETLPAVLRSVSMFAEIIVVDSGSQDRTTAIAQEFGAKVIHQPWLGFARQKAFAMQACTHNWCFNIDGDEVVPEAVAKSIQQQVDANEANGLRVYFEDFFMGQPMHRSSHKRSIVRVFKQDKTRYPQDRLVHENVTVDGPTQKVPGTIIHYGYDDVATYMEKQNRYSSLSAQEKFNRQKPYSLAKLMLVFPLMFFKEYVLRKQFLSGARGLVHATIDAMYAFLKEAKLYELHRRQKHK

SEQ ID NO: 2546 - protein, 301 aa, Unknown
  Description of Unknown: Proteobacteria sequence
MTLLSVVILTKNEELHIERALDSVQGIADRVFVIDSGSSDRTVELATARGATVLHKPWVNYATQFNWALDQLPQDTQWVLRLDADEIVTPSLAQEIDAKLHQLPGDVDAVYVGRRMNFLGERVRFGGLFPIRIIRLFRHGRGRCENRWMDEHILVQGATAQFAGEIIDDNRNSLTWWTEKHNAYASREVVDLLNLEHGFMASETVADLKGGQQAGIKRWLKEKVYARLPAQLRASLYFFYRFVLRLGFLDTSGGRAFHILQGFWYRYLVDAKLQEVRKHMRDTHKDAKTAIRDVLGIDLQR

SEQ ID NO: 2547 - protein, 258 aa, Pantoea sp.
MSQRQRLSVVMIARNEAELLPDALASVAWADEIILLDSGSSDATAEIARAQGAQVYEALPWAGYGKQRQRAQAFATGEMILMLDADERVTLALRRSIEQVLRQPPSATVYSLSRSNFFLGRFMRHSGWYPDRVMRLYPRHLSYNDNLVHESLETQGAPVVTLPGDLAHLTCRDLITFQRKQMNYAEAWAQERFQRGKRCGLFAIFSHTLGAFAKTLLLRAGFLDGKQGWILAVVNAQYTFNKYAALWALHHTSAQGRV

SEQ ID NO: 2548 - protein, 252 aa, Unknown
  Description of Unknown: Caldilineae bacterium sequence
MAERRPISVVIITLNEARNLPDCIASVDWADEILVVDSGSTDGTVALAEKLGARVIHQEWLGFGRQKQFATEQATHDWVLNLDADERVSTELARSIRAVLSASKSAAAYQCNFRHRLLGRALRHGEAWPDPHVRLYDRRRAHWADVPIHEHVLVDGSIESLPGWIEHCTADSIAEMIDKINRYTDIQAEQMLGRGIRARLAGFLFRPFWRFFRAYVLRLGFLDGAAGLLHAGQAALTTFLKYAKALELQQRQ

SEQ ID NO: 2549 - protein, 271 aa, Paraburkholderia nodosa
MNDSAKPDAISVIVIVKNEAHDIRDCLASVHGWVDEIVVLDSGSTDGTQAICREFGATVVETDWPGFGPQKQRALDAARGPWILSLDADERISALLRDEILASVKTSGADLFRVPRQSNYCGKWIRHSGWSPDYVTRLFRRDAARFSNDLVHERVIAAPEARVGTLAQALIHYSFRDFSEVLGKIDSYSTYGATQGAARGKRGGLRKALLHGFWSFVRSWIIQRGFLDGKMGFVLAISNAEGTYYRYLKLMLLETQQSAAAKARDAAPESR

SEQ ID NO: 2550 - protein, 258 aa, Unknown
  Description of Unknown: Enterobacterales bacterium CwR94 sequence
MMAQQRLSVVMIAKNAEALLPACLDSIDWADEIILLDSGSADKTCELAAARGVKVYQSTDWPGFGKQRQAAQHYATGDMILMIDTDERVTPALRHSIERVLATPTANTVYSIARRNLFLGRFMRHSGWYPDRVIRLYPAHYHYNDNLVHESLDVQGAQVVPLQGDLKHLTCRDFGDFQRKQFTYAEAWAQERFLRGKKTSIAAIFGHTFGAFLKTLVLRAGVLDGKQGWILSVVSAQYTFNKYAALWALHRIKAQEES

SEQ ID NO: 2551 - protein, 272 aa, Chitinophaga skermanii
MNMPMQFTPVPISCYILTLNSQKHLQTVIDSVKTAVDEIVILDSGSKDDTEKIAAANGCRFLYRKFDNYRDQRKYGVDACTHDWVFSLDCDEVASPEFAQHLISLKDTLNDTIGNLPADEVVYVIMRDWYAFGRKVHALFPVVSPDYPIRLFNKKKVHYTEKSNIVHEEPQGYQLKKTLQGRVHHYTFETKAELYKKLDAYSSFDAQMKLIKGWRSNPFKAWFSPIKYWIKFYVFYGNWKDGKTGLLLAKYGYDYKRLTYSKLKKLQSQKQP

SEQ ID NO: 2552 - protein, 268 aa, Unknown
  Description of Unknown: Gammaproteobacteria bacterium HGW-Gammaproteobacteria-2 sequence
MGVTGTERPLPISGVVIAKNEADRIERCVRSLIGLCAEVVVLDSGSSDDTVARALAAGARVEHQEWLGFSSQKNVAVSRATQPWVLLLDADEWLVPSGARRVRELFERRPDGNALIERADIWRLLRRTRFLGRSLRHGGWGNEAVERLFRVNCRYLPARVHESLDRRGKKVLRLPARIEHDTARNQAEYEAKLDSYAELFARQRHAQGIRGYWIDAWLHAGAYWLKNYWFRAGFLDGRAGAIYHYLHSRYVFRKYRRLWQLRDAAIEP

SEQ ID NO: 2553 - protein, 279 aa, Methylocaldum marinum
MSVSILILTFNEEVNLPACLESVAWSDDIVVFDSFSTDATVGVARAAGARVFQRAFDDYGSQREAARVGVEYKYPWVLALDADERVDDELREEILRLVSSPSSGDHAAYRIRRKDHFMGQWIKHSTLYPSWFIRFYRPETIRYEARAVHEYPQINGTVGELSGHLVHHSFNKGLGEWFTKHVRYAQLEATENLRHMDDSSVDWRGLVSVDPVRRRRALKSLSFRLPCRPLFRFVYMYLLRRGILDGYPGFTYCCLISVYEYLIVLNIKEQRRRTQGVPF

SEQ ID NO: 2554 - protein, 271 aa, Unknown
  Description of Unknown: Candidatus Rokubacteria bacterium sequence
MNLVNRIPGSVCILARNSGATLRRALESVRDFDDVVIADGGSTDDTCRIAREFGARIVPQDPACLDGSGRIRDYACARNGAVRHARHDWVLYIDSDESVSAGLVEEIRGIVARGSEKWAYRVPVRIILDGREIRGSSNYPGWQTRLFRRSSGLSFVKPVHERLDITVHDPRVEECRNPWFVHWTRDYTRHYLRHNMKYIGMQAAHSAHAPLVSVLRANLVVAAKVIAKTGINYVRCRGRDTLPLSAEAGRAAVPLILCILSVRERLRRRTQ

SEQ ID NO: 2555 - protein, 372 aa, Anaeromassilibacillus sp.
MITISLCMIVKNEEDVLERCLRSAEGVADEIIIADTGSTDQTKEIALRCGAKVYDFVWKDDFAAARNFAFSKATCDYLFWLDADDVVPEQTRRGLLLLREKLDPSVDMVMLPYHTAFDAAGRPTLIFYRERLLRRAKGFRWEGEVHEVIPPSGRRISLPLPIEHRKLKAPETGRNLRIFEGLLKKGKSLTPRQQLYYARELVGAGRDPEAAVWLKRFLDERGGWLEDNIRACLDLAACRERLGDWEGALNAVFSSFVFDSPRAEACCAAGGLLQSRGDYRRAAYWYRTAIDCPPPDNRFGFYNPDFAGFFPLMQLCVCFDRLGETETAYDYHKRAQALKPEDPAVLYNERYFEGLGFPKAQQPPCQKAEKPV

SEQ ID NO: 2556 - protein, 253 aa, Unknown
  Description of Unknown: Muribaculaceae bacterium sequence
MPRHISVTIITHNEADRIEACLKSVAAVADEIIVVDSFSTDFTADICRRYGCRVVSRSFEGYGQQRQYATSLTSHPYVLSIDADEVLSPALIASILKEKEQGFNHRVYSIPRLNFFCGQPVRHCGWYPDYQVRLFDKRYANWNMHSVDERVVFPPGLQPCRLDGDILHYRCSTTSQYTRVRLRQAALAAGQIAQKSSFISPITPVVKGICAYIDMYVGQQAFLDGPEGRAISRISFLSTYTAWRIARKHRHKA

SEQ ID NO: 2557 - protein, 253 aa, Unknown
  Description of Unknown: Candidatus Thermofonsia Clade 2 bacterium sequence
MKLVAIILAHNEAEHIQDCIASLLWTDEVVVFESGSTDDTVALAKAAGATVITHPFEHFAAQRNAALQAVDADWVLFVDADERVTPELAKEIQSTLQNPSYMGYNIPRHNYIFGKLTRHTGWYPDYQLRLLKRDSAHYDPNIRVHEVVILADNASAGYLQNPLIHYNYRDLAQFIRKQRYYAKLDAEIWYHQGIRPKPRNFILQPLRAFKRRFITWQGYKDGWHGFRLSVLMAWNEWDKYWQLWKLTRQRDTR

SEQ ID NO: 2558 - protein, 287 aa, Xylella taiwanensis
MRIEREDHTPQSEAAVLLPMSLVVMTYNEAANIARCLDSVPFVSEKLVVDCGSADDTVAIARAHGARVIEQPWLGFGPQRNFASGQAAYDWILVLDADEFLSDTLRAECLRRLPALLAEDRLAAIWLRRSTWYMGAPMRWYRPMVGERLARLYHRDRARWSEVRVHESLRFDAPSAEFMAPFNHLHNPTLVHKYLKVLRYAELKALDWHSKAQAARMWQAPLVFVAAFLKDYVLRLAMLDGWRGFVVAQTAASYALYKRMRYYEMLRNPDSIQQAHAHLCKHRLEHE

SEQ ID NO: 2559 - protein, 261 aa, Unknown
  Description of Unknown: Sinobacteraceae bacterium sequence
MSLPLSVTVITLNEERNLERCLASVQALAAEIVVVDSGSTDATQAIAERFGARFVFNAWPGNVAQNAYATALCTHPWVLSLDADEALTPELAAEIRHVLTEGFEGVDGFMLTRRTQYLGAWMWHVWYPERRLRLVRRDAARWVGPDPHGRVEVAGRTQRLKHDFLHYTYRDLDDQYRKLLSYAHSSARERYAQGKRMSPVKLLLSPWFRFLRDLILKGAWRDGWRGVLIAWAGAFSSFLKQAYLYELEHEAQRHDAPHQRK

SEQ ID NO: 2560 - protein, 272 aa, Unknown
  Description of Unknown: Halomonadaceae bacterium R4HLG17 sequence
MSTQAAPDAAKPAITGVVITLNEAHNIEACLASLSRVCSELIVVDSGSTDDTRERAERAGARVIEQPYLGDGPQKNVGPGQASHRWVLSLDADERLTDEAVKIISALDLNADNHDAYALRRRNFIGSRWVKRCGWYPDYCIRLFDRERTAFSDSRQHASVQAKNPKRLDADLEHYSFANLGELFTKASGRFSNRAAKIMYLKGKRASALSPLTHGANAFVRKYVFQGGFTAGVDGLSVALSAAVNAYLKYAKLLEFQRDAKVRDAENFDKVW

SEQ ID NO: 2561 - protein, 369 aa, Ralstonia pickettii
MSKHAKHRAKPARGSLALVVIARDEAACIERCLMSAKRHVDRMIVLDTGSTDDTVAIAKACGAQVHHFTWVDDFSAARNAALDAANADWNLVLDADEWIESGTDELRDACTFGPLLGVVCIRSGFEVSGKVEQSNSWIARLLPRGVRYKGRIHEQPDADLQRVRLPLVIGHDGYLDVKLDKKRGRNHTLLQLELAARPDDPYVLYQLGKDFQINQGDAAQAATHYRRAVATAPKQSPYRHDLCICLLACLSQTGQLDEAITLAGEWMDEWSGSPDYFYLLGHLMFEAAAKHPAEAEKQWLPMAENAFLKCLEIGEQPKLDAAVFGRGSFAAAKYLALTYRALADTLAIKSNQYSDLARQMQERSAVAAA

SEQ ID NO: 2562 - protein, 361 aa, Unknown
  Description of Unknown: Aquabacterium olei sequence
MYRTALVLIARNEAHCIERCLNSLRPWVDQMIVLDTGSEDDTPARAAAAGAEVHHFQWVDDFSAARNAALAHSQADWNIVVDADEWLDSGGEALAGLRQQHPDFVGALFVNSSFDTSTSGVSAHAGSWISRVLPRGIQYEGLIHEQPRHALPVVRLPVTLGHDGYERAAMDHKGNRNALILQRALQSEPDNAYLLYQAGKDHEVHDRFEAAHAAYVQAWARCDPGAPWRHDLLIRHLFVMKQVGALADALALAEQEMPYWMHSADFFFTLGDLLLSQAVAAPSEASVILPVIESSWQRCLELGDTLDLEGSVAGRGSHLAAHNLMVFHESLGQAEPAAYYRDLAERLKSTNAVSSHSSGRR

SEQ ID NO: 2563 - protein, 277 aa, Unknown
  Description of Unknown: Alphaproteobacteria bacterium sequence
MPVSVVILTFNSEATIAATLASAATVSDDIHVVDSGSTDRTLELVRAAGATLVQHPFESYGAQRNWAIDTLALKHGWQLHLDADERLSDALVAEITALAATNFAGPAVGYFIPRLVHFLGAPIRHGGMYPIYHMRLFQTGRGRCEARRYDQHFLVDGPTAQLTQPMIDDIRMSLSEWTVRHNRWSDAEADESRLGTDPGALVKADAKGNPVEQKRALRSRYNAAPKFWRALGLFLYRYIIRGGFRDGVPGLIFFVLQTFWFRFLVDAKLWERENAGG

SEQ ID NO: 2564 - protein, 259 aa, Unknown
  Description of Unknown: Rhodocyclaceae bacterium SHINM1 sequence
MSEKLPLSLVLITCNAASRLRDVLASVPFASEIILVDSGSTDETAAIAVEFGAQVVHHPWAGFGPQKAHAVSLASNDWVLCLDADEALSPRLATSIQRAFSKGLPDYPVYRFARCNVFMGRPLKHGEGYPDYNTRLFRKDAARWSDDIVHEHVLSDLPPRTLEGDLLHYSADDLKAYLDKQNRYTSLAAERAMARGESAPLARMLLSPVTRFLKFWLVRGGWQDGLPGFVHIAIGCQNSFMKYVKLRELRRQAGLSDQE

SEQ ID NO: 2565 - protein, 273 aa, Unknown
  Description of Unknown: Opitutaceae bacterium EW11 sequence
MFSVVILTLNEERNLPGCLSSAFSASDDVVVLDSGSTDRTKELARGAGARVAVHAFENFGAQRNHADHAIEYRHPWVFHLDADERFTPELIAECQARSEENPADVDGFWVAPKMYFRNRWIRHCTDFPAYQARFVSPQRFQFVQFGHGQREHPEMRMAKIRANYLHDLSADGDDALLEKHRRYAREEAEQALRSSTTEQLRLSALFASDALVRRRALKTLSHRLPARGSLRFLYQYGLRGGFLDGRPGFAYCRLLARYEKWVADEIRRQRHSK

SEQ ID NO: 2566 - protein, 257 aa, Bdellovibrio bacteriovorus
MLSGVTKLPISLVIITLNEEANIERCIRSAPFVSDVVVVDSFSSDATPEIAKACGARVFQEAWRGFGPQKAFATEQATQPWILSLDADEALSPELAAEIQSKFSELDPKAGYMIPRRSFHLGRWIYHGGWYPDLQLRLFNKDHSQWNAAAVHEKVEVQKVLQLKNDILHWVFKDLSHQVITNDRYSSLGAAELESRGQRFSIFKLLFKPFGKFVECYIMKAGFRDGVPGLIIAMGAAYSLFLKFAKMWEKEHVRKNS

SEQ ID NO: 2567 - protein, 303 aa, Unknown
  Description of Unknown: Acidobacteria bacterium sequence
MPERPTVPVTVIVLTKNEAANIDACLDAVRDWATAIFVVDSGSTDDTRERARRAGAEVVVHPFETHSAQWQWALDHLPIPTEWVLALDADQRVTPELREAVAAALAGPEAGRYDGFFVNRRQVFRGRWIRYGGYYPKYLLKLFRRSAVTLDARELVDHHFHVRGTTTRLRGDLVEDNRNEAAIGAWVDKHNRYARLQAIQELRERREGGSRGRFFGSPDERVNWLKARWRRLPLFVRPCLYFIYRYVIRLGFLDGREGFVFHVLQAFWYRLLVDINISELAGEAGSDRDPVAEEGRREAQVRA

SEQ ID NO: 2568 - protein, 277 aa, Streptomyces sp.
MTRLPIVVAIPTKNEAANIATTVRSAIGHFAAVVVVDSDSTDDTRALAKAEGAEVVPYTWDGRYPKKKQWCLEHVRPDLPWLLFLDGDETPSAELLLELRRIFLDGREVRPAAFDIPLRYWFAGRRLRHGYTIVKRALLDRTRTRFPEPDDLAAPGMGEQEGHYQPLAEPVFRLRAPIEHLDLDPVRTWFERHNRYSDWEAWLELHPEVREQIRAAKTRQGQVFHRAPFKPLLSFGYSYLFRLGFLDGRAGLDYALAMSFYRWQIGLKTREARQDTG

SEQ ID NO: 2569 - protein, 290 aa, Phycisphaera mikurensis
MVPVSVVLLTHNEAGTLPAALASCRWCDDVAVVDSGSTDETRSLAEATGARVFTNPFESFGRQRNWAIDHAEPRHKWVFHLDADEEFTPALVEEIRRFVASPDADTVDGLHVAHKLMLHRQWLRYAGGYPVFQMRFFHADRMRFIDHGHGQRERPGGRIGRLGEPYLHHAFAKGMEAWLAKHNGYARREAEQARRAVEGEAAGLAALLSSDGVRRRRAVKSLFQRLPARPTLRWLIVLVLQRGVFDGRAGWTYASMLRVYEQMILLHARALADGEGTSPPPDDATAGADS

SEQ ID NO: 2570 - protein, 245 aa, Trinickia caryophylli
MIAFNSAARLAQCLEAVAFADEVVLVDGGSHDATVAIARAHGARVIEAPDWPGFGPQKNRALAALSTDWVLSIDTDEVVTPELARAIVEAIGSAHANIYALDRLSSFCGTWVRHSGWYPDWVPRLFRRDAARFSDDLVHERLVFEGPAARLAGKLLHYSYEDFETVLRKLDAYSSAGAQQRLAAGKSAGFAQALWRGAWAFVRTYVLRLGFLDGRTGFMIAVFNAQTVYYRFLKLAWATRRGDRH

SEQ ID NO: 2571 - protein, 314 aa, Unknown
  Description of Unknown: Chloroflexi bacterium sequence
MTDTRIHRSRRDRTLDRTAAGRSRGAAGRRRIGLSRGPPLVLGRDRQRLRRDVRRSAAQEGEDVVEKKSPTLTVVILTLNEERNISECVASARDADEVIVVDSGSTDHTQELAAAAGAKVVEHAMTNFAEQRNYANTLAKCDWVLHLDADERITPELLQEIRSVTATGEEDGFNVPTLNIIFGAPLRHGGWYPSYHVRLQRRGRAGWGKDVHETAVVTGSLGRLRNPIVHHSHPDVSAFILKLDRYTGMEAAQVGGSRLSLALRAVLEPGPYFVYKYFVQQGFRDGWRGLSIALLLAFYRCVGYLKALELRSRA

SEQ ID NO: 2572 - protein, 278 aa, Streptomyces avicenniae
MTRLPIVVAIPTKNEAANITGAVRSVAAHVEAVVVVDSDSTDDTRALAKAEGAEVVPYTWDGKYPKKKQWILDHVRTDTDWVLFLDGDETVGGELLAELRRIFLDGRQVRPAAFDIPLGYWFAGRRLRHGHTIVKRALVDRSRVRFPEPDDLAAPGMGEQEGHYQPLADPVFRLRAPIEHRDLDPVGTWFERHNRYADWEAWLETHPEAREEIRTAKTRQGQLFHRAPLKPLLSFGWAYVARRGFLDGRAGLDYALAMSFYRWQIGVRAREMRRDTDT

SEQ ID NO: 2573 - protein, 640 aa, Desulfotomaculum reducens
MGNRISLCMIVKNEEGNIRRCLASVTGVVNEIIVVDTGSTDNTCKIAREMGARIYSFEWNNNFSDARNFSLAKATGDWILFLDADEELAGESREVLVKYVADEQVEGYFIKIINYLGKEGWTETCPDLVFRLFKNRSQYRFRGAIHEQIADVILEKNKQATYRIAEDIIIIHYGYLDSQIDQKDKKNRNLHIIQKEMVENPGNYLLKYHYGVELYRAERYGEAAEVLIQAANNTDSSTIYFPKLLRYIVLAYHSGGQPAKALDVIRQGLQLFPNYADLHYYGGLSLLQLKHYHKAVELFLQAVALPEQPPQYASFAGVRGFRSLYHLGEIAEVFLNYEEALRYYLESLRDNPGFQPALERIIKILKPRENPEYTRECLEKVLDFSSPQATLILSNIFFQQGAYKLTLEFLERLIRMGNSSAEILFRKSFCLIQERRFLEALRILNEYTADSYIYPLAKFNQILCFWVQGKKRKVRSLVQEIRTLEPAEDTESILRLLLRSQEKRKYVHRIFLGKDAVTLLLDIVGRLLYLSELTRVEELFSRVDPKCLGDRMLDIIRLYHEHGYYEKTVELLQEYIEANQNGEAHFLLAETHRELGDFIEADHHYRYAIELDPSQPRYYISQSKLYEDRSEKIKGEVPLE

SEQ ID NO: 2574 - protein, 254 aa, Hahella chejuensis
MSPDPKLLSVTIITLNESARIKACIESIAFADEIVVIDSGSDDDTREIAKSLGARVIEKSWLGYGRQKQFAVEQAANDWVLCLDADERVTPELAKEIREVMQNPAYSGYVMPRRNRFMGRWLRYGEGYPDLSLRLFDRSKGRWSDDPIHEKVVLESEAGRLSGDLLHFSEDGVAAYLEKQNRYTTLQAHELKRRGKKFSHAQLIFSPLFRFIKFYFLKRGFLDGAPGLIHIVVGCMNSFFKYAKLRELGLNEDR

SEQ ID NO: 2575 - protein, 262 aa, Salinicola sp.
MANITGVVITLNEADNIEACLASLGRVCQELIVVDSGSRDATVALAEACGARVISQPYLGDGPQKNVGPAAASHRWVLSLDADERLTDAAVTTIGALDLENTPHDAFALRRRNFIGSRWVKRCGWYPDYCLRLYDRQRCAFADSRQHSSVQASQPYRLDADLEHYSFANLGEMFGKASGRFSNRAAKIMYLKGKRANAGSPALHGANAFMRKYVFQGGFLAGLDGLSVALSSGVNAYLKYAKLLELQRDARVRDAEDFDKIW

SEQ ID NO: 2576 - protein, 253 aa, Unknown
  Description of Unknown: Bacteroidetes bacterium MED- G21 sequence
MNVSNKITGIIPTFNEENHIEAAIDSLNFTDEIIVLDSFSTDTTVERAKSKGAKILQRKFDNFSSQKNFAIENASHSWIFLLDADERVSNELQKEVLEIISKPSKYSAYWIFRSNFFMKRRIKYSGWQNDKVIRLFIKEKSHYNGKLVHEEIQTQGEIGWLKNKLDHFTYKGFNSYIQKKNHYAQLQAKELAEKGLKPGVFHLLIKPLYRFINHYFLRRGFLDGTEGLFIAIFSAYSIFARYVNLWLLNRGLK

SEQ ID NO: 2577 - protein, 262 aa, Burkholderia pseudomallei
MTEPTLGVALIARNAAARLAQCLDALSFVDDIVVIENGSSDDTVAIARAHGARVITTDDWPGFGIQKNRAVDALSTDWVLSIDTDEIVSPELANAIRAAIRAPLADVYEIDRLSSFCGRWIRHGGWYPDWLPRLFKRGAARFSNDLVHERLVFEAPSARLPGKLFHYSYEDFETVLRKLDTYSSAGAQQRLAAGQRGGLGKAILRGTWAFARTYLLRLGFLDGKAGFMIAVFNAETVYYRFLKLDHAGLRRETPRSTRDSVN

SEQ ID NO: 2578 - protein, 351 aa, Castellaniella defragrans
MNPPTIALVMIVKNGAATLARCLSSVQGHIDELIVLDTGSTDDTVAVARRFGARVHHFDWVDDFSAARNAALDHSAADWNLILDADNWLESGHEQLRRLGSAPFLGQVAILNRFVQGGEVRQATEWTTRVLPKGVRYVGRIHEQAANPGNLPRKRLDIRVGHDGYMPEGLEAKKGRNEALLRVALAEVPEDPYLLYQLGKELALYDRHEEAADHFSRAVSLCARDQSFRYDLIMRALYCLKRAGRLEQAILLAEEEFPYWQDSPDYFFCVADVFLDWAIRHPAEAESQFLPIVESSWLKCLEIGERPDLSESVAGRGSYLAAQNLAVLYENTGRAALAAEYRKKAGEMREG

SEQ ID NO: 2579 - protein, 336 aa, Sphingomonas parapaucimobilis
MLPPAPRIAATLIVRNEERCLARCLESVAPFVDRMVVLDTGSTDRTVAIAQAAGAEVHHLPWPDDFAEARNHVLACADADWNLMLDADEWISAGGEQLRRWCAGPPRLGSVCIENETDGSAQPTRSWIPRLLPRGTCYEGRIHEQVVSSLPITPTPIHVGHDGYLAAQKAGKIDRNYQLLQRELAEQPDNPYLMFQFGMEAQARRDLPTACDYLKRALATAPREAGWRHPLVTSAMTLMAYMGRRDEALALADAEFPHWQHSPDYFCVLGDILFDQALAEPAQAIGHWLPLAQAAWERCLAIGERPDLDGSVAGRGSYLAQQSLDIVRSQLATLAA

SEQ ID NO: 2580 - protein, 295 aa, Unknown
  Description of Unknown: Rhizobiales bacterium sequence
MTVSALIMTFNEEMNLPACLESLAWCDDIVVLDSFSADRTVEIAKAAGARVYTHAYDTEDRQRMYGLTEIKFKHGWVYTPDADEVTPPDLRDEMLAIAADPDRPEVFFKARYKNMFMGRWIRHASLYPTWITRLVRPDRVRFERSVHSRASGGPGGELQAHFVHYSFNKGLEAWYAKHNRYSSVEADLSAARLLERSIDWGGIFSTEPERRRRALKSLSYNMPFRPSLRFFYMYVLRRGFLDGKPGYLYCRLLAAYEFMIVVKMEEQRSRQNAQPARPSVQQRTLDAKEPERRMV

SEQ ID NO: 2581 - protein, 259 aa, Oceanisphaera arctica
MSSRPTLAAVLIVKNEAENLADCLATLDWVDEIVVLDSGSTDTTREVAEAAGARFFVNDHWPGFGKQRQIAQAHVQSDWILWVDADERVTPELKTSIEAILAKPTTNTVYSVARLSWVFGRFIRHCGWYPDRVLRLYPKALTGYNDALVHEKVTLKKGIKTKKLKGDLLHYTYRDLEHYLVKSAGYAAAWAEQRQQRGKKGSLCQGLLHGVGCFMKMYLLKAGFLDGRQGLLLSLLSAHSTFVKYADLWIKTETRGPRA

SEQ ID NO: 2582 - protein, 337 aa, Motilibacter peucedani
MLSVVLIVRDEAAALPGALRSLEPLRDAGLLDAVRVHDTGSTDATRELAGAWGAQVASGPWTGDFAAARNAALEGVSSGWVLSIDADERVEADVDALRALLTAGRADAYAVSIRNDADSGAWTHRAERLFRPAVARWEGRVHERLVARTGAGLPVADVPAGVLHLDHTGYATGEVRAAKSVRNVALAQADLDALAATPHPDPARVAQVLLDLGRSLVGADRLQEAVDAFEALRSLAPGTPQALQGTDAFARLLLGAGMDSVVLHLVGELRAGGAPRAYCDWLEAQALAQLGQVERAHDLLQGVDEVVDTAGRRHPQAQLDELRSLLRSLRARVPQPR

SEQ ID NO: 2583 - protein, 407 aa, Unknown
  Description of Unknown: Armatimonadetes bacterium sequence
MPTQVSESPDLPRLPSACSIVFRRMKNTLSLCLLVRNESANVGKAIESFEGYVDEVVVVDTGSDDDTREVALSHGARVLDFPWRDDFAAVRNFLFSHARCDWIFHLDADETLLPGSREEIRNLVGRPEVQGAYVLRQDLFSADDPSQFTEMLQLRLFRSGELPQQVGRCHPHFEPPLEDVARTSGRQVVLSNVWLRHTGYVAELKPTKLERSARLLELELQDRPGQFYYQVELAMTLLQLGSDRATAALHQACVSLRPHLAAPTAPSHQAALLFEILLQIQDHNLPGGWSKDQVRELSARWFPNSAPLTWLRASYEFREGRFESARATLEHLEAMADNESYDKTTSFHPSILGPELHLNLGVCYARLGKLNEAIACFERLRNTQFADFAEQNLAAIRDLQRQFESEA

SEQ ID NO: 2584 - protein, 266 aa, Unknown
  Description of Unknown: Cytophagales bacterium sequence
MNTTTNLSLSVVLITLNAERTLSQTLTSVSSLADEIVLIDSGSTDDTLTTAKTFGCRVFHRLFDGFGPQKKFAIEQATHDWVLLLDADEALDPKLQQAIRETLTHAPDSHAAFSLPRSLVFMGRPMLHGGENHRPVVRLFNRQHTHMTNALVHETLMTSGPVTSLKGTLWHDSYGSLHDYIGKMNQYTSLNARQSERVGRRPGPLDVSVRFVFKFLKVYFVKGSILDGLPGFVWAFFSAVYPVLKYTKLYEQQVGQGYSPSPAMSY

SEQ ID NO: 2585 - protein, 258 aa, Ferrimonas sp.
MNHHHRPRLACALITKNAGPRFAEVLASVDWVDEIVILDSGSSDDTIEVAERAGAKVFQSEDWPGFGPQRQRAQQHVSADWVLWLDTDEVVTPELRQSIEAVISSEPDPSIAYEVNRLSDFFGRFIRRSGWYPDSVVRLHATNRYHYNDALVHERIEVPKGKLKSLSGDLLHYTSDDYRGYMAKSLQYADAWAEARHAKGKRTSVAGIIGRSFWCFLRKYLLQLGFLEGRHGLLLALQSSHYVFNKYFGLWVRQNKLK

SEQ ID NO: 2586 - protein, 304 aa, Unknown
  Description of Unknown: Candidatus Roizmanbacteria bacterium CG11_big_fil_rev_8_21_14_0 _20_37_16 sequence
MKKLSLALATYNEELNIVDCIKSCKGLVDEVVVVDGSSTDNTASLALTEGATVIRTQNLPMFHINKQKAIEACASEWILQLDADERVTPELAAEVRQIIQMTNEEINKYQENLKEKKLFERHQKLVMKHVTCNTQHKKQDKENVTCYMLHATCKYNAFFIPRLNYFLGGYLRSGGVYPDGVIRLIRKGKAYLPCRSVHELIEVEGRTGWLANPLIHKDSPTFQRYLERNSRYIDYLVEELKAESLKLKAKNKGFQLSTFSFRLLQGIDWIIIKPIVTFFSLLIRHKGILDGWRGVVFAFFSAIR

SEQ ID NO: 2587 - protein, 258 aa, Unknown
  Description of Unknown: Xanthomonadaceae bacterium AQ6-296 sequence
MSTGLNRSGLSACVITYNEADRIEACIASLAFCDEIIVVDSHSTDATRALAAAAAARVIERDWPGYRSQKQFAVETATHDWVLCLDADERISDDLRDEIIALRESGFLGASGWKFPRCTEYFGRYLRHGNGYPDRVLRLFDRRTGAWAGREIHEHVEVQGAVARLRGELLHNAYRNLADQLRRLENYACLMAQHMHAKGRRAHWWNLLLNPGWRFFRGYIFRGGFLDGWRGLILAYIEANYVRQKFIKLWLLNHDEKI

SEQ ID NO: 2588 - protein, 253 aa, Marinoscillum furvescens
MDTPLSVVVITHNEELRLEACLQSVAGLSDELIVVDSFSTDDTKNIALRHGAIVFEHAYKGQVEQKQFALTKTSHQHVLALDADEQLTEELIQSIAREKKQGFPAGVYEMNRITYYAGTWIKHGGWYPDWKLRLWNKSKAKWGGRNPHDQVFPKEIKEVKRLQGHLLHYGFETIAEHKQRITNYAEIGAEALYAEGKSSSILRGVLSALIKGIRDYIFRGGFRDGKSGWLIAWYSMKGKYLKYKKLYELNKRQ

SEQ ID NO: 2589 - protein, 300 aa, Robbsia andropogonis
MEVPASAPERSTLGVALITRNAARHLAACLDAIDFADDIVLLDQSSTDDTVDIARTRGARVITAPDWPGFGVQKNRAIALLATDWILLLDADEIVSETLRASLQQHCQSVHSTMEVPDNAPPVVYALDRVSSFCGQWIQHSGWRPDVIPRVFRRGNACFSDDRVHERLLYDAPVRTLDGELLHFSYDNVDTVLRKIDQYAAEGARQRFERAPGARPPSIGKAWWRAVWAFTRTYLLKRGFLDGGAGLTIAVMNAQTVFYRFLRLREQLIAVRSPVHPDASGIDPSAESMPKLKDDKKSMS

SEQ ID NO: 2590 - protein, 330 aa, Blastomonas sp.
MIVRNEARCIARCLDSVRPWVDKMVVLDTGSTDNTIELARQAGADVYEMEWPGSFAEARNRSLELADADWNLVIDADEWIESGGELLRSWCQTPHRLGVVCQRSAFELAGVKGAQPEGQHWITRILPRNVRFEGRVHEQAASTLPRVRVDLYLGHDGYLDAQLDTKRDRNGSLLLLDLEDSPGDPYILYQLGKETEVRREFAAASEYFRQSLAATPADANWLHCLSTRYLYCLGQVGDFDTAFAFADQFMMRWEKSPDFFFVLGNLALDKGMTDPANALDEWIPLAVSAWERCLEIGDQPLLEGSVHGRGSHLARTNLDAIRSQLPGLAA

SEQ ID NO: 2591 - protein, 261 aa, Unknown
  Description of Unknown: Acidobacteria bacterium sequence
MIVALNQISAVIICCNEEAKIEGALKSLQGIADETVIVDSGSHDRTIDICRHYTDRIFQKHWEGYRRQKQYATDQARYDWTLSLDADEVVSPELHSELTQWRCAPPEHHAGYFLPRKTYFMGRWIEHTSWYPDWQLRLFRRSAGRWEGGHVHESFKVSGTAGRLRGHLYHYTYSNLSEFVQQLDNFSSLAAADLFDRGVHARLFHIVANPPLVFLKNYILRRGFRDGAQGLVVSILSSASTLFKYLKLWELQHRQREKGKQ

SEQ ID NO: 2592 - protein, 273 aa, Unknown
  Description of Unknown: Acidobacterium capsulatum ATCC 51196 sequence
MSSQQDIPPDTPRKDTLSVAIITQNEEANLARTLGSVRFADEVIVVDSGSTDRTVAIAQEAGCRVFTEPWQGFARQKNLAIEKCSSTWILSLDADEELSPALQQEILALLKSSPRNMAFRLRRRNLFLGRWMRHGGYYPDAKLRLFRRAGMQGEAPLRFAERAVHETIAYDGPSETLRHDLIHHAYPTLHGYLEHMNRYSTLGAQVAVKKGKTIQPWWAFLGNVVLVPIFTFLWNYIFRGGFLDGREGFLLHAYHSLYTSWKYAKAWEMTRKA

SEQ ID NO: 2593 - protein, 329 aa, Desulfocurvibacter africanus
MISVLILTLDEEANLPACLDSVRFSDDLHVLDSGSSDRTADIARARGARVTQRPMDDWASQLNFAMRELPFRHPWVFMIDADERASPDLVQAMLKAVGVSRPAERFAESEAHLSPLQFANKHRGSRGASAPGGWGLGRAKPFPIPERDAQPTGDIAAFSIRRRDFFLDGRELRRVQATPRYVRLFRPERVSFSRLVNPVTHVHGPVGRLDGDLLHYPFSKGLAQWIARHNSYSTLEARQELEQEARDGSRISLRGLLHPDLGERRRQQKLLLARLPMRSLARFLALYAARGGFLDGRAGLAYALLQAWYEYMIVLKKREMLAFAKRRGE

SEQ ID NO: 2594 - protein, 281 aa, Unknown
  Description of Unknown: Planctomycetes bacterium sequence
MPKIPVSVLIPCRNEEANIRYAIEGVMNWADDVIVLDSGSTDATLDIVRQYPVRLVEHPWEGFAKQWNWALRNIDFKHEWLLMMAADCYPHKNLPDAIASAVRRNRYDGYYIRYRYVFMGKWLRHAAGYPQWFLTFFKHRLAHYEEREVHEHPIVDGKVGYLAADIWHHDRKPLREFFLRHAKYAEMEAREQFRIHTGRKKRTYTLLDLFKPGRVNRAIKENIWTRIPLLIRPFMRFLWLLMFRAAWLDGMPGIYYCFHSFCYHMQVSMHLRELLREGRRR

SEQ ID NO: 2595 - protein, 269 aa, Burkholderia dabaoshanensis
MSNQHPEPNDSGVSRPNRATLSVIIVAMNEAHDIRDCLESVRGLAMETIVFDSGSTDGTPALCRELGARVFETDWPGDGPQKNRALAQATGDWVLCLDADERVGDELRREIERLLDQGATHAAFSTPRRSSFCGQFMKHSGWWPDRIVRLFRRGSARFTDVRTHTHPVIDGTTGTFNGPIVHIAIGDLHEALDKANSYSTSGALTMAEGGKRSSLGKAIGKGIWAFLRTYVLRRGFLDGRMGFMLAVANAEGTYYRYAKLALLNDRHAS

SEQ ID NO: 2596 - protein, 249 aa, Unknown
  Description of Unknown: Phascolarctobacterium faecium sequence
MRKIAAVILSKNEEKNIQAVIENARNSVDEIIVIDSGSTDRTVEIARQCGAKVFFRQWDNDFSAQRNFALDKTDADYILYLDADERMSDELCQEVKKIADGEELRQYSFMRKIKAFGFEYRYGIFAPDEVVRIFPRKNICWENKVHERPVCKLPKIKLHGIVKHYTYDSWQQWLDKAGQYTTIWAKDSYRKGKRASAGSAFGHGMYGFLRAYIIKLGFLDGWAGMYSSLQHLFYTLMKYWKLYELGHKK

SEQ ID NO: 2597 - protein, 266 aa, Unknown
  Description of Unknown: Parcubacteria group bacterium GW2011_GWA2_47_16 sequence
MNTHKISCTVGILTFNSEATLKAALESVNGFAEIIICDGGSTDETLSLARAYGARVIVQAPEFKSEDNKVIDFSGVRNQMLSVASHKWFFSLDSDELMTEALQTEIETLISSGHPAAAFWVPRKYTLNGEIVDCAATYPARQMRFFHRDAVKGFVKTIHEKIEVKSGASVFKLRNFMLVPFNPDPTFHRRKWQHYIELEAARHGRISFWGWLGSSAENFKISFLYALRYVRNLIFCRGSRMPWRLEWERHVYHINTCRRFWKLIGK

SEQ ID NO: 2598 - protein, 293 aa, Brucella sp.
MTVSVLIMTLNEEANLPACLASLDWCDDIVVLDSFSTDRTVEIARAAGARIYQRAYDTEDCQRMYGLTEIGFRHTWVYTPDADEITPPDLRDEMLVIAADPDRPEVFFKARYKNMFMGRWIRHASLYPTWITRLVRPDRVHFERSVHSRASGGPGGELQAHFIHYSFNKGLAAWYDKHNRYSSVEADLAASKRLERHIDWGGLLSGEPERRRRTLKSLSYNLPFRPSLRFLYMYILRGGFLDGKPGYLYCRLLAAYEFMIVVKTEEHRRKQSAMPQAPARHPLDAEEPERHMV

SEQ ID NO: 2599 - protein, 248 aa, Gallionella capsiferriformans
MLSVVIIAKNEAANIGACIQSVAWADEIIVVDSGSTDDTVSIAREMGARVYLHADWPGFGPQKNRALSYASCAWIFSIDADERVTPELRAELEQAMRDAAADGYYCPRLSQFCGTFIHHCGWYPDYVLRLFKRAAGQFSDSLVHESVLLTGKTAKLHSPLLHYSYLTTDDVERKVAHYSTAAAQQMFEGGKGSSLAGAVLSGGWAFIRTYVIRLGVLDGAAGWRIAHMNARTTYLKYRKLAALHSAAR

SEQ ID NO: 2600 - protein, 276 aa, Burkholderia sp.
MTYGFSVLILTKNEEADLPGCLKSIDGVDDIWVLDSISEDSTVQIANAFGAHVVAREFDGFAAQRNHALRNFGFRHEWLLILDADERPSPELMDELRRFVSDAPDEIGAARMRRRDYFLGRWLKHAQISPYFIRFVRPSRVHYEREVNEVLIVDGDIHELAGPLDHFPFSKGMAHWIGKHNVYSSMEAGELLRRRQADFSVIKALFDRDFNVRRFHQKALFYRMPCRPLFKFFYMMAVRRSFLDGRAGWHYTFLQCVYEYLISVKAVELHRADRRR

SEQ ID NO: 2601 - protein, 345 aa, Massilia sp.
MIRLALVMIVRDEAARIARCLDSARALVDDIVVLDTGSRDDTAAIARFHGARVFAFDWCDDFSAARNAALDYSSADWNLVLDADEWIAAGSERTTLDAFMESGACIGVLPVTSEFDSQGRVESAVQWLPRLLPRGVRYCGRIHEQPVTDLPRRRIGLSLRHDGYRRDALERKHGRNDALLRRALLDAPDDSYLRYQLGKNEEVYGAHEAALEHYLAALLCCGEEAYRHDLVVRTLFCLKKAGRHADAVALAEGEGSRWEASPDFYFVLGDVLLDWAAATPEQASELLPVAEGCWQRCLELGERADLDGAVAGRGSYLAAHNLTVLYENLGMDEEALRYRVLAARP

SEQ ID NO: 2602 - protein, 265 aa, Aeromonas molluscorum
MEQQEAVTLAVALTTFNSMRCLPMVLDSVQGLAQRIVIVDSGSTDGTREYAAEHGCIVIERPWPGPLKQKVFAMEQCAPAKWMLLLDSDESLEPELRSDMERVLQEDDPSISAWEFQRKIWFLGGWLHHMYQPEWRLRLVRSDQWRMEGKMDLYHDKLVTDGKVGKLKGICRHDSYADIKDAVMRAQRYAERAVGREMKGGRWYDFAWCIVDVLWRHGIRQRAFLDGKRGLIMLGITMASKLIRQAYFCQQRLQPPKKDWENPVV

SEQ ID NO: 2603 - protein, 381 aa, Cohnella abietis
MFLLPTLSLCMIVKNEEANIERCLTSVKPFADELIVVDTGSTDRTIELCQAAGAQVYTFEWNNNFADARNYSLDQATGDWILWMDADEVLDGSAAADWKEQLAAETDSVLNVHLINYIGEETNPNETFHIAHTRLFRNRIGLRFLYHIHETLNVEEVFINDHALSRIKLHDGLTIHHYGYLQEYTTAKKKNERNLVMLLHELTVENNNPWTEYHLASEYYRLGKFEQAYEFVNLSIARFLKNDKLPPSLLYKLKYSCLISVGSVEGIPSAIDKAIKLYPDYVDLYFFKGVALYISKLYTLALDVFEQCLLMGEDNINHLTLRGSGSFHAWYYKGGCLEKLGKTELAINAYKEALSLYPNYTHAQEALDSLTMPLKQLEKKG

SEQ ID NO: 2604 - protein, 267 aa, Paraburkholderia sp.
MPPTPSDSSGRPTLGVAIIALNAQARLAQCLEALSFADEIVVVDAGSVDATVTLAQAHGARVIAEPQWPGFGPQKNRAVAALDTDWILSIDTDEIVTPELAASIREALRAPRTDIYAVDRLSSFCGHWVRHSGWYPDWIPRLFKRGTARFSDDLVHERLVFDGPTERLTGKLLHYSYEDFETVVRKLDAYSSAGARQRFEAGKRGGGLGRALARGFWAFVRTYFLKLGFLDGQAGFMIATFNAQTVYYRFLKLGLAAKQQTQAHSPR

SEQ ID NO: 2605 - protein, 254 aa, Ferrimonas futtsuensis
MSRSVRLACAMITKNAGPRFAQVLESVNWVDEIVILDSGSTDNTLELAQQAGAKVFHSSDWPGFGPQRQRAQTHVTADWILWLDTDEVVTPQLRTAIEAVLVDPDPQLAYRVNRLSDFFGRFIRRSGWYPDAVVRLHARDSYRYNDAMVHEAVAVPKEKVRALKGDLLHYTSDDFQGYMGKSLNYATAWAQARHAKGKRTSVAGIIGSSLWCFIRKYLLQLGCLEGRHGLLLALQSSHYVFNKYFALWVMQNRR

SEQ ID NO: 2606 - protein, 249 aa, Castellaniella sp.
MKLSVIVITRNEAAHIVDCLDSVAFADEIIVLDSGSTDATCELARAHGARVEVNAEWPGFGPQKNRALDLATGDWVLSLDADERVPPELGEEIRRVLTRPTAEGYRMARLSNFCGRWMRHSGWWPDRVLRLFRRQAGRFTDDVVHEHVEVDGRVATLSGHLLHYPYASLEAFIDKINRYSSEAALKAHAHGRRTTLVGPFGHAAWTFLRHYGLRRGFLDGWQGLVLAGMAATGSFYRYAKLYWLGRRSR

SEQ ID NO: 2607 - protein, 253 aa, Unknown
  Description of Unknown: Hydrogenophilales bacterium CG18_big_fil_WC_8_21_14_2_50_58_ 12 sequence
MQQKTPLSVVIIALNTAGQIEACLKSAAFADEIVVVDSGSRDDTLEIALKYGARVLHQDWLGFGRQKQFAVEQAGHDWVLCLDADERVSDPLRASIVEALQAPRFHAYRMPRCNRFMGRWLRHGEGYPDRSLRLFDRRVAHWSEDAVHEKVLAPSPVGSLRGDLLHQSQESLAAYLEKQNRYTNLQAEELCRRGKQASLGRLVTSPLLRFVKFYFLRLGFLDGVPGLAHISIGCFNSFVKYAKLHELNKKGKS

SEQ ID NO: 2608 - protein, 254 aa, Unknown
  Description of Unknown: Acidobacteria bacterium sequence
MTLSIVLITYNEEANLPRTLESFAPLVRDGQGEIVIVDSGSTDRTLEIARAHGAKVFVEPWKGFAAQKNSAMDKASGDWVLQLDADEALEPELTEEIAGMLRGQPAMSGYWIPRKNFFLGRWVKHGGFYPDPKLRLVRRGAGRFVEYGAHPTIKVEGSTGRFSHALLHHAYPTLRGYIDHMNSYSSMGAEIAAKRGQSRFSVLNIVARPVLTFIYNYFFRLGFLDGREGLLLHLYHSAYVSWKYAKAWELGRSK

SEQ ID NO: 2609 - protein, 293 aa, Mesorhizobium sp.
MSMAKTASTEGSETLSSTGGIPVTVVIPVKNEELNLERCLKALSRFADVVVVDSGSTDRTQEIAIRAGAKVIDFRWDGRYPKKRNWVLINHALPNEWVLFLDADEFVDHRFCDEMAAAVASGRHAGYWLNYTNYFLGRRLGYGVPQKKLALFRVSSGLYERIQEDSWSKLDMEVHEHPTIRGSVGEIRAPIEHNDFRGIDKFLDRHRDYARWEARRFLLLERQSDLDGRSLTTRQRFKYRSLERWWYPWFYFLYAYIVRLGFFDGAAGFQYAFYKAWYFLTIRLMIRELRKCG

SEQ ID NO: 2610 - protein, 282 aa, Arthrobacter sp.
MRKIPASILIQTKNEEASIERCLAALGDFDEIIVVDSNSTDRTAELAAAGGATVINFTWNGAYPQKKQWQLEHAPTRHPWILFLDADEFPSKELIEEIAVIVSDPLERRVAFDIPISYHFAGKVLKHGHRVVKRSLLKRGFNRYEDTGLVNLPVMTELEVHYQPEATGEVGRTSGLLAHHDLDPVRTWFDRHNKYSDWEAYIHADPAMRRSVRSSKSLQGQRFDVVPFKPFAFWVYSYIVRAGFLDGRAGLDYAVALASYYWQIGLKTRELQQNGRRLAEHA

SEQ ID NO: 2611 - protein, 256 aa, Unknown
  Description of Unknown: magneto-ovoid bacterium MO-1 sequence
MRRLPISGVIITLNEAHRLEACLATLQFCQEILVVDSGSNDQTVAVAEASGARVVVQSWLGYGAQKQFAIDQAQNDWVLCLDADEQLEEALQQEIIERFSQGSPEPGVAFEMPRRNRFMGRWLNHGEGYPDPNLRLFNRQQGRWSQDPVHEHVTVDGTVERLRGAIRHQSEESLEHYLAKQNRYTTLQAKRLVAQGKKVGLTKLLISPLLRFLKFYLLRLGFLDGLPGLVHISIGCMNSHLKYAKAWAMQQRAAEK

SEQ ID NO: 2612 - protein, 381 aa, Streptomyces hainanensis
MTVSLCLIVRNETAYLRGCVESARPFVDQIVIVDTGSTDDTIAMGWELADAFCEVPFDGDFSAARNEALVRADGDWILFLDADERVIASEGKKLLEFIDSVDEQVLGARLLRYNFFATGTFYTGRELKLFRNDGRIAYRRKINESVAASIAEAGGTVTPAPVVMNHFGHCRPIADREAKAYRYLSLMEDQLREKPQDALLVGYKALIKRTLGHFEEAAELSDRSLALDDASPIVWLFRGHVLRSLGKDGEALEAYQKGLDVDPGNAALHNMAGVELMVLGQHADAGACFTRARECDPQSLHTDINQGLLAQAAGDWHAAIACFQRAGDANPGFYHEEWAGRVERDPYRAFYAETPLGYAGLGYHLGYCRERANGSLPSSGR

SEQ ID NO: 2613 - protein, 253 aa, Polynucleobacter campilacus
MPTLSVILITRNEEANLDDCLASLDGIAQQIVVVDTASSDCTLEIAQNYGAVTASPPDWPGFGPQKNRALDLATGDWVLSLDADERLTPALRAEIQIAIHHSAQVDCFAIPRLSWYCGRFIRHSGWSPDYVDRLFKHGTARFSDDLVHERLIPNGQVAKLENPILHFSFMNYSQVLQKIDRYSTASAEQAFAKGKTSSPLKAVLHGFWAFFRTYIIRAGFLDGAQGFALAISNGQGTYYRYIKLWHLNQDSRK

SEQ ID NO: 2614 - protein, 276 aa, Unknown
  Description of Unknown: Nitrospira cf. moscoviensis SBR1015 sequence
MSVSILVLTLNEENNLPACMASMGRFDDVVVLDSFSSDGTVKIAEEGGARVMQRRFDNWAAHQNWALEHITFKHPWVFYIDADERMTDELAAEIQAIAEDPTRSEVAFYCGRRNMFMGKWIKHAMPPGSIMRFFKPPCIRFERLVNPTPVINGPHGYLQGQLLHYNFSKGLTEWIEKHNKYSLMEAMQGLKERAAGFSDGGSVLSRDPAVRRKALKALSFRMPLRPLLKFLYLYIVNRGFLDGRAGLTYCVLQSIYEYMIVIKMQELQRRENGLPI

SEQ ID NO: 2615 - protein, 263 aa, Unknown
  Description of Unknown: Candidatus Eisenbacteria bacterium sequence
MTSAAEIRPAGRPPVSAILVVRDEAASIERCLDSLGWVDEVVVLDSGSRDGTQEICRRRGCRVIETPWRGFGAMKKLAAESATHDWIFSIDADEVVSAPLRDRLLRILEHGPEVRGYRVRFRTYYLGREIRHCGWANEHHLRFFDRRFGNYTDRPLHEAVQMGDPKLELAEAIEHFTYPTVASHLEKINAYSDLAAARLFEQGRRISLLGAGMRGVLKFFTMYVAQRGFLDGKEGLILSSISAFGVYCKYLKLWELSRWKRSS

SEQ ID NO: 2616 - protein, 278 aa, Fibrella sp.
MLPITVLILTLNEEVNLPHCLQSLSGWAAAVFVLDSGSTDRTTELAAARGATVFHRPFDHYAAQRHYAIHALPITTDWVLFLDADEYATDALKEQISLVVRQPTAHNGFFIPFRFIFMNRWIRHGGYYPTYILRLFRRSAVQRIDREMDEQITVSGTTGYLNEPFVHHDRKPVRFWYEKHARYTQFQVADLLKSARQKTLRWADAHTQRDRKRWVKEHVWGHVPVLLRPFLYFFYRYVLLLGFLDGRAGFIYHFSHACLYQFMIATVYIEASSRPPSR

SEQ ID NO: 2617 - protein, 259 aa, Endozoicomonas elysicola
MPQANSLSVVLIAKNSAVTLESSLKSVQWADEIVLLDGGSTDDTVDIAIRNGAKVYQHTDWQGYGKQRQIAQQYATSDYVFMLDTDEQVTDELKASIQVVLSEAQQMNKAYTCARRNWFLGRYMMHCGWYPDRVIRLYLNKERTYNSNLVHESVDISGADVVDLDGDLLHRTCDDYMQFQQKQLVYARSWAEERFLKGKRKGLGSAFSHALGAFIKTYFLRRGFLDGAHGLLLSLVVTQYTFNKYAALWALGKTRKQTD

SEQ ID NO: 2618 - protein, 263 aa, Methylomonas koyamae
MLTVVILACNEAANLPRCLAAIPERYPIVVVDSGSRDDTVAIAERRGCRVFHNPWPGFAEQRNFALQQCAIETPWVLFVDADEIYPPLFYQQFDAEWATSRDMDVLMVPSVLHLRGKRLKYAPGYPIYHPRLVRRETVGFVRNHTGHGEAVLASSRVATADIAYQHYFYHGEIVAWMHKHVGKAAQEIELQPTAGALMTARGRISVWLGRCWLRIPARFAYHYLLRGGFLDGAAGLEFALMFTWYEATIYLQAKAGCWAEPSA

SEQ ID NO: 2619 - protein, 284 aa, Chthoniobacter flavus
MNKVPVSFLIPAKNEAANLPRCLESIAWADEIWVVDSQSTDGTPAIAEASGARVVQFHFNGSWPKKRNWALENIAFKHEWVFLIDADETLPPEAAEELRAIVTGTGDCVAYQIDRRFWFLGQWLNHAYRPNWIMRFFQHRKARYAKLTAAAISHADHEIHEPMIVDGKIGRLRAEMAHYAFPTIESFVEKHNVYSNWEAHVTLSEEQRAPTHDFGWRQRLKRWSRRLPCRPLLRFLFVYVWQRGFLDGRAGYYFARLHAEYEFLSVAKTYELRLRQNEDSRLGH

SEQ ID NO: 2620 - protein, 254 aa, Burkholderia multivorans
MAEPTLGVAIIARDAARRLAQCLGALSFADDIVVLDGGSTDDTVAIARAHGARVISAPDWPGFGPQKNRAVDALSTDWVLSIDTDEVVSDELALSIRAALRAPQADVYAIDRLSAFCGHWVRHSGWYPDWIPRLFRRGAARFSDDLVHERLVFAGPADRLDGKLFHYSYDDIDSVLRKLDAYSSAGARQRRAAGERASIGKAIRRGLWAFVRTYVLRRGFLDGRAGFMIAVFNAETVYYRFLKLAHDDTRALDR

SEQ ID NO: 2621 - protein, 257 aa, Asticcacaulis excentricus
MSSPPKLSACIITKNEADRLANCLRAIEGLVDEMVVVDSGSTDGTPDMARQMGAKVFHNDWVGYGPQKRFSEDCASHDWILNLDADEVVTPHLYQEIKALMARGPDLPAYRFKLRNVYPGKDKPRLWADYHNYVRLYDRRKVRFRDSLVHDTVDTRDEPVGQLHGSATHFSARSYAHIRQKLDSYTNLQAKALKKPAWAIWARLPFEYPFVFTRYFLFRCHFTGGWDGVLSSHLAAEARVKRLLKILKAQKELKAKS

SEQ ID NO: 2622 - protein, 265 aa, Cohaesibacter marisflavi
MQNSNDKISLPVSAFIITLNEEDRIEKAILSVIDWVDEVIVVDSGSTDNTTALAEALGAKVHFNAWPGYGRQKRFGEDLCRNDWLLNIDADEEVTPELRDKICSIFKIGPDVDIYKIEILDVFAHEDKPKKWAYGYWQYRLYNRNKGRFSESTVHDTVRPEKDATIKKLDEKIAHYSIRSVQWAVEKMNRYSDMQRDDIVAKGRHISRWRLVYEFPLSFLKSYILRRSYRYGFWGLVLAHNYAFSRFLRIAKIYEHQLLSDAKKK

SEQ ID NO: 2623 - protein, 657 aa, Unknown
  Description of Unknown: Peptococcaceae bacterium BRH_c4b sequence
MSAKISLCVIAKNEEQNIRRCLDSVKKAVDEIIVVDTGSTDDTASIALACGAKVYHFPWNGNFSDARNASLDHAGGDWVLYLDADEELAGEESRGGLRRAVKDDSVEGYFLKIINYLGAEGHIESHQDVVFRLFRNRREYRFQGAIHEQVAEAIKEKNVSAVFRLAEGVLINHYGYLDSSVDSRDKINRNLGIIAKEMEREPGSRELRFYCGVELYRAGRYIEAARELSVAAEGIDVDTIYLPKLVRYIIMAYQAAGEPEKALRTALGSMDFFPYYADLYYYAGRMYMELKNYVSARDYLLKSVSMPEQPAHYASFNGVRGFRSYYHLGEIMEEFFNSSEALKFYLASFRDNPDFTPALRKIVHLLEPRRNTERARKYLQQFSFCTPRANMLAGELLFRQGAYGIALEYFQKAGENQGATSEPQLWVAACHIQERRYKKSLRILKSFKPGNRLYPRVLMNKILACWLHSDARQVQALAEEMAACGVSEDMKNVAGILAYAPEKGNRLNRLLPGQEGRELLLDIVTRLLGMNETDRALCLLYSLDPASLSGLLLDMARIFHEYDQGVGVINLLKQKTTDSEDGETHFLIAEILREAGKCLEAGLHYRRAGELDPGVSRYYLRQNHLYRHRWEQLLQEARHKYPDDENLKKLGEGVTAH

SEQ ID NO: 2624 - protein, 249 aa, Andreprevotia lacus
MPTLGVALITKNAAAHLAECLHSVAFADRVVVLDSGSSDDTLAIAAAHGAQIGSTADWPGFGPQKNRALALLDTDWILALDADEVVTPELAAAIRAAVTADNGPVHTLRRRSSFCGQWIRHSGWYPDDVPRLFKRGSARYSDDLVHERLLFDGTAPMLAGELLHYSYDSYEQVLAKINQYSTAGAQQRMARGKSSGVAKAALRGGWAFFRTYVLKRGFLDGGAGFAIAVMNAETTYYRFLKLGWLQRQG

SEQ ID NO: 2625 - protein, 533 aa, Unknown
  Description of Unknown: Cardiobacterium sp. sequence
MATLSVVLMVRNEAANLRRCLPRVARVADEIVILDSGSTDDSEAVANWFGARWFVNADWQGYGIQRQRAQALATGDWIFALDADEVPDDTLLAALARIKDETPGDTVYGVRRLDLVFGRFIDHPRWRGKPYWRVYPRRFQFNSNAVHESLLLDGARTRVLPGFLEHHTADTPLFWLEKRFSYADTWAREAHARGKRVSPFGVWLRSLWAFCKQYLADGRFLRGSSGWVYAWLFAQYTFNKYALLCDRNARPQSYADDFQPHAVNARALPLAVPPPGRNPHPLSVVMIVKNEARHLPACLAAVRDLADEIVILDSGSSDNSATIAARFGVRWYENRDWRGFGVQRQRAQALAQGDFVLMLDADEQPDAVLKAAIRAVLQSPPSPDTVYAVSRSNIFCGTAVNARYRDHIPRLYGRAFFQYHPYEVHESLARGAAAVVRLPGDLLHFTSDNLAHFIRKNLRYSHDWAQEKAAGGRKPPSLWALPLRAAVAFCREYFVHRTLFAGRYGFFLAASSAFYNFNKYLMLACLARRERKS

SEQ ID NO: 2626 - protein, 259 aa, Unknown
  Description of Unknown: Sodalis-like symbiont of Philaenus spumarius sequence
MSHRKRLSVVLITLNEAELLPNCLASVSWADEIVVLDAGSIDETRHIAAQAGARVFQSTDWPGFGIQRQRAQAYASGDYILMLDADERVTPPLRQAIQDVLQHPDSNAVYSCTRRNLFLGRFMRHSGWYPDRVVRLYARERYRYNALPVHESLATGDADVVALTGDLQHLTCRDLSAFQCKQLKYAEAWARECYRQGRKCGLFAIIHHTSGAFFKTWLLRAGFLDGRQGWLLAVVNAQYTFNKYATLWALSHAVREPDP

SEQ ID NO: 2627 - protein, 279 aa, Unknown
  Description of Unknown: Parcubacteria bacterium C7867-004 sequence
MEKIPCSVAMLTFNSEKTLRRALESVKDFDDIVLCDGGSTDGTHAIAQEYGARIVPQDAKYLYPEGGLADGGGARNQMMQATKYDWYLWIDSDESVSPELRADVARIASTPLKEGDPLAYRIPIRILIDDRLIKYSSNYPGYQFRFFNKTSGGHLARRAHNRIEFNPGTVIGTLATSWYVYVDSRDIHILGGPWKHYRRVEIEEACKRTFPDFMRYIVWFHFRASAGMFLRALRNYLLHGFRDTMPIEAELARILSPLVLIVNSSICKVGRIFSPKRAL

SEQ ID NO: 2628 - protein, 275 aa, Gloeobacter kilaueensis
MAVSIVILTLNEAADLPGCLESIGWCDDIHLVDSGSCDGTLELAVAAGVRCYEHPFSSFGKQRNWALDHCQFAHEWILFLDADERATPAFARAIEGATAAAGASIAGYYCCWKLMLDGHWLRRTDGFPRWQFRLLRWGRVRFCDFGHGQKEDRVQGQLAYLSEPYLHYAFSKGWGQWLSRHNRYSDLEAAERLRANVSWQELLARDPSVRNKALKPLLSRLPGWPLWRFLIMYVFKLGFLEGRAALTYCIHLAYYEFLIQVKMDELRRGRCLDRT

SEQ ID NO: 2629 - protein, 269 aa, Herbaspirillum sp.
MASSPPEKRTLLSVILITKNEEANIQACLDSVDFANEIIVVDSGSTDQTVDIARKAGAIVIQTPDWPGFGPQKSRALAAATGEWVLSIDADERITPELAAEIRKTIQNPSADAYDISRRSWYCGRFIEHAGWTPDYVTRLFRRGKARFSDNIVHERLIADGPVKRLNGLMLHYSFLDFSQVLQKIDSYSTLSARQAYANGRRATVLDAVLHGFWAFIRTYFLRLGLLDGSHGLALAVSNAEGSYYRYLKIWQLEQAAKKLPSGDAKEGR

SEQ ID NO: 2630 - protein, 354 aa, Laribacter hongkongensis
MPSVSATLIVRNEAARLARCLESVSAHVDEIVVVDTGSTDDTVAIASRFGCRIGHFAWNDDFSAARNAALSLSCTDWNFVIDADEWLVDPATLREAVRHVPDSTGLVCVRSECVLEGLRTHADCWIPRLLPATVRYQGRIHEHPASDLPYFRTRIVLGHDGYLEHPLNAHKKERNLPLLQAELVAYPTNPYLHYQAGKEFEVRDDFATAVHHYLQALPDTAGYPPYTADLVCRLLFCLKKLGRFDQAIPLAEHWQPHLADSADFLFVLGDLLLDYAIAAPADAPAILSVIEAAWLGCLELGTAHHHENSLPARGSFLASHNLSVLYAHTGQPDKAAHYAGLAQKQRQQMHPETA

SEQ ID NO: 2631 - protein, 297 aa, Unknown
  Description of Unknown: Verrucomicrobia bacterium sequence
MSGEDNRRAPLSVLVPVKNEAANLRDCLASVSFADEIVVVDSASTDGTQDLATTAGARVVQFAWNQKFPRKKNWSLQNIPWRHDWVLIIDADERITPELEREIRSAIRRPNLDGFYLNRRFWFLDGWINHCGYFPSWNLRLFRHRKGRYERVEAGSGFNSGDNEVHEHVLLNGRADYLSAPMEHYAFPDITTFIEKHNRYASWEAAVRAQLCRRSGEETLRPNPFGTALQRKRWLKRFTRRAPFRPTLRFFYHYVWRQGFRDGYRGWILCRLLAWYELVSAAKARELTLCGARRESC

SEQ ID NO: 2632 - protein, 283 aa, Unknown
  Description of Unknown: Candidatus Rokubacteria bacterium sequence
MSASHAVPVTAIVLAHNEERNLPACLESMTAWVEELFVVDSGSTDSTVAIARAWGARVVEHPFEHYGAQRNWALASLPITTPWVLNLDADERVTPELRAAIQEATTRSDGSIAGYLVARRTVFMGRWIRHGGHYPVWHLRLFRSGRGRCEDRQYDQHFFVDGRVEKLRGDLIDVFTSDVTTFIRRHLRWAQLEAQEQSTGGEGRIAGRLLGGSPIERRRWFREVYGRLPLFVRPALYFVYRYIIRLGFLDGAEGLVFHLLQAFWYRFLVDAIMYERRLMDRNS

SEQ ID NO: 2633 - protein, 258 aa, Unknown
  Description of Unknown: Acidobacteria bacterium sequence
MNRLSACLITLNEEHNLPRVLNSIQGIAEEIVVVDCGSDDHTLDIAREYGAKVLTHPWSNFGAQKNRAAAAASNDWILSLDADEELSAELREALLRWKWKEPEFAVYEVARRTWYLGAWVWHTRWYPDYQRKLYRRDKAKFEPLLHATPRFEGPVGRLDGDLLHYALPSVEEHIAKVESYTTRIAQDMYAEGRRGWRAAMWLAAPWSWFQNYVLYLGFLDGYRGWLISRMAARGTWLKFKKLGKLVETERRARRVRAP

SEQ ID NO: 2634 - protein, 296 aa, Unknown
  Description of Unknown: Rhodomicrobium sequence
MPRIAPSNPCGYPGAIRAKIAEHPVALPISAFIITKNEEARLARSLAALRPWVDEIVVVDSGSTDRTVDIARSMGARVLHRDWSGYGGQKRFAEQQCRNDWVLNVDADEVVTPELADEIRALFRGRTVPEPGAYRLRILTVYPGDEKPRPFAKDYNIVRLYHRSAGSYRDHPVFDRVVLNHTVPKQLRGPVFHHSYLSFAHIIEKNNQFSSFRSRHSKSRATSYLVPRLGIEFPLNFLKYYIFRRHLTGGWKGYYFSLCHAFMRTSRVAKMLEAGNADAHRTGPALKRARPDVTRA

SEQ ID NO: 2635 - protein, 254 aa, Unknown
  Description of Unknown: Anaerolineales bacterium sequence
MKITAIILTKNEAKRIEPCIRSLDWCDEVVVFDSFSTDGTQALARNLGARVIENPFVNFTQQRNAALALVASDWTFFVDADEVAESALAQEIPEATQNNAIDVWWVPRHNYIFGKLTRGAGYYPDYQLRLLRKGSGVYEREASEIFIHQGKEGYLQGHLIHYNYENVAQFHEKQRTREVFEAKTLHDQGVRMSYKTLLVQPFRHFWWRYITLKGYQDGWHGFRLSLLLAYYFGFRNYLRLGQMRRAGQLPLPPA

SEQ ID NO: 2636 - protein, 257 aa, Unknown
  Description of Unknown: Betaproteobacteria bacterium TMED156 sequence
MILLPISCYIITKNESRKIKKVIESVSGLVNEIIIIDSGSTDKTLSIAKTLGAKVMFNKWDGYGKQKRFGEKVCKNDWVLNLDGDEIVSSDLNQEIRNLFLKEKKDMHNLYLIKRQNIFPFGINPYSYSGDKVIRLYRKSVVRYPDHPTWDKIKKPKNQKTTVLNGVIYHYWMKDFEHQVSKMNKYTTSLANFSPKKSMSSLTLRMVFGFQFDFFKAYLLRHHWLQGRYGFAVSILYAFTRFMRVIKMMEKQLRKNS

SEQ ID NO: 2637 - protein, 272 aa, Unknown
  Description of Unknown: Acidobacteria bacterium sequence
MRVRVTKAIANSFCATTIRMKISATIITFNEESNIEQACESVAWADEVIVVDSESTDSTRTLATSSGARVITNAWPGFAAQKQLAVDEAKHEWVFSLDADERVSDELRATIEALRLEPESGLADGYQIARRSYYQGRWIRGGGWYPDRQLRLFRKTAGHWKKRHIHESVEMEPGARVEALDGDLLHYTVRDAAHHHKMIGERYAPLAARQMFEEGRRTSAVSIATAAPSAFFRSLVLKAGFRDGLAGLSIASFAAHHAFLKHLMLWEMQNKK

SEQ ID NO: 2638 - protein, 268 aa, Paenibacillus durus
MTDSKRLSVVIITQNEEEKIEQAILSCRPFADDIVVVDGGSTDGTVLIAKRLGCTVYHNPWPGYAKQRIFGADHAPSNWIFFIDSDEEVSEELQKSLIGWKKEPENEVKAYTVYRIGDFLGRWMPKGEHLVRLYKKDEVRMKDVLVHEGPDVDPAAVPCLDGTLWHHGYRSIQDHVQRFNKYTDLEARKDYDQGKTFSLIRLLFRPPAKLVYTLFVRKMITKGIAGFSVAFFWMYYEFLKEIKLYELYGREKKREKPVYVIESEKRPV

SEQ ID NO: 2639 - protein, 241 aa, Variovorax sp.
MPRLSVIVITKNEILNLAACLRSVQFADEVVVLDSGSTDGTVELARAMGATVMQSDDWPGYGPQKNRVLDAARGDWIFSIDADEQVTPELAAQLRDAMAAGAFDAYTVNRFSNFCGQYMKHSGWYPDRVLRLFRRGTARFSDDIVHERVVATGAIGRLSGNLLHNSMPHFESVLGKLDRYSTAGASALMGKGVRGSFTRALLHGWWAFVRTYVVRLGFLDGRLGLALAISNAEGTYYRYLK

SEQ ID NO: 2640 - protein, 247 aa, Thermoflexus hugenholtzii
MLAVVILTRNESAFIEACIESVRWADRIVVFDSFSEDDTVARARACGAEVLQHPFENYAAQRNAALEQVEADWIFFVDADERATPELGEEVREAIRDPRYVGWWVPRRNYLFGRLTRGGGWWPDYQLRVLRRGYARYERPVHEIVILQGEAGYLRNPLIHHNYDSPAEFRAKQRAYAWLEAQALRQAGVRPKPYTPWTMMVREFWRRFVRLRGYIDGLHGLRLAWWMARATWETYRLLQDAARVDTG

SEQ ID NO: 2641 - protein, 268 aa, Unknown
  Description of Unknown: Candidatus Omnitrophica bacterium CG07_land_8_20_14_0_80_50 _8 sequence
MTKSQRQTVSAVIMTKNCEALVEGTLKSVAGWVDEIVVIDGFSTDGTLEICRRYTDRIFQNRWDGYRFCTERNLGTSKVSSDWCFHIDPDERASLEFKLAVLKIMEKGTAHSAFEFRKKNFFLGHFMRRGGWYHYSLHFFRKDKAHYEGVIHETLKVDGTIGKLEAAVEHYPFTSIKQFVNRHNGYSTREAQAKFEEAGKLSEAEIQYNLKKKPLKRFLKFFVRKYGFLDGIYGFIFSVLFAWVHFINCAKYWELINTPPPLRGTSPS

SEQ ID NO: 2642 - protein, 253 aa, Polynucleobacter necessarius
MPTLSVILITRNEEANLDDCLASLEGIAQQIVVVDTNSSDRTLEIAKNHGATLSQPPDWPGFGPQKNRALDLATGEWVLSLDADERLTPALKSEILTAIHHSAHVDCFAIPRLSWYCGRFIRHSGWSPDYVDRLFKRGTARFSDDLVHERLIPKGQVAKLENPLLHYSFMNYSQVLQKLDRYSTASAEQAFAKGKSSSPLKAVTHGVWAFIRTYIIRAGFLDGAQGFALAVSNGQGTYYRYIKLWHLNQEANK

SEQ ID NO: 2643 - protein, 277 aa, Streptomyces zhaozhouensis
MSRLPIAVVIPTRNEEANIVSTVRSVIAHFAAVVVVDSDSTDATRELAKAEGAEVVGYTWDGGYPKKKQWCLDRVRTDLDWVLFLDGDETPSGELLAELRRIFLDGRRVRPAAFDIPLGYWFAGRRLRHGHTIVKRALLDRTRARFPEPDDLGAPGMGEQEGHYQPLAYPVYRLRATIEHRDLDPVRTWFERHNRYSDWEAWLERHPEVREQIRRAKTRQGQLFHRAPLKPLLSFGYAYVYRRGFLDGRAGLDYALAMSFYRWQIGLKAREQPPAGS

SEQ ID NO: 2644 - protein, 257 aa, Paraburkholderia sp.
MDSTAAPTVGVALIARNAAARLAQCLAALSFADDIVVIDGGSTDETVSIAQAHGARVIVHTDWPGFGPQKNRAVEALSADWILSIDTDEIVSPELAASIQAAIRAPRAEVYALDRLSSFCGQWVRHSGWYPDWVPRLFKRGAARFSDDLVHECLVFETPAARLEGKLIHYSYEDFETVLRKLDDYSSAGAQQRHAAGKRGGFGKALGRGAWAFIRTYLLRRGFLDGRTGFMIAVFNAETVYYRFLKLDAANRHHDGE

SEQ ID NO: 2645 - protein, 260 aa, Serratia sp.
MSAKLRLSVVLIAKNEASLLEDCLNSVSWADEIILLDSGSSDGTPALARDLGAKVFENTDWQGFGKQRQLAQDYASGEYILMIDADERVTPELRQSIEACLQQPDDSKVYRLGRRNLFMGRFMRHSGWYPDRVCRLYKADKFRYNNDLVHEAVDTGNAKIVDLKGDLLHLTCRDFFAFQRKQMNYAEAWAKQRFQQGKRCSYFSIISHTLAAFLKTWVLRAGFLDGKQGLLIAGVNAQYTFNKYAALWAFSHQLQKSEPQ

SEQ ID NO: 2646 - protein, 268 aa, Acidovorax anthurii
MPADRSGDAAPRPTLTVAVLTLNEGHRIAACLESAAFADQIVVVDSGSTDDTVAEARRLGAEVHVHPDWQGFAVQRNRLLAHATGDYVFFLDADEVMTPGFREELQAIVASNARAVWKIRWRMVAFGHELRHLRTTSAIERLFRRDMLREYIGVVHEEAVLTEPEAPRHVMREPLLHHSRETVRGSLEKLTQYAMLGAAKRASLGKRGGVLRGLASGSSMFVRLYVLRLGFLCGGAGFLYCLFVALEAFFRYAALEYDRARLTESVRR

SEQ ID NO: 2647 - protein, 274 aa, Unknown
  Description of Unknown: Betaproteobacteria bacterium HGW- Betaproteobacteria-3 sequence
MPVSLSPASPAVPLPTLTVAVLTKNEAHRIEHCLRSAAFADQIVVVDSGSTDDTVARARAMGAEVWVHDDWQGFGAQRNRLLAHASSDYVFFLDADEVITPALQEEIRANVRSARRAVWRIQWRMVVFGRELKFFRSQSKVERLFRRDMLREYVGAVHEQAVLHPEPDGAPVPRPLMRARLLHYSRETVRGSLEKMTQYAMLGAAKRAAQGQRGGVLRGLLSAISMFIRLYVFHLGFLCGGAGFVHCVFVSAEGFFRYVALDYDRASLASDIPR

SEQ ID NO: 2648 - protein, 286 aa, Unknown
  Description of Unknown: Verrucomicrobia bacterium sequence
MSESRKVPVSVVVPIRNEAANLKRCLDSVKWADEIFVVDSQSTDGSIAIAEERGAQVVQFQFNGTWPKKKNWALENLPFRHDWVFILDADETLPPEAEQEFAKAITEAGDIAGYWINRHFMFMGKWLRHSYYPNWNLRLFRHSLGRYEKLTETDTQSGDNEVHEHVIVKGPTSRLRCEMDHYAFPTVEVFVEKHNRYSNWEARVAAERKLSGSDARISSSTVGRRRKLKLLSQRLPFRPLLRFLYIYVWQKGFLDGREGYYFARLHAFYEFLSVAKTYELTRTRND

SEQ ID NO: 2649 - protein, 292 aa, Unknown
  Description of Unknown: Candidatus Symbiobacter mobilis sequence
MAWPPGIAPVAVVMISLNEGHNMEAVLDNLKGWAQEVFLVDSYSQDDTVEIALRHGVHVVQRRFRGFGDQWNFALRELPISAPWTMKLDPDERLSANLKANLCAAMRSGKAAGLSMERRLWLMGRELPVHQRLVRAWCTDKCRFTDIAVNEHPIVEGHIEYVAGVMEHHDSPDLDHWLEKQNRYTTAEAVIAFNNSALADTPRLFGSALQRRMWLKKNFYRVPFRYLLLFLYHWLWQGAWRTGWVGYAWARLRADVMRLIEYKVREMRLTGRLPVKRVYGPGRPDPRVPQYD

SEQ ID NO: 2650 - protein, 246 aa, Unknown
  Description of Unknown: Acidobacteria bacterium sequence
MKVTALVITLNEAAHIEACLGSLGWADERLVIDSGSTDGTVAIAERLGATVITRAFDGYSAQKNFGASRAAHDWIVSIDADERVTPELAAEMRAAVAAPGDHAGFRMPRVTWHLGRWIRCTDWYPDNQLRLYDRRRARWNGRKVHESVIADGPVGRLQHELQHYAYRDIAHHLDTINRYTTLAAEEMHARGRRTGIVELLLHPPAAFLRNYILRGGFTAGIPGLIVSAMNSYYVFLKFAKLAALQK

SEQ ID NO: 2651 - protein, 313 aa, Mesorhizobium prunaredense
MTEAAADNPKEIVQWRPGAVPIAVVMISLNEAHHMSAVLDNLEGFASEVFLVDSFSSDATVEIAVSRGVNVVQRRFRNFGDQWNFAVRALPITSPWTMKLDPDERLTDELKSSIASRIEGGKVQGLTLNRRLHFLGRKLPARQKVARVWRTGRCRFSDVVVNEHAIIEGKVETADGELEHHDSPNLHHWYQKQNNYTTAEATSFYEKLALADKPKLFGSSMQRRMLLKKHLRNIPFRYQLLFLHHYFAQGAWRGGRAGYIWARLRVDVFRMIEVKLIEMRRLGTTYRSTPPVLGAPHPRAIQVDGKDRLIASD

SEQ ID NO: 2652 - protein, 293 aa, Yoonia maritima
MTDLTVIILCKDEALHIERAVASVRGIATRVLVVDSGSTDDTVARARDAGAEVLFHPWTTHAQQFNWALDQVKGQGGWVLRLDADEFVTPALADEIAAGLPEVEGLYLRRSMRFLGQDVRYGGVFPIRILRLFRNGAGRAEDRWMDEHIVVNGVTADLKWVIVDDNRKPLDWWINKHNAYASREVIDILNREHSGAAPLANGGAKRWIKDNIYAHLPGGFRAGAYFFYRYVLRLGFLDGPPARSFHVLQGFWYRYLVDAKLAEVRRYMDETGGTPDEAIKAVLGIELQEEPSP

SEQ ID NO: 2653 - protein, 292 aa, Rickettsia prowazekii
MKKISTFIITKNESARIARAINSVKNITDEVIVVDNESTDDTVHIAKTLGAQVIVKPWLGYVGQKSFAESMCVNDWVLNIDADEELSQELQDEIEYIFTSHNQDRYLAYQIKLLIMYRGDQKPRMFAPLNKCTRLYNKKFASFANTINSTTHDSVVFNKDVDFTGKIYLLNGIAYHYSGTSIEQLVNKANFYSSEQAKDLVKQGKKLSNFRLATEMIWCFLKAFFIRRYFVFGFDGFVDSIIFAFARFLRLAKLRELSLKSQNVITSDNYINYCMDFKSLLQQKKRNRYPKK

SEQ ID NO: 2654 - protein, 255 aa, Holophaga foetida
MSVTAILIVKNEAKHLAACLETVKGWVDEIVVYDSGSTDATEEIAASFGARFIRDPDWQGFGKQRQKAQTHVKTGWCLWLDADERITPELKASIQAALASPAPDTVYALPRLTWAYGRFIRHCGWYPDHCLRLYPTAYTTFNAALVHENLERVPGMKVQPLKGDLLHFSYDTLEHHLTKAAKYASAWAEERARKGKRGSLSQALLHGSFRFLRMYVLRAGFMDGKAGLVLSILGGHAVFIKYVSLWMYDQPKRPD

SEQ ID NO: 2655 - protein, 258 aa, Rhizobacter gummiphilus
MMQNPPTLTVVIVAKNEARNISECVASASFANEVIVLDSGSADATAELARQAGARVVATDWPGYGPQVARGFSMATCDWVLSLDADERITPDLAREITVAITSGARQGYRIPRLSEFVGQFIHHSGWRPDYTLRLGVRSVSGFTDHFLHAHMTVEGAIGDLKTPLIHFSYPDLHDVLEKLDRYSTGHAKDMHARGKTANLKKAIVHAAFAFARTYFLRLGFLDGQRGMMLAIYNAEYTYYKYLKLMMLSSPPVRPAIP

SEQ ID NO: 2656 - protein, 354 aa, Unknown
  Description of Unknown: unclassified Dehalobacter sequence
MRKLSLVMIVKNEEKVLARCLDSVKHLVDEMIVADTGSTDDTKKIAHAYGAKVCDYVWEDDFAKARNFALSYAAGDWNLILDADEVLTQGTKERIQRFMEQPEAIGRIKVVSKIRQDHEIRTSSTWVSRLIPKGIYFEGRVHEQIISNLPRVNTEIEVNHDGYYETDKTGRNLRLLLLELDNHPSDPYLLYQTAKQYKLSGQYQTANDYFEKCYQFLGRNAGYRDLVVIDYLYNILATGKLLKGLGMIEKERAQFADYPDFHFVCALFYMELVFSDVDKYIHLFPEIEREYQTCLQLGETDKYSTTTGTGSFLAAYNLGVYYETTGDMTKAKEYYTRAAADGYESASTRMKELK

SEQ ID NO: 2657 - protein, 271 aa, Frateuria aurantia
MQTFPLSLVVMTYNEAHTIARCLDSVPFAAEKLVIDCGSTDDTVAIARACGARVIHQDWLGFGPQRNFAQAQAGHDWILALDADEYLSPALVDEMTAALPALLVSDKAAAWLRRSLIYMGAPMRWYRPAVGDRMARLYHRDRARWRDVRVHESLEFKGPATELKAPFYHLNNRSLLEKQLKVLRYSELKCLDWNDRGKPLRMWQSPWVFVLAFFKDYVLRLGLLDGWRGFAISQTAASYALYKRMRYFEMKHDPDSVATAATALRRHQLDR

SEQ ID NO: 2658 - protein, 256 aa, Polaromonas sp.
MASLSVTVITKNEAHNIEACLRSVMFANQLVVLDSGSTDETVEIARSLGAEVSVSSDWLGFGKQKNRALALASSDWVLSLDADERVTPELQAEILAVLEAPAFDVYAFPRLSSYCGQYMRHSGWYPDRVTRLFRRQSAQFSDDLVHEKVLTSCQVGLLGSQLLHESFKSFEAVLDKVNRYSSAGAQGLLKKGKKASLGKALGHGFWAFIRTYFLRLGFLDGRMGLVLAISNAEGTYYRYLKLWLLQRDARRLSPES

SEQ ID NO: 2659 - protein, 349 aa, Paenibacillus paeoniae
MIVKNEEAVIKRCLDSVKGMVDEIVIVDTGSTDQTIEIARAYGASIHHYTWNHHFGDARNYALQHSTGDWNLVLDADEYIANDCTKAIRELMERGNCIGRVKRIDKFKDKEGVAYAQCYISRLFPAGVRYEGRIHEQVVSDLPRVRLGVEVGHDGYYEASRSDRNIPLLQMEIDAQQNNPYYHYQIAKEYNGIENFEQAHFHLKKAYNGLTKKEMYYSNTVVDYLYAMISSKQLDEGLAVIQSEAARLHDFPDFHFVSGQYYLELILSDTAKYVHLLPRIEQSYLKCLELGETDRYDSVIGTGSFSALHNLGVYHEVTGNTQQAVAYYREAASYGYAPSERRIAALTNM

SEQ ID NO: 2660 - protein, 280 aa, Unknown
  Description of Unknown: Desulfovibrionaceae bacterium sequence
MEPRKSLTAVIITLNGERLFDRCLDSLSFCDRILVVDSFSTDRTEAIARAHGALFIQNPWPGNARQIRFGVDWLAANAPTDWVLFLDCDEICTPELAASIRAAIASPGEVAAFSMPRRTWYFDRFLRHGGSYPDRLFRLFRPEAIRIENSGAHQRFVPEGPGGALDGDLLHYTYSSFRNQLDKLNDYAERGARDLESRGKRGGVAAGLAHGLWRFTAMYFIRLGLLDGRAGFLMAAHTAFYTFLKYVRIAEGSWGAPYDAAKLPPARPARASTQGPDQHP

SEQ ID NO: 2661 - protein, 256 aa, Serratia sp.
MSDRKTLSVVMIAKNEVELLPECLQSVSWAEEIIVLDSGSTDGSVSLAESLGAKVFTHTEWQGFGKQRQKAQSYATQDYILMIDADERVTPELRQSIEQALATTEDNVVYSLGRRNLFLGRFMRHSGWYPDRVNRLYASAHYRYNDDLVHESLNTAGAKIVPLTGDLLHLTCRDFFAFQRKQLHYAEQWAVQRHQAGKRCGYLSILTHTLGAFCKTWLLRAGFLDGKQGLLLAIVNAQYTFNKYAALWALGRNVTQ

SEQ ID NO: 2662 - protein, 256 aa, Aliivibrio fischeri
MTTPTLTVALIVKNEANHLQSCLETVQGWVDEIVILDSGSTDSTEAIARQFTDKFFVNPEWPGFGKQRQLAQQHITSDYVLWLDADERVTPELKTDIQKAISDNKPNVAYKVNRLSDAFGKEIHYSGWSPDWVLRLYRTNEAQYNDALVHEKVVTSDSVRVEKLKGRLLHFTYDNLHHYINKTTGYLKAWTDEREGKKKAGLSTALIHALGCFIKMYIIKRGFLDGRHGFILAWLATHSTFIKYIDLYLREEAKKK

SEQ ID NO: 2663 - protein, 269 aa, Marinobacter sp.
MKLPLSVYYITLNEEQRLPESLEKVRGWVDEIIVVDSGSTDHTREVAEAAGARVVHREWEGFAVQKSFAESLCSNDWVLNLDADEVLSDKLVGSIKKQFSDSIPSDIAGFSFRWKVRPPMPGHPFRHDKTHLLLRLYHTSRAGFVSEKHSIHDRPKPHTGRVVRLKGDVYHKTLISLEQLEKKYCKMSSDQACHLVVKGRNISAIRLYSEFPVKFLRYYFLHRQILNGWFGFSVSITAANRNFMRLAKAKELQMIERLEGKAQGSRQSR

SEQ ID NO: 2664 - protein, 297 aa, Unknown
  Description of Unknown: Verrucomicrobia bacterium sequence
MSEQDNRRAPLSVLVPVKNEAANLRDCLASVSFADEIVVVDSASTDGTQEIATAAGTQVVQFSWNGKFPRKKNWALENFPWRHEWVLIIDADERITSELEKEIRDAIGRDDVDGFYLNRRFWFLHGWINHCGYFPSWNLRLFRHRLGRYERVEINGDACSGDNEVHEHILLDGRAEYLSAPMEHYAFPDIATFIDKHNRYATWEAAARGQLHRRAGQEALRATPFGTALERKRWLKKLAMHAPFRPILRFLYHYLWKQGFRDGYRGWVLCRLLAWYEFVSVVKTREMPRLTTRQRDN

SEQ ID NO: 2665 - protein, 377 aa, Bradyrhizobium sp.
MKLSRSRNGPPSVSATLIVRDESEFIEACLASLSGVVDEIIIVDTGSRDDTIDKARRYPVSVHSFPWRDDFSAARNFAIGQASGDWILYIDADERLELPDSESLRLALQNESKVAWRVRFFPRVGWTAYAELRLFRNDSRIRFRGVIHEGIHAAIGEVSRSDGRDVGLSDITLRHVGYEGSQLHKVSRNVSLLRKYLRDNPDRSYCWWHLGEMLSMTGDEDAAIAAWRRGAEAARNEYRVDAGQTCSLPFVSLLQSLHGRGEPVADLLREALELFPDNLVLQWNLAKLSLERFDDEKALPILKRIAALDPHKFFDPMNSYDTALFAYLAPEALALCHFRAGRFRQAAHWYRRAAQASPEREACETKARLAEARLAQA

SEQ ID NO: 2666 - protein, 300 aa, Unknown
  Description of Unknown: Acidobacteria bacterium sequence
MTISVVLITKDEEANLPNTLESVHPLVRDGKGEIIVVDSGSTDRTLEIARSYGAKIFSEPWKGFAAQKNSAMEKASCDWVLQLDADEALEPELAQEIQLIVEFPSEMDREARQKRIHELVYVFTSRTLRELRAVADEEGKKARDYGAFYQLSGFCIPRKNFFLGRWIKHGGYHPDPKLRLIRRGKGKFEEYGAHPTMKVNGPTGHLRHALIHNAYPTLRGYIDHMNSYSSSGAGIALEKGHRRFSILNIIVRPILTFIYNYFLRLGFLDGREGLLLHLYHSGYVSWKYAKAWELARRNSR

SEQ ID NO: 2667 - protein, 244 aa, Unknown
  Description of Unknown: Chloroflexi bacterium sequence
MLTAIVLTLNEQAHLPECLASLAFADALLVFDSFSSDRTVEIAIAAGARVVQHAFKDYAAQRNAALDAVQSDWVLFVDADERVPAQLAQEVRSAIAQTDRAAWWVPRHNYILGRLTLHAGWFPDYQLRLLRPHCVRYDSSRPVHELAQITGTSAQLAQPLVHLNYATVREFVAKQRVYAELEAAGMRQAGQRAGAHQPLTMALRQFYWRFITLAGWRMGLHGALLALLMAHSQWLSYRNLRRDS

SEQ ID NO: 2668 - protein, 261 aa, Vibrio mangrovi
MIVRQPTLAVALIVKNEAKHLEACLNTVQGWVDEIVVLDSGSTDDTETVARQFTDKFFSNTNWPGFGPQRRLAQSYVESDYVLWLDADERITPELRSSIQNAVRADKPNTIYQISRLSWVFGRFIRHCGWYPDRVLRLYPTQLTQYNDALVHEKVEVTSSMAVETLSGDAIHYTYDDIHHYLVKSAGYAKAWAEQRQQRGKKSSISQGMIHAMGCFLKMYVIKAGFLDGKQGFLLSLLSAHSTFVKYADLWVKTNTTPPKD

SEQ ID NO: 2669 - protein, 284 aa, Unknown
  Description of Unknown: Verrucomicrobia bacterium TMED40 sequence
MTSIRKIPLSLIVPCKNEENNLRYCLESVKWIDEVFIVDSNSEDGTEKIALEFGAKVVQFEYSGGWPKKKNWALENLAFSNDWVLILDADECLPPEAEKEINKIVCDPNPEHDGYWINRRYFFLGKALKHAYFPNWNLRLFKHKLGRYEKITDVDTHSGDNEVHEHVVVQGSTGKLKSIMDHHAFPTIESFVKKHNRYSNWEAIVESSTEDNEDSLQHSQVKGKRRLRRLFRKLPFRPTLRFLYVYLWQGGIFDGWEGYVFARLHAQYEFLSEAKASAILRSRK

SEQ ID NO: 2670 - protein, 276 aa, Rivibacter subsaxonicus
MRLSVVLITKNEARHIEACLASVGFADEWIVVDSGSSDGTQELARRAGARVIETSDWPGFGPQKNRALAAASGDWVFSIDADERASPELAASIRAAMAAAAGPASYKVSRLSSFCGEWIRHGDWYPDDVLRLFRRGSARFSDDLVHEQVLADGPVGRLDGELLHESQPSLESCLDKLNRYTSGRALQLHRAGRSGSLSKAIAHGLWAFLRSYVFKRGFLDGRMGFVVAFSIAEGTYYRYLKIWLLARGPGPASLPPAATTHLSHGTQSPSSASTTA

SEQ ID NO: 2671 - protein, 271 aa, Luteibacter rhizovicinus
MANLPLSLVVITYNEAHTIARCLDSVPFAAEKIVVDSGSTDDTVAIAIAHGARVVHQDWLGFGPQRNFATGQASHDWLLALDADEFLSPELAAELSQALPGIMASDAPAAWLRRRTIYMGRPMRWYRPAVGEKMARLWHRDRARWTDARVHESLRFEGSAPTLRAPFDHVNNPSLAEKQLKVLRYAELKCRDWLDKNKPVRMWQTPFVFALAFIKDYIFRLAFLDGWRGYAIAQTAASYAVYKRMRYYEMRNNPLSRDTAATALHRHGLDR

SEQ ID NO: 2672 - protein, 260 aa, Unknown
  Description of Unknown: Acidobacteria bacterium sequence
MRISATIITLNEEMRLARCLESIQGIADEIIVVDSESVDNTREIAESHGARVFCRQWTNYSDQKNFASRQASHDWILSLDADECLSSSLREALVALKKGNSLAEAYAFRRLAFYLGRWIYHSGWYPDYKTRLYLKEKAHWEGQFVHETLVVDGRISRIEADLLHYTCESVSAHARSVERYTTLAAQDLWTLGRRSTFPILLGSALGAFMKGYLLERGFLDGMQGCLIATFAGYYNFLKYAKLWELERKKPEDRRKLANRK

SEQ ID NO: 2673 - protein, 271 aa, Megasphaera sp.
MEDSVSTLSVLILTKNEEENMTAVIGSARQCTSDIIVVDAGSTDGTVAMSKACGARVIYHEWENDFAKQRNIARDSSTADWILYLDADERIDVKLAEEIRQVVEVDDQSKQYGMKRKSVAFGKKFTYGVLYPDTVMRLFPRQSVVWVNKVHERPDCVLTAKILSGYMEHHTYKNWQQWEKKLCLYTTAWAENAFENGKTISKGGILGHALGGFFKMFMLRRGFLDGWMGTYMCFNHFFYELLKYLKLYELNHEKENRGIIDKTENSDQGDA

SEQ ID NO: 2674 - protein, 303 aa, Beijerinckia mobilis
MRNVAVVVLTYNEEMHLARALESVAPFAKEVFVIDSGSTDQTIAIAKARGARVLYNPFVSQAKQFQWGLDNAPITAEWVMRLDADEIIEPDLAAEIEEKLPKLASDVTGINLKRKHIFLGRWVRHGGRYPLLLLRIWRHGLGRVEDRWMDEHILVTKGRTIAFDGGFADWNLNDMSYFTAKHNRYATREAVEIINQRRNLFLHSENAMTGKNSTQALLKRCIKERIYNHIPFPISATGYFLLRYIFQLGFLDGVEGLSYHFLQGYWYRFLVGVKVLEFERAIAPFKSVDEQRAALARVSGLDL

SEQ ID NO: 2675 - protein, 366 aa, Unknown
  Description of Unknown: Sphingomonadales bacterium sequence
MKHHAQFHRDRKPRASIAAVLIVKDEARCIERCLNSIRPHVDRIVLLDTGSTDGTQMLAANCGAEVHHLPWPNDFSVARNHALDLADADWNLILDADEWILSGGGLLRQWCKGRPRMGKICVHSEVDGSNETEAGSRRNWMTRLLPRGVRYEGRVHEQAISDLPRLRLNLQVGHDGYLEHQLARKRDRNAPLLLADLKERPGDPYILYQLGKDCEMQGDLEGAAIRFGQSLEATAPEANWRHGLVIRQMRALSKTGKRQEALALADVEMPNWEDSPDFYFMVGNLLLDEAIDDPEQAVEQWLPLAAGCWERCLAIGERPDLEGSMQGCGSHLAKHNLTAVHTQMALHSARRELARICDESVIDKDG

SEQ ID NO: 2676 - protein, 270 aa, Unknown
  Description of Unknown: Acidobacteria bacterium sequence
MLLSVVLITFNEEANIARTLQSVAPLVQQGRGEIIVVDSGSTDRTLEIAQSLGARVFSEEWKGFAAQKNSALAKASGEWVLSLDADEELSNELADDIEQVLADSAPGAPQPRSAVAYWIPRRNYFLGRWTRHGGFWPDDKLRLFRRGAAQFKHTPVHETIEVLPPAKGLPIAYGHLPGHLLHYSYPTLSSYIEHMNRYSSLGAEMAAAKGHGAFSFSNIVLRPAATFIYNYFFRLGFLDGKEGLLLHLYHASYVSWKYAKAWERSRDARK

SEQ ID NO: 2677 - protein, 260 aa, Unknown
  Description of Unknown: Chitinophagaceae bacterium sequence
MQALSVIILARNEARTIAAAVESAIQVSNDVIVVDSGSTDATIDLSKAAGARVIAINWPGYGEARNLGALAALHDQILCIDADEVITSALAASINGIAFNPDVIYGFKRRNFLGSREITHGEWGHDQVYRIYNRKYARWNHDKVHEMICFTWGVEAGAGQSSRASKDIIAGSLLHYTTTDLALYSRKLDRYAQLSAEKYFSNGKKASVAKRYLSPVFSFIKNYIVRLGFLDGKNGLQIALLHAGYTRNKYRYLQKLYKQA

SEQ ID NO: 2678 - protein, 252 aa, Unknown
  Description of Unknown: candidate division Zixibacteria bacterium HGW-Zixibacteria-1 sequence
MSKISAVIITKNEEANIERCLKSVDWVDEIIVVDTDSTDKTRRIATEAGARVFQVEWQGFGHAKGFGVEKASHDWILSIDADEEIGERLASEIKGVIASDRAENGFEIPRRTSFLGRWIKYSRWYPDYVLRLFKKNSGRFNDSLVHEKVMIEGSIGRLANPILHYSYPDIDTYFIKFEKYTSLAAQELYNKGKRFHLAALIFKPIASFFRHYVTGLGFLDGVEGFLIAVLSAFGVVTRYVKLRSLEKASRHD

SEQ ID NO: 2679 - protein, 262 aa, Unknown
  Description of Unknown: Photobacterium swingsii sequence
MTTQTPTLAVALIVKNEAQNLQACLDTVKGWVDEIVVLDSGSTDNTQEVALQYTDKFFTNEAWPGFGPQRRLAQSHVESDYVLWLDADERVTPELKASILAAVAAPAKDTVYSIPRLSWVFGRYIKHCGWYPDRVLRLYPTQLTQYDESLVHEKVEVTGTMKTAPLTGDLIHFTYNDLHHYLVKSAGYAKAWADQREARGKKSSISQGLLHAMGCFLKMYVVKAGFLDGKQGFLLSVLSAHSTFIKYADLWIRTSTEPAKEL

SEQ ID NO: 2680 - protein, 258 aa, Erwinia iniecta
MSARQRLSVVMIAKNEAGLLPDCLASVSWADEIILLDSGSSDQTPEIARQHGVKVYQSEEWPGYGLQRQHAQRYATGDMILMIDADERVTDELRASIERVLDCPEPHTVYSIARRNLFLGRFMRHSGWYPDRVTRLYPRDYHYNDNQVHESLDTREAHVVPLRGDLKHLTCRDFSAFQRKQFAYAEAWAKQRHQQGKSCSMFSVFSHTISAFLKTLVLRAGFLDGKQGWLLSVVNAQYTFNKYAALWALNQAADKGSL

SEQ ID NO: 2681 - protein, 258 aa, Pantoea septica
MSARQRLSVVIIAKNEAALLPDCLASVSWADEIILLDAGSSDETAEIARQAGAKVYRAEAWVGFGKQRQRAQRYASGEMILMIDADERVTPTLRASIEAVLTQPPAGTVYSLNRSNLFLGRFMRHSGWYPDRVMRLYPRALSYNDNLVHESLETQGAPVVRLQGDLQHLTCRDLIVFQQKQLAYAAAWAQERHQRGKRCGLFSIFSHTLGAFLKTLLLRAGFLDGKQGWILAVVNAQYTFNKYSALWALNHAADKGRL

SEQ ID NO: 2682 - protein, 374 aa, Unknown
  Description of Unknown: unclassified Ralstonia sequence
MSKHAKHRRTGSTRSEIALVVIARNEAACIERCLLSAKPHVDRMIVLDTGSTDDTVAIAQACGAQVHHFTWVDDFSAARNAALAAANADWNLVLDADEWIESGTEELRDACTFGPLLGVVCIRSEYDLSGHVEHSNSWIARLLPRGVRYKGRIHEQPAANLQRVRLPLVIGHDGYMNAKLDRKRGRNHALLQQELAEHPNDPYILYQLGKDFEINLKDPAQAAAHYQRALTTAPKTAPYRHDLCICLLACLSKTKQLDAAITLAGEWMEEWSGSPDYFYMLGHLMFEAAAQNAAQAEKQWLPMAESAFLKCLEIGEQPKLDAAVFGRGSFAAAKYLALTYRAQADTLAIKANHFSNLARQMQENTASAATPVAA

SEQ ID NO: 2683 - protein, 249 aa, Pusillimonas sp.
MTLSVIIITKNEAAHIGECIDSVSFADEIIVVDSGSTDGTREIAQAKGARVSLTDDWPGFGRQKNRALDLASCAWVLSIDADERVTPELALEIQRELAAPQSDAYKIARLSNFGGRWIRHSGWWPDHVLRLFKRGTARFKDVAVHESVQTTSSVTTLKNHFLHYPYADLETFIAKINHYSSEAAGMMHAKGRRTSVLGATGHAVWTFVRIYLIRRGFLDGKEGFILATMGAAGSFFRYNKLLFLNKQNK

SEQ ID NO: 2684 - protein, 260 aa, Rouxiella badensis
MSAQKRLSVVLIAKNEASLLEDCLKSVSWADEIVLLDSGSSDDTPSLARHLGAKVFENKDWQGFGKQRQIAQDHATGDYILMIDADERVSPELRQSIEACLQQPDANKVYRLGRRNLFLGRFMRHSGWYPDRVNRLYKADKYRYNDDLVHESLNFQGAEIVDLKGDLLHLTCRDFFAFQRKQMNYAEAWAKQRFEQGKRCSYFSIISHTLGAFFKTWILRAGFLDGKQGLILASVNAQYTFNKYAALWAFSHQLQKSEPL

SEQ ID NO: 2685 - protein, 319 aa, Sphingomonas sp.
MTTVAVVILTFNEERHIARALESISSFATQIFIVDSFSTDATVSIAMRHGAKVVSRDFVNYADQFQWGLENLPINAEWTMRLDADEVIDPALAAEINQKLPELTVDAEIGGINFKRRHIFMGRWVRHGGRYPLILTRLWRSGKGRIEDRWMDEHIVVNSGKIVMLENYFSDINLNDLTFFTDKHNKYAVREAIDALNERYNLFPGEFTVTSESASFQASFKRFIKEKIYNNLPFWMGPLLYFVWRYIFQLGFLDGRSGLIYHFLQGFWYRFLVGAKIYEFDRHLRPLVSAAERLTMLEKLTGKNLAPRTRSIEKPAIRL

SEQ ID NO: 2686 - protein, 252 aa, Haemophilus parainfluenzae
MPTISVAMIVKNEAADLAQCLDTVKDWVNEIIIVDSGSTDNTQEIAEQYGAKFYSHPDWPGFGKQRQRAQQYVTSDYVLWLDADERVTPKLQESIQQAVQQDAANTVYDIPRVSEVFGREIRHSGWYPDYVVRLYRTNYAGYNDSLVHEKVVYPENTKVQKLTGDLEHFTYKSIHHYLVKSAGYAKAWADQRQTKGKKATLWQGISHAISCFVKMYILKAGFLDGKQGFLLAVLSAHSTFVKYADLWERNQH

SEQ ID NO: 2687 - protein, 277 aa, Unknown
  Description of Unknown: Phyllobacterium phragmitis sequence
MSISVLIMTLNEEANLPACLASLSWSDDIVILDSFSTDRTVEIAEAAGARVYRRAYDSEDRQRMYGLTEIEFKYPWVYTPDADEITPPDLRDEMLAIARDPTRPEAFFKARYKNMFMGRWIRRSSLYPTWITRLVRPDRVRFERSVHSRCTGDGPTGELKSHFIHYSFNKGLEAWYDKHNRYSSVEADLSSGRRLDRKIDWKSLFSAKSDLRRRGLKALSYRLPFRPTLRFLYMYLLRGGFLDGKPGYFYCRLLSAYEFMIVVKTEEQRQRPRGFAG

SEQ ID NO: 2688 - protein, 251 aa, Ramlibacter tataouinensis
MTRPPRLTVIIITRNESARLRACLESVAFADELVVVDSGSTDDTVAIAQALGANVRQTADWPGFGPQKNRALDMARGEWVLSIDADERVTPRLRASIEAAMVQSRFEAYTVDRRSSYCGQYMRHSGWYPDRLVRLFRRGKARFSGDLVHERLLVDGTAGALEGELLHESFDDFESVLDKVNRYSSDSARALDARGVRGSLGKAVGHGFWAFVRTYLFKRGFLDGRLGFALAVSNAQGAYYRYLKLWLLQRR

SEQ ID NO: 2689 - protein, 250 aa, Unknown
  Description of Unknown: Chitinophagaceae bacterium sequence
MQANLSIVIICKNEADNIERAIGSARGLVRDIVVYDSGSTDNTIEMVEAMGLPVHRGEWLGFGPTRRAATLLAQNDWVFCLDADELLSESLVQELDALRLEPGCAWEVQLRNHLGKRYIRWGAWRNDFRLRLFHRRECNWNDNLIHEKVVPLQPVTIRRLQGGIWHRTARDIRDYRGKMENYARLTAEMYFRKGKRAGLLQRLFSPLLTFVKSYFGKLGFLEGMTGLRLSLATASYTRRKYQYLKSMSQR

SEQ ID NO: 2690 - protein, 252 aa, Sideroxydans lithotrophicus
MPSLSVILITKNEAANIRDCLQSVAWADEIIVVDSASSDDTADIARAMGAQVYVHADWPGFGPQKNRALGYASKDWVFSIDADERVTPELRAELEQAMRTGNAEGYYCPRLSQFCGKFVHHSGWYPDYVLRLFKRGTGRFSDSLVHESVLMDGAAAKLKSPLLHYSYLTTADVERKVEHYSNAAAQQMLQAGKRSSWVGAMLSGGWAFVRTYIIRLGILDGAAGWSIALMNARTTYLKYRKLAVLNSTRISH

SEQ ID NO: 2691 - protein, 258 aa, Unknown
  Description of Unknown: Gammaproteobacteria sequence
MRTRKISCFVIVCNEEDRIERCLQSLSGWVDQLIVLDSGSKDNTVAIAQQYADKVYQTDWPGFGPQRNRALTWCEHDWVLNIDADEVMTDALKAEIDAVLSEPDLQENLFKMPWHTYFFGKLLKHGRYSSPQGKLFLKTGVSFKNRQVHETLLIPNEKSRTLKSAIIHHSWRSYHHAQEKHLKYACLLAEEKYAKGKRSSLAFAVLRFFTDFLQQYLLHLGFLDGWRGFLMAIILGQYGFNKYAALVTLQAEHKAKQQ

SEQ ID NO: 2692 - protein, 250 aa, Fluviicola sp.
MKISATIITLNEERNIERCISSLKGVADEIIVLDSFSKDNTEKICKGLEVTFTQRLWEGYASTKNHLNSLAQYDYILSIDADEALDEELKQAILKVKERTDPEIYSLNRMTNYCGKWIKHSGWYPDVKIRLFPKEGSYWDGEFVHEELVYPMNLQVIQLEGHLSHYSYYDYKDHRARADKYSTLTAMKMYKAGKKASVLKPYFSALARFTSMFFIKLGFLDGWKGFKIAQISAQSNVFKYQELRRLNREE

SEQ ID NO: 2693 - protein, 277 aa, Unknown
  Description of Unknown: Parcubacteria group bacterium GW2011_GWA2_45_14 sequence
MLSAIIITRNEASSIEGCIASLSFADEVIVIDSGSTDQTMLLAKRCGAKVFTHAWAGYGEQKNFGAAKAMGQWLLFIDADEKVSPALDDTITSLINTPAANTYDYYWLRIITIFLHRPLTHLYGNNLRLFKKSAGHWNDAPVHEQVVAGNNQTIKLGDPLSGRLFPPLFHYSHHTSSSYLKKMHHYTTLDANQMYTTGQHRSGRSYQPSILLPYRLFLRQLVKLLFYRRGFLDGLAGYVWCVLSAYYEYDMSKKYVRLSRIEPQIPFNPSSPDKPLS

SEQ ID NO: 2694 - protein, 258 aa, Pantoea vagans
MSARQRLSVVMIAKNEAELLPDCLASVSWADEIIVLDSGSSDDSVEIATQAGAQVYKSDDWQGYGIQRQRAQHYATGDMILMIDADERVSPELRAAIEQVLVAPPSRTVYSLGRSNLFLGRFMRHSGWYPDRVMRLYPRTFHYNDNLVHESLQSDGAPVVALPGDLEHLTCRDLIAFQRKQLAYAEAWATERHQRGKRCGLFSVFSHTLGAFVKTLLLRAGFLDGKQGWILAVVNAQYTFNKYSALWALNHASAKGRV

SEQ ID NO: 2695 - protein, 250 aa, Pusillimonas sp.
MTLSVIIITKNEAAHIADCIASVSFADEIIVVDSGSTDATRDIAAGLGAKVTLTPDWPGFGQQKNRALDLATCDWVLSIDADERVTPELAREIQQVLGQPRADAYKIARLSNFGGRWIRHSGWWPDHVLRLFKRGSARFKDVAVHESVQTSSPVAVLDGHFLHYPYADLETFIAKINHYSSEAAAMMHARGKRTSVLGATGHAVWTFIRIYLIRRGFLDGKEGFILAAMGAAGSFFRYNKLLLLQKKPNK

SEQ ID NO: 2696 - protein, 260 aa, Rhodoferax antarcticus
MKKVTLSVIIAAKNEGAQIGECINSVSFADEVLVLDSGSTDDTATRARKAGANVHTTDWPGYGPQQQRGINLATSDWVLSLDADERITEHLHDEIQAAICRPDFDGYFLPRHSSLCGVFIEHGGWRPDYTLRLVRRPLAGFTDHFLHAHMTVNGKAGHLKSPIVHYSYRTLDDLLEKMNRYSKGAAIDSFTRGGSSSLTKALAKGIWAFVRTYFVRQGFRDGHIGLVLAIYNAQTTYYKYLRLWMMTNDKLKETPKKFFK

SEQ ID NO: 2697 - protein, 435 aa, Unknown
  Description of Unknown: Verrucomicrobia bacterium Tous-C9LFEB sequence
MSLSAVLIVKNEEENLPRCLRSLEGVCQEIVVVDTGSTDGTVALAQQAGARVSFFPWNGNESDARNYSVQQATGDWLLVIDADEELSLELNGELRELMPELMRRPDIRSGSLIWENHFDGNEVNRTRILRLSRREGFRFDGDIHPTGTYQPETHPLRGALHHFGYQWTPERRERKAQHILNHLKPYLQKPHPAFGRWCQYLTALNLIGEETHFLEMWSEVAHYTPEERIASESTPSWLENSANFFRHFACKDDFTSAAFYADEILSAFPRHATSRFYRLQGRVKERRWKEVLTESQQLLEFLAHDPGDNNPTWAALQCPTARAWQWLAERQLENPRAENPPAWLIDPITLPTFLFGNRAPTLPPEAAPEGAELLKALIEAETLDRCHSGAATLRQLSRCLQRWPHLNWFRMGLDKLERGESFRLETLAHRTVHLV

SEQ ID NO: 2698 - protein, 340 aa, Butyrivibrio sp.
MVTISLCMIVKNEENCLEKCLGSLKGLVDEMIVVDTGSTDRTKEIANAFGAKVYDFKWTGDFSEARNFSFSKATCDYIYSADADEELDETNRERFLQMKRDLEELDIDIVQMYYCNQLSFRTVYNFDRELRPKLFKRVRYFTWEDPIHEQVVLDPVIVNSEIEIIHNPGENHSARDLNTFRKAIADGKFLSRRLYGMYARELMMAGTDDDFLKAKSFFEESLKDTHRSLDEIKEGSCILSHIAVIEGDVSALLKYALKDAITEMSSEVCYELGDFYYSQKDYDEAIVWYYNAAYECESILDVKKSKELPRLAIAKCYRALGNSELAEDYEKEALEVQKEE

SEQ ID NO: 2699 - protein, 252 aa, Unknown
  Description of Unknown: Chitinophagaceae bacterium sequence
MIKFSVIILAKNEERTIAAAVASAKQVSDDVLLVDSGSTDRTIPLATAGGARVLSISWPGFGAARNLGAAAAKYEWVFCLDADEVITGELAASLRVWQPDGQVLYGCRRRNFVASHEIRYGEWGHDRVMRLYNRNYWEWNADKVHENVVRKDGGERRRMVLPGALLHYTTTDLDTYRKKLDNYARLSAVKFFEAGKKGTFSKRYLSPVFGFVKNYITRMGFLDGSDGLRIALLHAGYTRKKYRCLDELYKLA

SEQ ID NO: 2700 - protein, 275 aa, Hymenobacter sp.
MNLALDLTIAIPVRNEERNLAGCLEAIGPDLARHIVIIDSGSTDKTVEIARSRGVEVIDFKWDGRFPKKRNWFLQNHTPTTKWVFFLDADEYLTTDFKTELRRTLQDQQANKVGYWLSYTIYFLGEQLKGGYPLRKLALFQVGAGEYERIDEDQWSKLDMEVHEHPVLTGEIGTINSKIDHQDFRGVSHYVLKHNEYAGWEAARFLKTNSAAISNKWTWKQRLKYRLMQSIWIGPAYFCGSFFLLGGFRDGARGLAFAILKMSYFTQVYCKIREK

SEQ ID NO: 2701 - protein, 357 aa, Unknown
  Description of Unknown: Clostridia sequence
MVTISLCMIVKNEEAVLDRCLSSVEAAVDEIIIVDTGSTDMTVPIARAHHASIYTFPWIDDFAAARNFSFAQATMDYILWLDADDVLTEMNRDKLLALKQSLTPSYDMIVMLYHTAFDAAGRPIFSFPRERLLRREAHLQWEGAVHETIPYADHRLMSDIAIEHHKLHANDPERNLRILEKIKAEGLLTLRQQFYYARELADHQRFAEAIIQYEAFLQDPHGWSENQIDACRGLAVCHRQLGHGEAAAESLIRSFLYAPPRGEVCCGLGGYFYERGQWEQAVFWYRLASELPLPNMTGGFVDPDCYGYIPWISLCCCYDKLKDWQQAWSANEKAGALKPEDAAYLYNRRYLSDKKPQ

SEQ ID NO: 2702 - protein, 270 aa, Unknown
  Description of Unknown: Acidobacteria bacterium sequence
MPKLSVTVITRNEAADIGEALQSVAWADELIVVDSGSTDDTVTIAQRFTPHVVVREWPGYVAQKNYAASIASHNWILSLDADERVTPELAREIQHVLAAEPPHAGYRIPRVTWHLGKWIRTTDWYPDHQLRLYDRRAAEWTGRYVHESVSIRRSASVPADGATGRLRGELEHFAYRDVADHLETIDRYTTDAARQMHEAGRRASLWQIAGHPPLAFLRNYLARGGIRDGAAGFIISALNSYYVFLKFAKLWELQRVPSPEPRAPSPEPPE

SEQ ID NO: 2703 - protein, 260 aa, Rouxiella chamberiensis
MSAKKRLSVVLIAKNEASLLEECLVSVSWADEIILLDSGSSDGTRALAQKLGAKVFENADWQGFGQQRQRAQSHASGDYILMIDADERVTPALRQSIEQCLRQPEDNAVYRIGRRNLFLGRFMRHSGWYPDRVNRLYQADKYQYNDDWVHESLNTNGARIIDLKGDLLHLTCRDFFAFQRKQTNYAQAWAKQRHQQGKRCSFFSIISHTLGAFFKTWILRAGFLDGKQGLILAGVNAQYTFNKYAALWAFSHQLQKSEPL

SEQ ID NO: 2704 - protein, 254 aa, Burkholderia sp.
MAEPTLGVALIALNAAARLAECLDALSFADDVVVVDGGSTDSTVEIAKAHGARVIVAADWPGFGPQKNRAVAALDTDWVLSIDTDEIVTPELAASIQAAIRAPRAQVYALDRLSSFCGSWVRHSGWYPDWVPRLFQRESARFSDDLVHERLVFDGPSARLDGQLLHYSYEDFETVLRKLDAYSSAGAAQRREAGKRGGFAKALGRAAWAFARTYLLRRGFLDGRAGFMIAVFNAETVYYRFLKLGHPRPEKAGN

SEQ ID NO: 2705 - protein, 302 aa, Unknown
  Description of Unknown: Candidatus Parcubacteria bacterium sequence
MNLKSGKISVVINTLNEAVLAEQAIRSVSWADEVVICDMHSDDNIKVVAKKLGARVIEHERLDFVEPARNLAIAETTGEWVLVLDPDEEVSDELGVKLKEITEDNKISFVEVPRKNIIFGKWMIASFWWPDYNIRFFKKGKVVWSNEIHRRPQTLGEGIKLPDEERYALIHHHYKSISQFINRMDRYTSVQARELVKNGYRFRWSDVVEKPLNEFLGRFFANQGFKDGLHGLTLSLLQAFSFLIVYLKVWEEKRFKEENLDFKDIVMIGKSAGKDIDYWYKYGNLSKNPLKRLVERVKNKIL

SEQ ID NO: 2706 - protein, 269 aa, Kushneria aurantia
MSSADNAPLPITGVVIAQNEAANITACLASLARLCSELIVVDSGSGDATRELARAAGATVIDQPYLGDGPQKNVGPSHAHHRWVLSLDADERLSDEAVAAIAALDLAATEHDGFALRRRNHIGSRWITSCGWYPDYCLRLYNRERTAFGDSRQHASVQAARPCRLEADIDHYSFANLSELFTKAGGRFSTRAAKIMYLKGKKVNACSPFIHGANAFLRKYLFQRGFTAGVDGLSVALSASLNAYLKYAKLLEYQRDPRVREHEDFDRVW

SEQ ID NO: 2707 - protein, 300 aa, Cupriavidus sp.
MTSISVLILTKNEASDIAGCLESVAAITDDVHVLDSESTDETCSIAAALGAKVTVRPFDNFAAQRNFGLHQLPILNDWVLMLDADERLGQALVEEALALVATCDDSVAAARMGRRDFWLGQHLKHASISPFNIRLVRRSCVHFEREINEVLVVDGNIAELSNPFDHYPFSKGMKHWLNKHNLYSTMEAELIVRNRVGRPAIGKALFSRDPSERRLHQKRIFYRLPARPLIKFFYMLVLRRSFLDGLPGLHYTLLQCIYEYMIVLKTLELRERQAAEEKGLESPTLQASTASRVPKATEPT

SEQ ID NO: 2708 - protein, 245 aa, Unknown
  Description of Unknown: Flavobacterium saliperosum S13 sequence
MSTLSVIIPTYNEVSYIEDAVKSVAFADEIIVIDSFSTDGTKEKAIALGCKVLERKFDNFSSQKNHAIASATGDWVLFLDADERVTQKLKYEILSVIENGKHSGYKICFPHFYMNRFLYHKVDKVTRLVKNNNIHFTGDVHEKLHVEGSIGILKNFMIHYTYKGLFHLLQKKDSYAWFQANTSVKKGKKATYFHLFFKPFYRFFSSYILKRGFMDGVPGLALASINAYGVFSRYVKILLIEKGLK

SEQ ID NO: 2709 - protein, 264 aa, Pyrinomonas methylaliphatogenes
MLFAEVADVKITATIITFNEEENIAAACESVAWADEILVVDAGSSDRTREVARSCGARVIEREWPGFAAQKQFAAEAASHDWIFSLDADERVSPRLRESILSLRHLDEGALADGYRVARRSFYMGRWIRGGGWYPDYQLRLYHRARGRWQGAYVHESVKMVEGARVVILEGEILHYSVRDAAHHHRMIGERYAPLGARQMYEAGQRTSPIKIALAGPAAFLRSFILKGGFRDGLAGYAIARFAAHHAFLKHLLLWEMQRKGESE

SEQ ID NO: 2710 - protein, 259 aa, Unknown
  Description of Unknown: Candidatus Pacebacteria bacterium CG10_big_fil_rev_8_21_14_0_10 _45_6 sequence
MISVVLATHNEAANISRCLDSVKDFADEIIVLDGSSSDDTVTLAKKFAARIISTKNNTNFHINKQQAIDAAAGDLILQLDADEIVDNDLATFIVEQSKRAVTSLAKNEPVAWYIRRKNDFLGKFLRKGGQYPDAVIRLFYRGRAELPQKNVHEQLSVDGRVGMATGHLLHFPYPTLASYLEKFNRYTSFEAERRWKTGERPSISQTITAFTVAVLITFYKLFLRHRGYVDGWRGFLFASLSALHHPVVAIKLWELQERQ

SEQ ID NO: 2711 - protein, 250 aa, Bordetella bronchiseptica
MTLSVIIITKNEAANILACLESVAFADEFIVVDSGSTDNTVELVRDFGARVEVTPDWPGFGPQKNRALDLATGDWVLSIDADERVTPELASEIQAAMAGATADCYEIARLSDFCGRFIRHSGWWPDYVLRLFRRGSARFTDAAVHERVVPAQGQPARLRGHFLHYPYNNFDALIAKVNRYSSDAAAMMHARGKRATVFSALGHGFWTFVRIYLIRRGFLDGRHGLVLAVTAAAGSFFRYAKLMFLSEPRK

SEQ ID NO: 2712 - protein, 256 aa, Bordetella sp.
MNSPTLGVALITKNAAVRLAQCLDALDFADEIVVVDSGSTDATRAIARAHGARVIERPDWPGFGPQKNRALEALATDWILSIDADEVVSPELAASIRATIAAPLADVYAIDRLSSFCGAWIRHGGWYPDWIPRLFKRGAARFSDDLVHERLVFEAPARRLSGKLLHYSYEDLDAVLRKLDAYSSAGARQRAAAGKRAGLGTALARGAWAFVRTWVLRAGFLDGRAGFMIAVFNAETVYYRFLKLAQYAGQDKRQDR

SEQ ID NO: 2713 - protein, 298 aa, Unknown
  Description of Unknown: bacterium sequence
MRNSNRGQPVPPRSTIISCARRSLTLGRSPASLSAACAARRSRRGLESEQITAVVLTKDEAANIGACLRSLPAGMPALVVDAESADATRVLAQDCGARVVVRPWDGFASARRAALALTSTPWVLFIDADERLDDALRASVLAAPAHESVGYELLRTTEFCGRPMRCAGWNDEPVLRLFRREAVRLEARPAAGGSAQLHERWVAEGRVERLRGRLEHRSYPTIADYRRKFARYTAIEAAGISPSLGRALAAAARACVRWAWLYLARGGWRDGWRGAYVCTMSALYPVVVQFRALRGVSR

SEQ ID NO: 2714 - protein, 266 aa, Unknown
  Description of Unknown: Burkholderiales bacterium PBB3 sequence
MSKISVYIIAFNEAEKVAATIESARWADEIIVVDSWSTDSTAEIASQLGARVVQVKFQGFGDLRNQALAACTHDWIFSLDADERCTVEAAQEIRSVVNDPNAVDAYWMPRRNFFMGQWIRHSGWYPNYRQPQLFRKGRMTYEPKQVHEGYVLHSDKPVGHLTQAIWQFPFKNMAEVMHKANRYSSLGAERVAGQPVSMWTAFSHGLWSFVKHYLFKLGFLDGWPGFVIAFGNFEGTFYRYVKAMEIQKGAQWKLPTEVTTYVKPKD

SEQ ID NO: 2715 - protein, 260 aa, Leeia oryzae
MASIPDAPKPLSAVLITKNAGAHLSACLTSLAFCDEIVIVDSGSTDNTEAIATQFGARFIFQEWLGFGPQKQFAVNQARHDWVLCLDADESVSPRLAASIQVALTRSDYAVYRMPRCNRFMGRWLKHGEGYPDYNIRLFDRRQAQWSAHTVHEHVVTRQPVGTLSGDLMHDSADDISVYLDKQNRYTTLQAAALVAQGKVPTVSKMLFSPLLRAFKMLVLKGGWKDGAAGLVHISIGCFNSFIKYAKARELARQKQEHNS

SEQ ID NO: 2716 - protein, 266 aa, Alteromonas indica
MKRRPISCFLIVRNEADRIEACLQGLAGWVDQLIILDSGSTDNTAQLCRQYTDEVYITDWPGYGPQRNRALAKCQHEWVLNLDADENITDDLKAEIDTVLSEPDLDANILRLPWQTYLFGKPLNHGRYSTAQGKLFLNKDGAQFKNSQVHEVLQIANPKVRTLRHPLKHYSWRTYQHLQEKHLKYACILAQEKHARGKTGSLPYAALRFVTDFLQQYVLRGGFLDGKQGFFMAMVLGQYAFHKYAALAALQMQQDADNTPSRETSS

SEQ ID NO: 2717 - protein, 262 aa, Curvibacter sp.
MSQISVYIIAYNEAEKVAATIESVQWADEIIVVDSNSTDGTQDIATRMGARVVQVVFKGFGDLRNQAIAACTHDWIFSVDADERCTPEAAAEVRAIADDPNSLDVWRVPRRNYFMGRWIRHSGWYPNFRQPQLFRKGTMSYDLKPVHEGYVLHSDKPLGTLKNAIWQFPFKNMAEVMHKANRYSSLGAEKVVHKKISMGSALAHGIWSFVKHYIFKLGFLDGWAGFMIALGNFEGTFYRYVKALEMQKGEAWKAPKSSAGKT

SEQ ID NO: 2718 - protein, 298 aa, Unknown
  Description of Unknown: Acidobacteria bacterium sequence
MTISVVLITQNEEANLPMTLESVMPLVREGRGEIIVVDSGSTDRTLEIARSYGAKIFSEPWKGFAAQKNSAMDKATCDWVLQLDADEALEPELAEEICRIVEFPTDMDRKQRKGRIQELAYVFSPRTLKEVHQATQRAGTKTRDYGSFDRLSGFWIPRKNFFLGRWIKHGGFYPDPKLRLVRRGAGKFEEYGAHPTMKVDGPTGRLKHALIHNAYPTLRNYIGHMNSYSSAGAGIALEKGHRSFSFVNILLRPLLTFVYNYFFRLGFLDGRQGLLLHLYHSVYVSWKYAKAWELERKA

SEQ ID NO: 2719 - protein, 256 aa, Alteromonas sp.
MSNPCPLSVYLITFNEAERLDEVLSAVSFAAEIIVVDSGSTDDTIMIAERHGARVIHRNWPGFAKQKAFAMSQCTQPWLLNLDGDEVLSEESAAHIQTVVTGENPSHGAYRLHFEDIFWGRPMSSKAAKRHIVRLFRQGTARYPEDRMVHENVKLEKGTTTGDIKGLVMHYGYGSTELLMNKQNSYSSLKAQQKFNSNKKPSLLKLLLVFPLTFLKTYLFKRHFMSGKRGLTHAYIESMYAFLKEAKLFELTERNK

SEQ ID NO: 2720 - protein, 299 aa, Unknown
  Description of Unknown: Verrucomicrobia bacterium sequence
MNEQSDARAPLSVLVPVKNEAANLRDCLASVSFAEEIVVVDSASTDGTPAIAKAAGARVVQFVWNGNFPRKKNWALENISWQNEWVLIVDADERITPELEREIREAIRRTDVEGFYLNRRFWFLGGWIDHCGYFPSWNLRLFRHRRGRYEQIEINDSALSGDNEVHEHVLLNGRAEYLSAPMEHYAFPDIATFIEKHDRYSTWEAAASGKLYEGESEKTLRAIPFGTAVERKRWLKKLAMKAPFRPSLRFFYHYVLKQGFRDGYRGWVLCRLLAWYERMILLKEREMKNRSCKSSAGPF

SEQ ID NO: 2721 - protein, 249 aa, Bordetella petrii
MTLSVIIITKNEAAHILGCLESVAFADEFIVVDSGSTDNTVELARDFGARVHVTPDWPGFGPQKNRALDLATGDWVLSIDADERVTPELAREIQAAIAAPQADAYEIARLSDFCGRLIRHSGWWPDYVLRLFKRGTARFTDAAVHERVVPERPALKLHGHFLHYPYPDLDALINKVNRYSSDAAAMMHARGKRATVFSALGHGFWTFVRIYLIRRGFLDGRHGLVLAVTAAAGSFFRYAKLSFLSDARK

SEQ ID NO: 2722 - protein, 403 aa, Lautropia mirabilis
MKQTEKAARSRTVPKIVNIRPPGQSPVMPAGGSRMKTIALTMIVKNEARSLARCLDSVAPWVDKMIVLDTGSTDDTIAIARAHGAEVYERRWTNDFAAARNAALAHSDADWNLVLDADEWLTSGGEYLQALRHDSRRAIHNIRIDSDLGSGSNTLISSHRISRILPRGVRYKGRIHEQPAHNLPIIDAAVTARHDGYMQEQLDTKKGRNMALLEKSLAERPEDPYVHFQLGKQYDIQLQYAEALPFYRRARELVQHRTAWYHDLVVRTIECLRHEGRLEEAMIFASDEMPYWEQSADFYFVVGCLLLDQMQKHPEQGESLLPMIEESWLKALAIGERPELAGNVSGRGSFMAAAQLWALFDARKEVEKAARYKDMQKKFYAQYKEAADAGLVSAAALPEQQPA

SEQ ID NO: 2723 - protein, 300 aa, Jhaorihella thermophila
MTLTVVILTKNEARHIRRAIESVAAVADQILVVDSGSTDDTVSLAEGFAAKVIHNPWRNYATQFNFALDHLPDGTDWVLRLDADEIVLPELAEEIAAKLGGLNPDVAGIYVSRRMCFLGRPIRWGGVFPIRVLRLFRAGRGRCEDRWMDEHILVDGPTVDFHGEILDDNLNSLTWWTEKHNAYASREVVDLLNLEYRFMKHETVANLRGGQQAGVKRWLKENIYARLPGGSRAFAYFLYRYVFRLGFLDGREGTAFHVLQGFWYRYLVDAKLHEVRRYMEQNGADPVTAIRDVLGIEPLK

SEQ ID NO: 2724 - protein, 263 aa, Unknown
  Description of Unknown: alpha proteobacterium U9-1i sequence
MPEAPKISCYIRTKNEERMVADVIRAAFQIVDEVVVIDCGSTDKTIALAEAAGARVVNAPWLGGGKQKRIGEDNTRNDWMLDLDADEIVTPELAQEIRDLFSHGDPPCPVYQLTLVTAPPIGEPWWQSSVVTRNRLYDKRVIRARDHAGWDQLEIPSGMKVGKLKAPALHKSFRDLHQLGDKFNRNSSSRAKDTELKSFWYVALRIVFARPFYFFHHYVMRGMWRGGWYGFAVANIAAHGRWLKDAKMMEVYMRKRQDAKQNG

SEQ ID NO: 2725 - protein, 377 aa, Unknown
  Description of Unknown: Nitrospirae bacterium sequence
MRLSGCLLARDEEANLPRCLASLAPVVDEVVVCDTGSRDRTVAIAEAAGARVVHFPWCDDFAAAHNFLHRHATGDWILWIDADEELLPIPRKRLQRLLRAPRALAYLVTRLDLVAADDPESYTEMVLPRLFRRRPELTLVGRCHPEFRHPSLGEVAAREGLAIAPSPVRLRHYGYTAEQRPGKLRRAARLLALELEERPGQLYYQIELGRTLLELGDPSGHRILAEATAEVWRHRHDRRPPTPHVALLFDYLLGPPAPAAGGLPPRAAVAELAARWFPDAAPLLWRRAQIAFEGGDFATAAGLLERLLRLGRDHGYDHAVSFDPAILGDQTRLNLGVCYTRLARLEEAAACFRGLRHSPTCGAAARANLAVVERLRR

SEQ ID NO: 2726 - protein, 327 aa, Unknown
  Description of Unknown: Candidatus Woesearchaeota archaeon CG11_big_fil_rev_8_21_14_0_20 _43_8 sequence
MSTISLCMIVKDEEKHLKDCLDSVKGLVDEIIIVDTGSTDDTKNIAKRSNAKVFDFKWCDDFSKARNESLRHATKEWILVLDADEIIDKDDHDKIKRLIDTDEVAFAFDQWSYIDQKEPKAKKNTNRFSHPFYISHRPVRLFRNNLGIRFMNRVHELVEHSLKEHNLKEVKTNIIIHHFGSLKGSDFINQKAEKYAELILRQLKENPNNPRYNYQAANMYLGKGDKQKALDHFMATARVDPAYKLVHQEIAKLFLSVGKIEKAIEHLNFAMHNSPDNPSPANNLAVLYMRQKRYILAKALLEKYLKKDPKNKALLTNYTILKKLLST

SEQ ID NO: 2727 - protein, 295 aa, Ochrobactrum haematophilum
MTVSVLIMTLNEEVNLPACLASLDWCDDIVVLDSFSTDRTVEIAEAAGARVYQRAYDTEDRQRMYGLTEIAFRHGWVYTPDADEITPPDLRDEMLAIAADPDRPEVFFKARYKNMFMGRWIRHASLYPTWITRLVRPDRVRFERSVHSRASGGPGGELQAHFIHYSFNKGLEAWYAKHNRYSSAEAELSAARLLERRIDWGGILSTEHERRRRALKSLSYHLPFRPSLRFLYMYVLRRGFLDGKPGYLYCRLLAAYEFMIVVKMEEQRSRQIAALPRPAAQPRSLDAKDPERHMA

SEQ ID NO: 2728 - protein, 257 aa, Thiomonas sp.
MASVSAILITKNEIQNLPACLDGLSWCIEIIVVDSGSTDGSVALARHLGARVESRPDWVGFGPQKNRALDLAQGDWVFSIDADERVTPALAEEIQSAVQRADAPDAFSIPRLSSYCGQYMRHGGWYPDRVVRLFRRGQARFSDDIVHESLQVQGRVGQLHNDLIHISYRSLDDVLEKMNRYSSAGAEKLATRGRRASLATALGKSLWAFIRTYLIRRGFLDGRLGFVLACGIAHETWYRYLKLWLAQRPVSDKKLSP

SEQ ID NO: 2729 - protein, 255 aa, Unknown
  Description of Unknown: Acidobacteria bacterium sequence
MKISATIITLNEETQLARCLESIQGIADEIIVVDSESVDKTREIAGSHGARVFCRPWTNYSDQKNFASGQASHDWILSLDADECLSASLHEALVTLKKNNSSAEAYAFRRLAFYLGRWIYHSGWYPDYKTRLYLKDKAHWEGQFVHETLVVMGRISRIEADLLHYPCESVSAHAGSLERYTTLAAQDLWTRGTHSTFPILLGSAVGAFMKSYFLKGGFLDGIQGCLIATFASYYNFLKYAKLWELERKKPEETRK

SEQ ID NO: 2730 - protein, 290 aa, Polaromonas sp.
MPGGSAMLSARQAGPVSLAKSRAVSSLTSLQRHSLASLSVTVITHNEAHNIEACLRSVGFADQVVVLDSGSTDNTVQIARSLGAEVSVSPDWQGFGIQKNRALALATSDWVLSLDADERVTPELQLEILACLRDPAFDVYSFPRLSSYCGQYMRHSGWYPDRVTRLFRRTAARFSEDLVHEKVVAQGPVGQLRAQLLHESFRNFEAVLDKANRYSTAGAQSLLGKGKTASVGKAIGHGLWAFIRTYFLRLGFLDGRMGLVLAVSNAEGTYYRYLKLWLLQRGAKGAPGGR

SEQ ID NO: 2731 - protein, 259 aa, Unknown
  Description of Unknown: Planctomycetes bacterium sequence
MSKISCFILAYNEREKIVDAVSTVLWCDEIVLVDSGSTDGTAEAATALGARVVQVPFEGFGKLRNAALTHMTGDWIFSLDADERCTPEARDAMLRIASDPASASIWNIPRRNWFLGQWIRHSGWYPNFRQPQFFRRGAMTYDLLPVHEGWIPAAGAQVRTLPADIWQFPFTNIAQMVHKANRYSSLGTAKVGNRKGILRGLTHGGLQFFKHLILKRGFLDGRAGFFIAAAYFLQTFLKYAKRIEDGQAPPPSAGAIRRD

SEQ ID NO: 2732 - protein, 256 aa, Unknown
  Description of Unknown: Marinobacterium jannaschii sequence
MISVYLVVKNEEHNIERVLNSVRDFDDIVVVDSGSTDCTMELAGRYTDRLYSREWTGMAEQKEYAKSLCKHDWVLNLDADEELTEDLRLQILEIAARESVSGANIPIQEYFLGQAVHAKTKKNRHIRFFRQSKGAYGKERFHESPLVDGEIVELDGAINHYGEVSVEVKVDKVNRYSSGKALDKFDKGKKSSLLKLLLVMPVTFLKSFFIRRNCYNGRRGFVGSMINAFYAFLKEAKLYELELRQSDLGEKEKTRR

SEQ ID NO: 2733 - protein, 277 aa, Caulobacter sp.
MTKLSVLLCVHNEEQRLPSCLAALSFCDEIIVVADRCSDGTEAIARQYGATVVSGIFPIEGPRKHAGLARCTGDWILELDADEGVSLAFAKEVRETIERSDAADWYQTPIDNYIGDQLVRHGWGGSFGTSSAARLFRRGVKSWKSERVHPGAKLEGAYGGRLKQSLRHMVDEDIGDMFARLSRYTALRALDLADRGKVKSIVDDAFRGVRRFFKCYVSRKGYREGDLGFLISLMAGLYPILSNLRAREILRNRARGAATPPTPLAALPLRRAEAVSQ

SEQ ID NO: 2734 - protein, 253 aa, Catenovulum sp.
MSNTPISVYFVTLNEAATIAQAIQSVQGFAEIIVVDSGSTDGTQQIATNLGAKVVHQDWLGFAKQKQYALSLCQHDWCFNLDGDEVVPDDVARQIQQQVDADNCDALRIYFEDVFMGAAMHPSSHKRSIVRVFKKQNVEYPTNKLVHENVKVNGKVQDVKGCVLHYGYADAETLMAKQNKYSSLGAQEKFNKGKRHSWLKLSLMLPIMFFKEYIVRKRFLSGGRGFVQAVIDTMYAFLKEAKLYELHKTKNKP

SEQ ID NO: 2735 - protein, 336 aa, Unknown
  Description of Unknown: Sphingomonas sequence
MPPSSPRIAATLIVRNEARCIARCLNSVAPWVDKMVVLDTGSTDDTVVIAKAAGAEVHHLPWPDDFAEARNHALACADADWNLMLDADEWISTGGEELRRWCAGPPRLGFVCIENYVDGSPDPTRCWIPRLLPRGVHYEGRIHEQVASSLPRERIPVHVGHDGYLAQQKAKKRDRNQALLLRELAEQPENPYLMFQLGMEAQGQADFQTACDYLGQALARAPRDAGWRHALVVSAIPLMSHAGRLADAIALADAEFGQWPDSPDYFYVLGDVLFDQAVADPAQAVDHWLPMAQGAWERCLTIGERPDLDGSVTGRGSYLAQQSLDIVRSQLATLAA

SEQ ID NO: 2736 - protein, 341 aa, Labilithrix luteola
MAAESFRTLSLCMIVRDEESNIEGCLRSVQGVVDEIVVVDTGSKDRTITIARDFGALVVEEAWTNDFSAPRNRSIELATKDWILVLAADERIAPASGRRMREVVGRTRARGLQVRVRNLMPAGETALFDEVPQTRLFERRTEHRYEGIIHEQIAPSIVRGGGTIAKADLLVVHHGYQQDLVQGDRSRARRNLTLLEKQVELTPRDPYVLYNLGCTYKAVGNLAAARGALEAAEANDHGALDASSRLGLQTRLAQLALASRQDAIAVARARKALAISPSNPVALQVVALGLVALGDRAGALAAFAKLRRSPVVNPSLATDIDRLLARLAPAGPTARAAPLER

SEQ ID NO: 2737 - protein, 315 aa, Rhodospirillum centenum
MDDGLPASELPVVPSTGRLPVTVVIPTRNEERALPATLGTLGAFAEVVVFDSHSTDGTERIARAWGARFHQRVFDNFADHKNWALDNLEFRTDWVLLLDADERIGPDLLAEIAAILHGDRPEVAFAIPRRNVVDGVFLRRAGMYPDYQIRLIRRGRARYERRLVHEHMLADGPVGFLASPLLHEDGKGIRRYLERHVAYAEMEAVEAFIDLHRPAADHGACALPGPMARRRRLKHWSYRHLPLRFLWVFAYVYVARLGLLMGRTGLKYCLLRAFYEFKVDLFLAELRNGASPVAQAYRDLILERLGRCPPDWERR

SEQ ID NO: 2738 - protein, 261 aa, Halomonas muralis
MKISGVVITLNEAECIETCLASMSAVCDELIVVDSGSTDATCRLAEAAGARVIEQPYLGDGPQKNVGPAQATHRWILSIDADERLTDAAIATIQALDLANTGHDGFAFRRRNFIGSRWIKTCGWYPDYCIRLFDRERTAFSNSRQHASVQATQPRRLDADLEHYSFANLGELFSKASGRFSNRAAKIMYLKGKRANSWSPFIHGSNAFVRKYLFQRGFMSGIDGVSVALSAAVNAYLKYAKLLEFQRDAQVRKAEDFERIW

SEQ ID NO: 2739 - protein, 259 aa, Unknown
  Description of Unknown: Candidatus Sodalis pierantonius sequence
MSQRKRLSVVLITRNEAELLPDCLASVSWADEIVVLDAGSSDQTRHIAAQASARVFQSTDWPGFGIQRQRAQAYASGDYILMLDADERVTPPLRRAIQEVLRQPDPEVVYSCARRNLFLGRFMRHSGWYPDRVVRLYARERYRYNALPVHESLETSGAGIVALAGDLQHLTCHDLPAFQRKQLLYAEAWARERHRQGRRCGMLAIISHTYGAFLKTWLLRAGFLDGRQGWLLAVVNAQYTFNKYATLWALNHAERENDL

SEQ ID NO: 2740 - protein, 259 aa, Unknown
  Description of Unknown: Acidobacteria bacterium sequence
MPKLSVTIITLNEAAHIAAAIDSASFADEILVVDSGSSDGTIDIARGKGVRVLARAWTGYVEQKNFAAAQATHDWIFSLDADERIPPALADEIRGILAGDPPYHGYRVPRVTFHLGRWIRTTDFYPDYQTRLYDRRFARWRGRYVHESVSVDGPTGQLKNDLQHYSFADLRDQIKRINHYSTLSAKQMYEAGRRTGPIEILVHPPAAFLRNYVLRRGFLDGTAGLTISLMNAWSVGLKFMKLWELQKNPKSQIPSSKSQ

SEQ ID NO: 2741 - protein, 249 aa, Runella sp.
MLLPLSAVIITVNQEKKIAKTIEALKTLTDDIVVVDSGSKDATRTVAAALGARVFERPWPGYSEQKNFGNDQAKYDWILSVDDDEVVSDELAKSIRAAFASEPKADAFNLPFRTVFAGKLIRFGGWNPEAHIRIFNKKKIHWNTDAVHEGLTIRPEHSVQKLSGYVYHYTVDTLEQFAQKTNRYSTLFAEKGVKAGKKASFVKIYLSPAFRFLVEYVVKLGFLDGYYGWFIAKENARYTYLKYKKLGEG

SEQ ID NO: 2742 - protein, 255 aa, Hydrogenobaculum sp.
MQRRKISFVILTKNEEKNIKRAIDSIKDVADEILVIDSGSTDKTIDIAKSCGAKVIFNEWISYAAQKNFGISKAKNDIVFILDADEELSDELKNSLKDFLSSDYEIGIITRRTFYMGDFLKHIWNDEKLIRVFKKDVCKYSGDLHEKVICNHHKYYELKGYLNHYSFKNLKDQFERTLKYAKTSADIMCKNNKPFHVYNLILNPFWIFFKFFILKAGYKEGTKGLIIAFSGMFYVFMKYAFLYECQKSKEKELWK

SEQ ID NO: 2743 - protein, 260 aa, Unknown
  Description of Unknown: Candidatus Chloroploca sp. Khr17 sequence
MLAVVIIARDEEAYIEACLSSVSGLADEVIVLLDDRTTDRTAERAQQHGARVVCEAWRGFPAQRNRGLELATTPWVLFLDADELVTPALANELRATLQNEPTAAGFRLPRYNRFFGQILQGGGWYPDHQLRLLRRTAAHFDESRLVHEAASLDGAIAATSEHLWHENIVRLDELWHKQSRYALAEAQTLYRQGRIMRWRNLLGAPTREFWRRYGQLGGWRDGPVGFLLCVTMAWHELVTFLLLWSLHNACGIKKREDHVC

SEQ ID NO: 2744 - protein, 301 aa, Unknown
  Description of Unknown: Verrucomicrobia bacterium sequence
MSERSDARAPLSVLVPVKNEAANLRDCLASVSFAEEIVVVDSASTDGTQAIAEAGGARVVQFVWNGSFPRKKNWALENIPWQHEWVLIVDADERVTPDLESEIRKAICRTDVDGFYLNRRFWFLDGWINHCGYFPSWNLRLFRHRLGRYEQIEIHDDILSGDNEVHEHVLLNGRAEYLSAPMEHYAFPAIATFVEKHNRYSTWEAAAAGKLHEREGEKTLRARPFGNAVEGKRWLKKLATRAPFRPSLRFLYHYIWKQGFRDGYRGWVLCRLLAWYERMILLKEREATARARFTSYPTTPG

SEQ ID NO: 2745 - protein, 277 aa, Unknown
  Description of Unknown: Planctomycetes bacterium sequence
MCVSIFIQTLNEEQNLPSCLDSVSWSDDIVVLDSISSDRTEEICRQRGVRFYQRSYDGRGPHQNWAMEHIKFKHPWVFYLDADEHMTPELREEICAIASNPDEENVAYFCGRKNMFRGRWLRHSMPPGHIMRFFKPTNIRFERLVNPTPIIDGKHGYLRNHFIHYNFSKGITEWLDRHNRYSTYEAVEQIRALRDRPVNWKALFSRDANTRRIEAKNISFRMPFRPALKFFLLYFVKLGFLDGRPGLTYCALQALYEYEICLKIEELRRAERGEAPS

SEQ ID NO: 2746 - protein, 324 aa, Unknown
  Description of Unknown: bacterium HR21 sequence
MLPLAVTILARDSAATIARAIRSVQPIARQIVVLDTGSDDDTPSQALRLGAEVYFARWEGDFAAARNLALRHVRMPWVLALDSDEELEGTTLLAQAHLLEDPGIGGIEVQLRSVVSPEARHRFVYSHWAVRLFRSAEGIGYCGRIHEQIRPALEARGWKLVRAPILIWHYGYTPDRVRLKAQRNAELLRRELEHSPADVWLRYHLGMALFELEENEEALEVLRPCSEHPGLQPEQRMWARLRAAQAALRLDRIAEVEQLLARPLPDPELEGLRRFVLAAAVLQQRRFAEALTLLDSPVVQGSPYVPQEELEGIRTALRRLLPAQ

SEQ ID NO: 2747 - protein, 246 aa, Pseudoalteromonas spiralis
MKLSVCIICKNEKDKIERCLESVKWADEIIVLDSGSTDETRAIANKYTDKVFVRDDWQGFGEQRRRAEALATNDWIFAIDCDEVVSERLKEEIITTLAKCNEKNILKLNRLTYFCGQFIRHSGWYPDRIARIYNKKITGYNQNLVHESVVMLDCKPIELKENILHFQHEDIFGYMNKRNHYAHIGAEQMVNKGKKPSLLKASSSAFFAFIRHYFLRRGFLDGKTGFVIAVIQSQYSFNKYLFAYYK

SEQ ID NO: 2748 - protein, 256 aa, Crocinitomix catalasitica
MSTLKKISAVIITYNEEKNIETCLKSLVGIVDEIVVVDSFSTDKTESICLKYGARFIPHKFDGHIEQKNWAREQATCDIVLSLDADEALDETLQKSILSLKVDWQFEGYKMNRLTNYCGKWIRHTGWYPDVKLRLWQKGKGHWTGENPHDEFVLFDKNANIGHLKGDILHYSYHHPDDHDKQIEYFTNIAAKTHVEKGKSTFFMQRYLSAILKFIKCYFIKLGFLDGKEGWIISVKSSYAAYLKYKKINALKKHAK

SEQ ID NO: 2749 - protein, 256 aa, Ramlibacter henchirensis
MPTLSVIVIARNEARNITECVRSASFADEVIVLDSGSSDDTVERARAAGARVGVAADWQGFGVQKNRALALATGEWVFSLDCDERITPQLQQQIRQAIAAPGGHVAFSVNRSSSFCGQYMRHSGWSPDRVVRLFRRDAARFSDDLVHERVVAQGPVGRLPGELLHESMRDLESALVKLDRYSTAGARDLQRRGKRGSLATALGHGVWAFFRTYVLRRGFLDGALGFVLAVSIAEGTYYRYLKLWLLQRTPPVEPPR

SEQ ID NO: 2750 - protein, 261 aa, Methylibium sp.
MSVPNLSVIVITRNEGHQIADCLKSVAFADEWIVVDAGSTDDTREQAAALGARVTRTDDWPGFGLQKNRALALAQGRWVLSLDADERVSDALAAAIRAAVAPGADAADGPAGYQLSRLSRFCGQWMRHGDWYPDRVTRLFLRGRGRFTDDLVHERLDVQGPVGRLAGDLLHETMPTLHDALDKMNRYSSGRALDKVRAGRRGGLGTALAHGAWAFLRGYLLRRGFLDGRLGFVLAVYNAEGTYYRYLKMAFAEAAGTKTTI

SEQ ID NO: 2751 - protein, 264 aa, Unknown
  Description of Unknown: Planctomycetes bacterium sequence
MMPVLLPISAVIITLNGAKHLADTLACVDFCDERLVCDSGSTDATIEIARAAGARVEHQAFLGYGPQKQRAVESASHDWILSLDDDEVLDSEAINAIRTLDLSNPTACWSIRRRTFIGSRELRHGTWRADRVVRLFHRRTAGFTSHIVHERVRGYRLPTLLPGSMMHRSYDTCSDVIARSIQYARLKSEIMRRKKQRVHTWMLPLRACAIFSKSYFLQGGFRDGAAGFIVALSRVIDSTLPRAMLLLGEPACGDDGIATPIKHS

SEQ ID NO: 2752 - protein, 254 aa, Vibrio splendidus
MSKPTLAVALIVKNEEKHLEACLNTVKGWVDEIVLLDSGSSDRTEEIARQYTDKFYTNLEWPGFGKQRQLAQQYVTTDYVLWLDADEQVTPELKQSILKAVAEDKPNTLFQVNRLSAAFGKFIYHSGWSPDWIVRLYRTDYTQYNDSLVHEKVENQNYAIQKLDGRLHHYTYEHLHHYINKTTGYLKAWTDEREGRKSAGLTTALTHAFASFIKMYIIKRGFLDGKHGFILAWLCMHSTFVKYIDLYLREQAKK

SEQ ID NO: 2753 - protein, 265 aa, Paraburkholderia sp.
MTSPPTAPVSAQRPSLGVAIIALNAEARIAQCLDALSFADDIVVVDGGSTDATACIARAHGARIIVAPDWPGFGPQKNRAVAALDTDWILSIDTDEVVTPELAASIRQALDAPVASVYALDRLSNFCGRWVRHSGWYPDWVPRLFKRGAARFSDDLVHERLVFEGRIEKLAGRLLHYSYDDFETVLRKVDAYSSAGARQRLAAGKRGGFARALARGAWAFVRTYVLRGGMLDGQAGFMIALFNAETVYYRFLKLAHAHDGSARSP

SEQ ID NO: 2754 - protein, 256 aa, Unknown
  Description of Unknown: Acidobacteria bacterium sequence
MKISIALITLNEEANLPRTLESVTPLVRDGEGEIIVVDSGSTDRTLEIARSHGAKVFVEPWKGFAAQKNSAMEKATADWVLQLDADEALEPELADEISRELGGADNVIGFWIPRKNFFLGKWIKHGGFYPDPKLRLIRRGAGKFEEYGAHPTIKVNGPTGRLKNALIHNAYPTLRGYIDHMNSYSSSGAEVAIAKGGRGFNLVNIVVRPKLTFIYNYLFRLGFLDGREGFLLHLYHAVYVSWKYAKAWELSRSRRS

SEQ ID NO: 2755 - protein, 253 aa, Pasteurella multocida
MPTLSVAMIVKNESAHLAPCLDTVKGWVDEIVILDSGSTDNTQEIALQYGAKFYQNTDWQGFGKQRQLAQQYVTSDYVLWLDADERVTPELREAIQLAVKQNKDNVVYKIPRLSEVFGRKIRHSGWYPDFVLRLYPTKLTQYNDEPVHEKVCLPAHAVVEKLTGDLEHYTYQDMHHYLVKSAGYAKAWAEKREKAGKRGSLFSALTHAIGCFTKMYIIKAGFLDGKQGLLLAILSAHSTFVKYADLWVRTETK

SEQ ID NO: 2756 - protein, 271 aa, Burkholderia sp.
MRPDSDVQPTTTASPAAPTLGVALIAHNAAGRLAQCLAALAFADEVVVIDGGSTDDTVSIAQAHGARVIAEPDWPGFGPQKNRAVAALSTDWILSIDTDEIVSPELAASILAAISTPGAPGVEVFAVDRLSSFCGQWVRHSGWYPDWVPRLFKRGAARFSDDLVHERLVFEAPAARLTGKLMHYSYEDFETVLRKLDAYSTAGARQRRTAGQRGGFGKALGRGAWAFIRTYLLRRGFLDGRAGFMIAVFNAETVYYRFLKLGLTGQRNDPT

SEQ ID NO: 2757 - protein, 257 aa, Unknown
  Description of Unknown: Ignavibacteriae bacterium HGW-Ignavibacteriae-1 sequence
MNSCQISVALISFNEENRISHTLESVAGLCSEIIIVDSGSTDNTVAIAESFGAKVFVEDWKGFAEQKNSALSKCTKDWVLFLDCDEVLTPELRYEIAGNLCLRQDINGYIINRRSVYCGKIMQYAWQPDKKLRLVRRNSNPKWLGDFVHENLTVDGKTDEMQGEMLHFSYDSMKTHFHKTVEYARLSAENYYETGRTVSFFNLIANPIFAFCNMYLRRGAFMDGKLGLVASFSSMMGTFLKYAMLYEKKIISKSKNK

SEQ ID NO: 2758 - protein, 360 aa, Ralstonia sp.
MSAPSACADLALVVIARNEAASIARCLLSAKPFVDRMVVLDTGSIDDTVAIAQSCGALVSHMAWTNDFSAARNTALQAANADWNLILDADEWLESGGEHLRTLSGAAPSVGVVCVKNDTDATESASQLIAWIPRLLPRGVHYTGRIHEQPVSSLPAARVPIVVRHDGYTAAKMQKKGERNTQLLLDELAHRPDDPYVLYQLGKETELHHEDYTKAVTYYARAFSLAPPDAPYRRNLALRYVYSLGKADRVEEALAQGDVGIQTWPDFPDLCFALGLVLLDAAAKQPDEAGARWLPLAEQVFNRCLEIGDQPEMDGSVIGRGSFLAAQQLAIVYQMQSHALARKSEHYLTLSKQLQDASSQ

SEQ ID NO: 2759 - protein, 257 aa, Photorhabdus temperata
MNERKRLSVVMIAKNSADLIADCLASVSWADEIIVLDSGSSDDTCQIAQAMGAKVFSNIHWPGFGRQRQLAQQYASGDYIFMIDTDERVTPELRVSIEQVLAHADDNKVYSCARRNLFLGRFMQHSGWYPDRVIRLYARNRYQYNDNQVHESLESHGVPIVILKGDLRHLTCRNLIEFQTKQLNYAKAWAKQRHEQGKQCSYFSIFSHTFGAFFKTWLLRAGFLDGKQGLVLAIVNAQYTFNKYVALWEKRLQKGKN

SEQ ID NO: 2760 - protein, 260 aa, Pseudoalteromonas porphyrae
  MOD_RES (242)..(242): Any amino acid
MSESKKNRENKAPISVFIVTLNEAEHIENTLKSVSECAEVIVIDSGSTDGTVEIATELGAKVIYHPWEGYAKQKQIAMEHCSFDWVLNLDGDEELTPSALQVLCNAMEEDKYTAVRLKRIDRFINKFPTGWVKKPNNVRFYKKSDACFNAKKLVHESATVEGKELYAKEYFLHYGYNDIDTLTAKNNTYSSLRAKEKIIQGKRYSILKLLLVFPITFIKEYIFCRFFLFGNRGFIKSMMTAXYAFLKEAKLYEQNKKQKK

SEQ ID NO: 2761 - protein, 256 aa, Dechloromonas aromatica
MPATRQPLSVAIITLNAASQLEDCLKSAGFADEIVVVDSGSTDGTQALAERYGARVIEQAWLGFGPQKQFAVDTASHDWVLCLDADERVSPELQAAIENALQSPPSAAFRFARCNRFLGRYLKYGEGYPDWSLRLFDRRQAGWSDDAVHEKVIANGAVGTLKGDLLHDSAETLAIYLGKQNRYTTLAAEMAAAAGKRASFARLAFSPIIRFIKFYLVRQGFRDGLPGLIHIAIGCFNSFMKYAKLFEKQRSNAALR

SEQ ID NO: 2762 - protein, 267 aa, Simplicispira metamorpha
MPQPASAGVPSPTLTVAVLTHNEARRIEACLRSAAFADRLVVVDSGSTDDTIERARAIGAEVFVHADWQGFAVQRMRQLAYANTDYVFFLDADEVMSSAFQQELQAIVRSGSTAVWQIRWRMVAYGRELRYLRAHTKVARLFRRDQILGWTGVVHEEAVLANPDIPRRVMQTPLLHHARDSVRTSLEKMTQYALLGAAKRAAQGQRGGVLRGLLAGGVMFLRMYVLRLGFLCGGAGFLYCLFIGLEAFFRYAVLFYDRDTLTDRAGR

SEQ ID NO: 2763 - protein, 270 aa, Unknown
  Description of Unknown: Gammaproteobacteria bacterium SG8_31 sequence
MVSLAGQGPVNRISAVVITLNEEHSLSGALDSVAWCDEIVVLDSGSVDGTVEIARSYPNCRVLHQPFLGYGPQKRKAVEAASNDWILSLDADEVLDELLQQSLRAWRESGSPGEAGYYLLRRLCFMGRHFRHGRESRDRVLRLFDRRRGNFNEANIHERVELDGPTGVLSGRLLHYSYRDLDEYFEKFNRYTSVMARQMRQRGRRSSIPSLVLRQPVSFLNYYLVRGNWMNGFPGFVWSLLAATYRTVKYLKLYELQTTAYDSKQDPPVA

SEQ ID NO: 2764 - protein, 289 aa, Salinibacter ruber
MISVLVLTLNEEVNIADCLDSVAWADDLLVLDSGSEDRTVEIARSKGARVLHRDFDDFASQRNYGLEEGGLRHDWVLHLDADERVTPALRDALRDKARGGEQRAYRVPSKLMFQGRWLKHAGMYPTYQVRFGRREALTFTQVGHGQRGALPLDQVGTLDEPLLHYAFSKGIADWVRRHNRYSSDEAEHAQETQLRDVDWSALMTGDAQTRRRALKDLSYALPFRPLLRFLYIYVGRLGLLDGRPGFDYAVLLAFYEYLIGLKRREHEHRERTDAEESADSSLEMEMHEA

SEQ ID NO: 2765 - protein, 268 aa, Neiella marina
MNSSSTAPAVSVFIITLNEIEHIEQAIRSVQHLDEIIVVDSGSTDGTVEAAKALGATVVHQDWLGYAKQKHFAMQLCRNQWCFNLDGDEVVPAAVLGEILALVADDQCDAIRVRFEDFFMGSAMHPKSHKRSIVRVYKKDRIEFPLHKSVHENVKVTGRVAKIKGCIHHYGYDSVAKLLGKQNKYSSLRAAEKYAGGKRSRWLKLLLVMPVIFAKSYFLRRMFLSGWRGFIHAVVEAMYAFLKEAKLLELTRVGSSEKEKSWPNGRLK

SEQ ID NO: 2766 - protein, 301 aa, Unknown
  Description of Unknown: Verrucomicrobia bacterium sequence
MSEQADARVALSVLVPVKNEAANLRDCLAGVSFAEEIVVVDSASTDATQAIAEESGARVVQFGWNGKFPRKKNWALENVRWQHEWVLIVDADERITPELEREIRRAIRRTDVDGFYLNRRFWFLGGWINYCGYFPSWNLRLFRHRLGRYEEIGIDDNILSGDNEVHEHLLLNGRTEYLTAPMEHYAFPDIATFVEKHNRYSTWEAAAFGKLHERAGEKTLRATPFGTAVERKRWLRKLATRVPFRPSLRFLYHYVWKQGFRDGYRGWVLCRLLAWYERMILLKEREMKKRPATGQRDFVKL

SEQ ID NO: 2767 - protein, 257 aa, Unknown
  Description of Unknown: Gammaproteobacteria bacterium sequence
MPGKPPISACIITLNEAANIDLCLDSLTAFCDEIVVVDSGSSDGTRELAAAKGARVIEHAFAGFRTQKDFAVRAAKHDWILFLDADERVTPELRASILESQARGFGDAAGYRFARATEYFGAFLRHGNAYPDRVLRLFDRRCGGFLGDREIHEHVSVDGAVATLAGDLEHHAYRSLADQLSRLERYARMMAEHMRQSGKRAHLYKIALNPFWRFLRGYVLRAGFLDGWRGLIYAYVEANYVRQKFIKLWLLERGCKI

SEQ ID NO: 2768 - protein, 294 aa, Bordetella genomosp.
MNRILVSVVVMTKNEEKNIDKCLRALVDFDEVFVVDSDSTDRTVEMARGLGARVVPFRWNRQYPKKKQWCLENLPFSHDVVLYVDADEVMTPAVAQEIHACLPRFAQGAGGAFVGFDYVFCGKLLSHGHRAYKLALLHRGRARFLDYDDLNVANMWEVEGHYQPQVVGETFALRNRMVHEDHDTLYHYFDKHNRYSDWEANLRVRGLMNDPREANTGSRAFLKRVFAMLPFKGLTIFVHSYLLRFGFLDGKAGLDYAIARAGYYWQIGLKARELRAAMQADELAAEGAATRDAS

SEQ ID NO: 2769 - protein, 364 aa, Ralstonia pickettii
MSEASVQLTSPDLALVVIARNEAASIERCLLSAKPFVSRMVVLDTGSTDDTVAIAEACGARVSHFAWTDDFSAARNAALAAANADWNLVLDADEWLESGGEHLRMLGSTPPSLGVVCVKNDTDAGESSHLIAWIPRLLPRGVRYVGRIHEQPVSSLPAARVPVVIRHDGYTPAKMQHKGERNTRLLLAELEHRPDDPYVLYQLGKETELHREDHATAAQYYARAYDLAPPDAPYRCNLALRYLYCLGKADRMEDAMAHADVSIRAWPDFPDLCFALGLVLVDAAVRHPEDADTRWLPLAEQVFNRCLEIGDRADMDGSVTGRGSFLAAQQLAIVYQMQSRALARKSEQYLAMSKRLQDAPQPLA

SEQ ID NO: 2770 - protein, 354 aa, Brevibacillus nitrificans
MKTVSLALIAKNEEAHIKNCLHSVQNVVDEMIVVDTGSTDNTKQIAVECGAKVYDFPWTNSFADARNYALQQASSDWILVLDADEILEVGSAELIREFITGSPAIGRVNIVSKYLDNGEVRYDCSPISRLFPKGVTYTGRIHEQVISSLPHRMTRITVAHEGYFQTDKTERNLSLLMKELDEEPNNPYLLMQTAREYRNRHDYHTANQFFSRSYQYATKEEGYYPKLIVDYVYNMMKLGQLDEGYIVIQAEEERLAFFPDFHFLLGMFYMDYVLGDIATRVEKLPNIETSFLKCMELGERKELGGVLGAGSFLAAYNLGVYYEVIGDSGKALKYYRLSSDQGYQKAMDRLRLLK

SEQ ID NO: 2771 - protein, 270 aa, Unknown
  Description of Unknown: Rickettsiales bacterium sequence
MVKLSGFIIAKNEATRITKAINSIKNIVEEVIVIDSGSTDDTVKIAEKLGARVVYNEWKGYVLQKSFGESLCKNDWILNIDADEEFTQKLQDEIAGIFAEERQDDCHAYEVNFVVMHRNDKKLRFLAPANRFIRVYNRNYCSFSNVKETTTHDAVMFNKDTPKDSYKLKGAAYHRSGTSITQLVAKANFYSSEQAKDWKKLGRKPSNFRIALELPLCFLKAFFIRRHCVFGFDGFVDSMVFAFARFIRIAKTREIYRNEESEANTGFRKT

SEQ ID NO: 2772 - protein, 252 aa, Unknown
  Description of Unknown: Desulfurobacterium indicum sequence
MESLSVSMIVKNGERYLENVLESIKELADEIVIVDSGSTDKTVEIAKSFGAKVVFREFDNFINQKNYALSLCSKNWVLFLDDDEIVDEQLKEEIKKIKEKGSKYEGFRINRLTNYLGKWIKHAWYPDWHVRLAKKNSCKWKGDEVHETLKINGEIGYLKGNILHYSYPDIKTHVNKINFYTTLYAIGAHKKGKKFSTLKMVSSSIGAFIRRYFIKKGFLDGFEGFVISVMSSYYSFLKYLKLWEIEKRSRKK

SEQ ID NO: 2773 - protein, 280 aa, Streptomyces sp.
MTRLPIVVAIPTKNEAANITGAVRSVIDHFAAVVVVDSDSTDDTRALAKAEGAEVVPYTWDGRYPKKKQWCLEHVHPETDWMLFLDGDETPSGELIAELRRIFHDGRQVRPAAFDIPLGYWFAGRRLRHGYTIVKRALLDRTRARFPEPDDLAAPGMGEQEGHYQPLANPVHRLRATIEHRDLDPVRTWFDRHNRYSDWEAWLERHPDVREQIRTAKTRQGQVFHRAPFKPLLSFGYSYVYRRGFLDGRAGFDYALAMSFYRWQIGVKAREAAAAERPAD

SEQ ID NO: 2774 - protein, 259 aa, Unknown
  Description of Unknown: Pseudomonadales bacterium sequence
MKTLSVTIITLNEADRLRRCLDSVRDLADEIIILDSGSKDATLDIAREYTDQVFSTDWPGFGVQKQRALEKAGCDWVLAIDADEALDAKLQQWLKGFLGKDRGGVSAVKMPWGVVAYGKLLNHGRSARAPLRMVWREGARFTDAEVHEELVPPAGETITSPGRLLHYSHRDYGHALQKNTDYAWLGAQKYFRKGRRCNSLVVALLKSWWTFFQVYILRLGILDGPVGFLMAMAYAQNNFNKYAGLWTLTRAEKQSRSAI

SEQ ID NO: 2775 - protein, 253 aa, Pusillimonas sp.
MTLSVIIITKNESIHIADCIKSVQFADEIIVLDSGSTDNTREIAESLGARVEISADWPGFGPQKNRVLNMATKDWVLSIDADERVTPELAQEIRSTMLNARYDAYKIARLSWFGDRWIRHCGWWPDYVVRLFRRGQAQFTEAAVHEKIVPSTSPGTLRSHFLHYPYANMEVLIDKVNRYSSAAAQMMFEKGRRTSVPGIAGHAFWTFVRIYLIRRGFLDGKEGFILAATAAAGSFFRYSKLRYLQTKRKPHSS

SEQ ID NO: 2776 - protein, 297 aa, Unknown
  Description of Unknown: Verrucomicrobia bacterium sequence
MSERSDAPAPLSVLVPVKNEAVNLRDCLASVSFAQEIVVVDSGSTDGTQAIAEACGARVIQFAWNGKLPRKKNWSLENVSWRHEWVLIIDADERITVELEREIREAIRRTDVDGFYLNRRFWFLDGWINHCGYFPSWNLRLFRHRLGRYEQIEVGNDIPSGDNEVHEHVLLNGRAEYLPTPMEHYAFPDIATFVEKHGRYSSWEAAASRMLHSGDEKSLRSTPFGTGLERKRWLKKATMRAPFRPSLRFLYHYVWKQGFRDGYRGWVLCRLLAQYERMIVSKEREFKKRTAKPTAGL

SEQ ID NO: 2777 - protein, 255 aa, Caballeronia grimmiae
MTHASLGIAIITYNAAARLAQCLDSVSFADDIVVIDGGSTDATVDIAKAHGARVLIRREWPGFGPQKNRALDALSTDWVLSIDADEVVTPELAASIRAAMDNPRADVYAVDRLSSFCGQWIRHSGWYPDWIPRLFKRGCARFSDDLVHERLVVQSGTPVARLEGKLLHYSYEDFETVLRKLDAYSTAGALQRHAAGKRGSLGIAITRGLWAFVRTYVLRRGFLDGRAGFMIAVFNAQTVYYRFVKLARLNEAADQ

SEQ ID NO: 2778 - protein, 347 aa, Unknown
  Description of Unknown: Arsukibacterium sp. MJ3 sequence
MPTYCVALVMIAKNEARSIKRCLQSVAPFVDAMLVLDTGSTDNTVDIAISCGAIVKHFTWCDDFATARNAALSHSTADWNIILDADEWLSSGAETLQQLRQTTANFVGTIEIVSGFVAGNNKQYARSITSRVLPKGVSYRGTIHEQPQHKLPLKALAISVQHDGYEPAQQQEKKQRNMQLLQQALLAQPGDRYLQYKLGVEYEQAGKLVQAQVYFEQALVASSSGLSWRLDLVIRLLFIYKKLKLFTQGLTLAAQEQALSHLSADYSFSLGDFYLDVAINQPQRTAELIPKIEQCWLKCLEIGEVTGVNGAVFGRGSYLAAHNLAVFYQSLGKTAQSQHYFKLASSH

SEQ ID NO: 2779 - protein, 266 aa, Trinickia soli
MASVSARRPTLGVAIIALNAQARIAQCLDAVRFADDVVVIDGGSTDETVSIAQTHGARVIHAPDWPGFGRQKNRAVAALGTDWILSVDTDEVVTPELAASIRQTLEAPRADVYALDRLSNFCGHWVRHSGWYPDWVPRLFKRDAARFSDDLVHERLVFDGRVDKLAGRLLHYSYDDFETVLRKVDAYSSAGARQRLAAGSRGGFARAVGRGLWAFLRTYLLRGGILDGQTGFMIAVFNAETVYYRFLKLSLARSQERNAGAGSGKC

SEQ ID NO: 2780 - protein, 283 aa, Unknown
  Description of Unknown: Burkholderiales bacterium sequence
MTAISVLILTKNEQQDLPGCLDSVSWCDDVHVLDSLSTDDTVALAERAGATVTQRAFDGYASQRNAGLRLPFKHPWVLVVDADERIPAALHQELTAFVESADNTVAAARMRRRDIWWGVWLRHSQISPLYVRLVRPERAHYEREINEVLVVKGPVADLYEAFDHYPFSKGLDHWLTKHNTYSRMEADLILSRSIARPSWKVALLGADFNERRVNQKAIFYRLPARPLIKLLYMLLWRRGLLDGMAGVRYAILQSIYEYLIVLKVKERQQQLMQVSAPAAHRQA

SEQ ID NO: 2781 - protein, 256 aa, Xenorhabdus szentirmaii
MSARKRLSVVMIAKNAADLIADCLLSVGWADEIIVLDSGSTDETCRIASEMGAKVYTNAQWPGFGRQRQLAQSYASGDYIFMIDTDERVTPELKFAIEQVLDNPDDNKVYRCARLNLFMGKFMKHSGWYPDRVIRLYCRERYQYNDNQVHESLDTQGASVVTLKGNLRHLTCRSLMEFQQKQLNYARDWAKHRHEQGKKTHYFSIFSHMLGAFFKTWLLRVGFLDGKQGLLLAIVNAQYTFNKYAALWELTQKKSK

SEQ ID NO: 2782 - protein, 256 aa, Unknown
  Description of Unknown: Marinilabiliales bacterium sequence
MSNPVAISVVIITYNEERNIERCIQSVEGLADEVLVVDSFSKDRSAEIAERMGARVLQHEFEGHIEQKNWAVSQSRNIYILSLDADEMIDKNLCEEILKIKNNWFADGYVFNRLNNYCGKWLKHGGWYPDKKLRLWDSRKGKWTGKNPHDEYVMEEGAAIKHIQGNILHYSFNSIQEHMQQVNYFTDLSARAYYHKGRKASLADVLIRTHWKFFRDYFIRLGFMDGYYGLIVCLISSFATFLKYLKLRELYKKGGT

SEQ ID NO: 2783 - protein, 249 aa, Unknown
  Description of Unknown: Gallionellales bacterium CG_4_9_14_0_8_um_filter_55_61 sequence
MARLSVVIITKNEAANIGDCIKSVSWADEIIVVDSGSADDTVSIAIGLGAQVYEHADWPGFGPQKNRALGYATGHWVFSIDADERVMPELRGEMEQAMREAQADGYYCPRLSQFCGKFIHHSGWYPDYVLRLFKRGAGRFSDSLVHESLLLTGRTAKLTSPLLHYSYLTLDDVERKVAHYSTAAAEQMFQSGKRSSLMSALLSGGWAFLRTYVMRLGVLDGSAGWNIARMNARTTYLKYRKLAALQQSA

SEQ ID NO: 2784 - protein, 295 aa, Unknown
  Description of Unknown: Verrucomicrobia bacterium sequence
MTKVPVSVVIPILNEVRNLPRCLDSVSWADEIFVVDSGSTDGSVAIAENWGARVVQFQFNGIWPKKKNWALENLPFRNEWVFILDADEVLPPTAKDEFHRIVTSSSEGINGYWVNRRFMFMGKWLRHAYYPNWNLRLFRHRFGRFEKLTNVATASGDNEVHEHLVVTGKTDLLHCEMDHYAFPSIEVFVDKHNRYSNWEARVALSPEEEGGVLQMSRVRIRRWLRKTSQKFPCRPLLRFFYIFFWQKGFLDGFEGYYFARLHAIYEFFCVAKTFELKKNAIMEHKGGKGQIVKER

SEQ ID NO: 2785 - protein, 258 aa, Mizugakiibacter sediminis
MSLPAPPRLSACIITRNEADRIDACLDSLAFCDEIVVVDSGSTDGTRERAAAKGARVLERAFDGYRAQKDYAVRQARHDWVLCLDADERVTPALRTAIERARASGFAGAAGYRFARATEYFGAYLRHGNAYPDRVLRLFDRRRGGWRGDREIHEHVTVDGPVRTLAGDLEHHAYRSLADQLGRLERYARLMAEHMHARGRRARLANILLNPFWRFLRGYVLRLGFLDGWRGLVFAYVEANYVRQKFIKLWLLERGQRI

SEQ ID NO: 2786 - protein, 244 aa, Pigmentiphaga sp.
MRLSVIIIARNEARNLADCLESVRFADEIVVVDSGSTDETVDIARSLGARVEVTSDWPGFGPQKNRALALATGDWVLSLDADERVTPELAAAIADTLRAPRHDAYDMPRLSSFCGRFIRHSGWWPDRVLRLFRRGTARFSDDLVHEKVVADGEVGHLAPHLLHYTYPDLDSAIAKMNRYSTDSAQALHARGRRAGMGAAIGHGAWTFVRLYLFKRGFLDGRHGFLLAATAAAGSFYRYAKLSLK

SEQ ID NO: 2787 - protein, 254 aa, Polaromonas sp.
MTLSVIIITKNEEANLQACLESVRFADQWVVVDSGSTDNTCAIASAFGAEVKQTTEWPGFGPQKNLALDLATQDWVLSLDADERIPPELAAEIQRVTQDPAANAFEIPRLTQFCGQWIYHCGWTPDRVLRLFRRGQAEFSNDLVHERVILKSGTLSRLKNQMLHYSYPTPAHYWRKLEQYSLAWAEQARARGKSSSMPRAVISGLMAFVKSYFFRLGILDGSMGFAVCAMQAQAAFGKYFTLYCLNQQNEPKKI

SEQ ID NO: 2788 - protein, 296 aa, Unknown
  Description of Unknown: Candidatus Nitrospira inopinata sequence
MSDCQNWKAGKAPVAVVMIALNEGHNMEAVCRNLEGWAQEVFLVDSYSQDDTVEIALRYGVYVVQRRFRGFGNQWNFALAHLPITAPWTMKLDPDERLSDALKVSLIKAMSENKDDGFLLVRRLHFMGRPLPVRHELLRVWRTGTCRFTDVAVNEYPVVPGRIVRVSGEINHLDSPDLDHWLEKQNRYTTAEAITAYTNASLAAMPKLLGSSLERRMWIKKHYQRLPFRHAIFFLYHWLWLGAWHAGWVGYLWARLRVDYMRFIEYKRREMEITGRLPTKRYYGPGKPDSRVAQFD

SEQ ID NO: 2789 - protein, 276 aa, Unknown
  Description of Unknown: Planctomycetes bacterium SM23_32 sequence
MTARVSIFIQTLNEEQNLPRCLECFGWSDDIVVLDSYSEDGTERIARSFGARWVQHEYRGRAAHQNWAMQSIEFKHPWVYYSDADEVVPAALAEEIVAVTSDDARPEVAYQVRRRDYFMGRWVKHSSQYPVWFTRLFKPARIRWSRKANPVAHVDGPVGRLENDFLHCPFSKGIADWVERHNRYSTYEAEETLRSLSSGDLGPAELLSRDVSRRRQALKRLSFRLPFRPLLRFLYVYVLRGGFLDGLPGFHHSLLISFYEYLTVLKASELKRGGGL

SEQ ID NO: 2790 - protein, 256 aa, Ramlibacter sp.
MPTLSVILIARNESRNIAECVRAAAFADEVIVLDSGSTDDTVDLARAAGAKVSVAADWQGFGVQKNRALALATGDWVLSIDADERITPQLRQRIEQAIASPAGHLAFAVNRRSSFCGQYMHHSGWSPDWVVRLFRREAGRFSNDLVHERVMVDGPVGRLAGELLHESMRDLESSLDKLDRYSTAGARDLQRRGKRGSLAKALGHGLWAFFRTYVLRRGFLDGSLGFVLAVSVAEGTYYRYLKLWLLQRSPPVPPPR

SEQ ID NO: 2791 - protein, 289 aa, Unknown
  Description of Unknown: unclassified Rickettsia sequence
MNKISAFIITKNEAARIERAINSVKNIADEVIVVDSESTDETVAIAESLGAKVIVKPWLGYVGQKSFAEDLCKNDWILNIDADEELSKELQDEIEYIFASQNQDRYLAYQIKLLIMHRNDIRPRIFAPYNKCTRLYNKKFASFANTINSTTHDSVVFNKDVDFANKIYTLNEAAYHYSGTSIEQLVAKANFYSSEQAKDLIKQGKKPSNIRIATEMIWWFFKAFFIRRYFVFGFNGFVDSMIFAFARFLRLAKLRESSLLCHPATRSRDLKKQFVIQDPVAGPQDDNIV

SEQ ID NO: 2792 - protein, 281 aa, Unknown
  Description of Unknown: Flavobacterium sp. sequence
MTSLPITVIILTYNESNNITDCLDSVKGMTDDIILVDSGSTDDTLHKASAYNPSIYHHPFENYSKQRNWAFDNVSTKYEWILNMDADHRLTSEIVAELATWFGKGIPADVNGFMASRRTMFLGRWIKYGGHYPVYHGIIFRKGFGACEDKEYDQHFMIEGKSILLKSDVIDIITDSLTNFIARHNKWATLEANDILNIGSAENKIVPNKNGNMMEKRRYQRMKYYSYPLFWRVFLYFFYRFLLKGGFRDGKPGLIFHFLQGFWFRFLVDSKIYELKKAELK

SEQ ID NO: 2793 - protein, 247 aa, Azospira sp.
MSAVLITLNAARCLEACLESLDFAAEIIVVDSGSSDGTVALAERLGARVIHQPWLGFGPQKHFAVSQAAHDWVFCIDADEQVSPALAAAIRQEMAAPARLAYRVPRCNRFLGRYLRHGEGYPDWNLRLFHRAHARWSDHTVHEFVQTAAEVGSLTGDLLHDSAESLDSYLAKQNRYTTLAAEAAVAAGKRAGYGRLLLSPVFRFIKFYLVRRSFLDGLPGLVHTLIGCSNSFFKYAKMLELQQRAKP

SEQ ID NO: 2794 - protein, 218 aa, Unknown
  Description of Unknown: Verrucomicrobia bacterium sequence
MSEQSGARVPLSVLVPVKNEAANLRDCLASVAFAQEIVVVDSASTDDTQAAAEAAGARIVQFVWNGKFPRKKNWALESIRWQHEWVLIVDADERVTPELEREISQAIRRTDVDGFYLNRRFWFLGGWINHCGYFPSWNLRLFRHRLGRYERIEIDDNIASGDNEVHEHVLLKGRAEYLPAPMEHYAFPNIATFVEKHNRYSTWEAAASAKVHQRTGGK

SEQ ID NO: 2795 - protein, 284 aa, Unknown
  Description of Unknown: Pelagibacterium sp. XYN52 sequence
MSIPPKPKVSVLIQTLNEEANIAACLDCFSWCDDIVVLDSLSTDRTEEIARRYGVRWFERPFDGRASHQNWAMAHIAFKHPWVYYSDADERVPAELAAEIAQVTQEATPSVAAFRVNRRDYFEGRWIPRCTGYPLGIVRLFRPDRIRWERKANPVPIVDGEIGELKSEYHHYPFSKGLSHWVARHNTYSSYEAEETIRSLSAGGFHPRDLISRDRVVRRRALKALSFRLPARPLLKFCYFYVWKGGFLDGGPGLRYCLLQCFYEFLIVLKLRELRRGASEIEDR

SEQ ID NO: 2796 - protein, 287 aa, Halobacillus kuroshimensis
MADLTAIILTKNESKNIEACLDSIKGFAHRIVVVDSGSTDNTVELAKSKGAEVFTNEFQYYAQQFNWGINNTNIESKWILRLDADERFTPELCKVCERIMVKHAEDNVNGITMEAWLYFLGKRLKYGASKKRKLMIFKRGIGRIEDRKRDAHTVLDKGESISVNERFLHYDFKDIKSFINKYNWYATREMHDYLAFKNGSTENIKSDKKIENTRKKKFGIYYKAPRFLRAKLWFIYNYYLRLGFLDGREGYIYHYFECYWYRFLVDTKIYENETMDTEVENLKALQD

SEQ ID NO: 2797 - protein, 277 aa, Rhizobium sp.
MISVCILTLNEERNLPACLAALSWCDDIVVLDSFSTDRTVEIAKEAGARVYQRAYDGEDRQRMFALKGIEYKHTWVFMPDADEITTDELRDEMLAIAADPTRPESFFRIRYKNMFMGRWIKHSSLYPTWMTRFFRPDRIIRFEREEHAIPIGDGPEGRLKEHYLHYSFNNGLRAWYEKHNRYSSSEARETVESLRGGSVSWHKVFSSRSEVRRRGLKELSMRVPFRSQARFMYMYIVRGGFLDGLQGYHYCRLIAAYEYMIVIKTKELQRRERGLPV

SEQ ID NO: 2798 - protein, 274 aa, Unknown
  Description of Unknown: Candidatus Dadabacteria bacterium sequence
MTEAAKKRPSIGAYVYTFNEEANIAACLESVSWCDELVVVDANSTDRTREIAARMGARVIQHDWEGFRQQAQFALEQVRSDWALSLDADERVTPELRAEIEQAITTAPEDVGGFRLPRVTRHLGTYFRHGTLFKMAPRLARTGRCRWVGDNPHCHLEIDGRVLDLRGELLHLRDRNLASALSVYNEYSSQKAAEMWARGRRANAWTIFWRAAGRFLRSFLIKGGFRHGTAGLVAAMEEATYNFYKYAKLWELSLGARDAGSPANRRKPAETQAH

SEQ ID NO: 2799 - protein, 359 aa, Unknown
  Description of Unknown: Burkholderiales bacterium sequence
MICLTLIARNESRCLARCLKSAAPFVDEMLVVDTGSTDDTREIAVACGARIAMFSWQDDFSAARNYALTQTRADWRLVLDADEWIESGGPCLREVADQVGGSFVGEVNIRSAFDDGDAVRYAPSWISRFLPRGLTYEGRIHEQVAHRLPVRRLPLTVGHDGYRRVQQDGKAGRNERLLRMRLQESPGNAYLHFQLGKDLEIQGRFADACAAYQSARNLLHWPPGAPAAAIKLQARYSWLHDLVVRHIYCLKRSRQFEAALTQSQAESAFWHHSPDFHFACGDLLLDFALFEPMRAEQFLPMMEAYWMRCLELGEAPQIEGSVQGRGSFLAAHNLAVLHDLLGNRETADVFRRLEEQRRG

SEQ ID NO: 2800 - protein, 341 aa, Kinneretia asaccharophila
MARLALVVIARDEAAHIERLLRSVAPWVDDMLVLDTGSRDATPALAAACGARVAHFEWCDDFSAARNRALDLAGADWHLVLDADEWLVSGGEVLAALRAQSPDFVGSLALDDHFEGGSSRGRLSRLLPGHVRYAGRIHEQPQHRLPVRALEVQIGHDGYLPERLKAKQGRNLRLLQQDLAQHPEDAYLWYQLGKDAYVYEDYAAAEQAFERAAALPHPEGGWWLDLVPRRLFALKCLKRHAEGLALAEPELQRCGDSPDFFFALGDLLLDFAADSPAHAEALVPMIEDAWQRCLSLGERPDLPGAVAGRGSHLAAHNLALLMDATGRPDQAQALRHAYPAG

SEQ ID NO: 2801 - protein, 255 aa, Unknown
  Description of Unknown: Acidobacteria bacterium sequence
MPRLSVTVITRNEAANIGAALQSVAWADEIVVVDSGSDDDTVAIARGFTPRVEVRAWPGYSAQKNHAASIASHDWILSIDADERVTPELAEEIRALLAREPGRRGYRIPRANWYLGRWIRSTDWYPDYQLRLYDRRAGQWNGRRVHESVTLSSDPGRLRHELQHYSYRDVAHHLSTIDRYTTLAAEQSHTEGRHASMFAVGTHPPFAFLRNYILRGGIRDGLPGLIVSALNAYYVFLKLAKLWDLERGGTRMPTA

SEQ ID NO: 2802 - protein, 263 aa, Unknown
  Description of Unknown: Alcaligenaceae bacterium sequence
MEASASRQSLGLSVIIITKNEATRIADCLASVCFADEVIVLDGFSTDDTASVARAMGAQVHQVADWSGFGLQKNRVLALATQPWVLSLDADERVTPELQAEIIQTLSDPAYDGYRLARLSEFCGKKIHHSGWWPDYVLRLFRRELGAFDDVPVHEQVVLTGRVGKLKACLLHFPFENLDALVVKINRYSGEAAKMMAAQGKRIGVLGLIGHSVWTFIRIYLLKRGFLDGRHGFVLAVTAASGSFLRYSKLMFLNEAREQKKSK

SEQ ID NO: 2803 - protein, 264 aa, Luteibacter rhizovicinus
MAREPLSVVVTTFNNADTIEACLASVHFADDILVLDSGSTDTTRDIAAHAGARVDVKPFAGYSAQKQAAIDLALHRWVLLLDSDEALPAAAAERVCRALESPDVAGFELLRREWVFWRWQSDRARLNHYVRLFDRTRARMSGHEVHESIVVDGPVRRLDAVIDHYGERDIEGRVDKANRYSSLQVHDRRTRTPRHLRLRMVVYPTVAFLRYYLWRGHWRGGWAGFVAARVHAFYAFLKYAKLYELRVSGRLRLGASLRDEGRDE

SEQ ID NO: 2804 - protein, 255 aa, Caballeronia sordidicola
MTRPTLGIALITFNAAARLAQCLEAVSFADEIVVVDGGSTDATIGIAEAHRARVVEARDWPGFGPQKNRALDALTTDWVLSIDADEIVSPELGLAIREALAKPQADVYAVDRLSNFCGHWIYHSGWYPDWIPRLFKRGAARFSDDLVHERLVLSQPGATKTARLQGKLMHYSYEDFETVLRKLDAYSTAGAQQRHAAGKRGSFSTAVLRGAWAFVRTYLLRLGFLDGRAGFMIAVFNAQTVYYRFLKLAQLNQPR

SEQ ID NO: 2805 - protein, 312 aa, Palleronia abyssalis
MAKLTVIILTKNESRHILRAIDSLGGIADRIVVVDSGSTDDTVALAEGAGATVLSNPWVNYATQFNWGIDQLPDDTEWVMRLDADEIVTPELAEEIRAGLADMSDEIDGIYVSRRMCFLGRPIRWGGVFPIRVLRLFRQGRGRIENRWMDEHVLVRGPTRDFRGEIVDDNRNSLTWWTDKHNAYASREEVDLLNLEYGFMPLETVADLRGGQQAGIKRWLKESVYARLPGGLRAFVYFLYRYVVRLGFLDGTEGTAFHVLQGFWYRYLVDMKMFEVKKYMASEKAEATDAIRAVLGIDLTPADETQKGVRHG

SEQ ID NO: 2806 - protein, 341 aa, Butyrivibrio proteoclasticus
MVTVSLCMIVKNEEASLGTCLKSLEGIVDEMIIVDTGSTDRTIEIAKAYGAKVYNFKWTGSFSDARNYAFSLATCDYIYSADADEELDEENRRRFKDLKIDIGELNVDIVQMYYCNQLSFRTVYNYDRELRPKLFKRVRHFIWQDPIHEQVALDPVVSNSEIEIIHRPKESHAGRDLESFRKATAEGYVFSQRLHNMYARELFMAGTADDFLKAKQFFTESVMDNNRGLDEIKEASCVLAHIAVLENDAEALLKYSLKDATTDMSSEMCFELGDYYFAKKDYDEAIVWYFNAAYECKSILDIKKSGSIPRLALARCYRALGNEEQATDFEREASDIENENY

SEQ ID NO: 2807 - protein, 278 aa, Rhizobium sp.
MSISVCILTLNEEENLPACLATLSWCDDIVVIDSYSTDRTVEIARAAGARVYQRAYDGEHTQRLYALKQINYKYPWVYMPDADEITPSELRDEMLAIAADASRPESFFRIRFKNMFMGRWIKHSSLYPSWIPRLFRPDRILGFDREVHLRCNGLGPEGRLNSHFIHYSFNKGMKAWYDKHNRYSSSEAKETAVSLRERRIPWGEVFSSRAEVRRRGLKELSMHVPFRATARFVYMYFLRFGFLDGMQGYHYCRLLAAYEYMIVIKTMELRRRERGLPV

SEQ ID NO: 2808 - protein, 258 aa, Unknown
  Description of Unknown: Acidobacteria bacterium sequence
MTRFSVCTITLNEEQNLPRALTSVQGVADEIVVVDCGSRDRTQEIAREHGAAVFERAWTSYEEQWNFAASCAANEWIFVLAADEEWSPELRAALLEWKQQEPKFPVYEMARKARYLGAWIEHCGWYPDYQRRLYRRGRARFSGIIHEVLRFEGRPGRLGGDLFHYTMNSFAEHEKKVARYTTLAARQMYEAGKRNWRAAMWLATLWTCFSVFVLRGGFLDGYRGWLISRMAARSVWLKFKKLGKLIAAERHRSAVKTS

SEQ ID NO: 2809 - protein, 674 aa, Marinobacter nanhaiticus
MALLFVGLGGALLSSSLIAGSALLLALWGIVALSKGRLNEAGWEKPRELRLIHFGFWFFVLASVISWATSGFSYEGLKTLGAHVPFILFWPLLAALTLARLRASHLFMALAAMALGSGLAITIDNGFNARAWQLLLERPSGLVNPTTFGNLSLLAGMMSFAGALYFSRQNHDKIPQQRRKARVTLCLTAGLVGVIAAGLAQTRSSFVALPVLVLVFVPMLPRKARIPALVAGVIVLILATFSSDRLTQTLDQAGSMSSDRIIQLRFEAWKEAARLFLNSPLTGAGLDGYQQAILEGTSSGRLDVALASCCDDQAHNDVMQILATRGLIGLLAWAFLLGLPIALFGRYLGDRNSQVAHIAVAGLMIPVGYLAFGLTETTLDHALFVTTYLVLVAASAATLFVELDIGCQRQRRVKVSATIITMNEAHNIEHCLRSVRAVADEIIVLDSGSTDGTVELARPLADIVEVTDWPGFGVQKQRALEMASGDWVLSIDADERITEGLAREINDRLADPDADAYKLPWAVTLYGTRLDFGRSGRSPLRLFRREGVRFSDAMVHEKILIPEGRKTRQLRGRMTHYTHRHFGQALEKSAKYAWLGSQEKFRRGKRSRTLAYASFRGLLTFVHVYFLRFGFLDGPVGYLVAITYAQGSFNKYAGLWTLSRTERSASRSGNQAPD

SEQ ID NO: 2810 - protein, 271 aa, Marinobacter hydrocarbonoclasticus
MRVFMMKLPLSVYYITLNEEERLPESLEKVKDWADEIIVVDSGSTDRTCELAEAAGARVVYREWEGFASQKAYAASLCANDWVLDLDADEVLSDTLVRNIKQLFSKPISPDIAGYRMRWVLSSPNPRHPFRHDKSKKILRLYNRKRAAIHAEKHSNDDRPRVHTGKVLELNGDVLHRTLISLEQMERKYTQLSSEQARFLCEKGRRISTPRLMVEFPLKFLKYYLIHRQVLNGWFGFSVSVVAANRNFMRLAKARELQMLEGISRSGGEER

SEQ ID NO: 2811 - protein, 252 aa, Desulfobacter vibrioformis
MKTSTISLAVITKNEAKNIEKMLSSASFVNEVVVVDSGSTDNTQQLCRDMGAVVIEQAWLGFARQKQFAFDRCTSDWILSLDGDEALSAALGAEIQKAVICCDDTVCAFSMPRVSFYLGRWIYHGGWYPDRKIRLIRRSKGRWQGDGLHEKLVVDGEVKPLSNDILHWVYENISHQVKTIDSYSTTHADHAGKRGNWYLIWGLFHMAGKFLECYIWKRGFLDGLAGLVIAVNSTWYIFLKHAKVWEKYIQHG

SEQ ID NO: 2812 - protein, 255 aa, Geobacter thiogenes
MRRSVSAVLIAYNEERRLANCLERLQWADEIIVVDSGSTDTTREIALRYTKRVVEIPWRGFGPQKQAAVELASHDWVFVVDCDELVTPQLADEIIALLGQPEVNAGYDVPRRTFIGAKEIKYCGWYPDRTVRLFDRNKAAFSDSLVHESVVVRGAKGSLQNDLLHYSYANIGDMLPKIGQYSDLWAQQMHAAGKNNRFGALLIKPVAAFLKSYLLKRGILDGFEGLVVAASTAFLTFLKYAKLRELSRKTFVPTI

SEQ ID NO: 2813 - protein, 259 aa, Pantoea alhagi
MTVRQRLSVVMIVKNEAELLPDCLASVSWADEIILLDSGSQDATPAVAEQYGAKVFRSLEWPGYGQQRQRAQAYASGEMILMIDADERVTPELRAEIEQVLQAAPQPDKVYSLGRLNLFLGRFMRHSGWYPDRVVRLYPRTYSYNDHQVHESLETEQAQVVPLAGHLQHLTCRDFCAFQRKQLAYAEAWALQRHQQGKRCGIFSVFSHTLGAFCKTLLLRAGFLDGSQGWLLAVVNAQYTFNKYAALWALGPSTSGDKK

SEQ ID NO: 2814 - protein, 253 aa, Unknown
  Description of Unknown: Monaibacterium marinum sequence
MSRPPISVFLITLNEEARLARTLDAVQGWADQIVVVDSGSTDATVAIAQAAGAQVFQNKFTGYGPQKRFAEGQCIHDWLLNIDADEVVQPDLRDQIDVALTDAPPSLFRTRILNVYPGDDRPRPFADDYNVVRLYHRAAGRYRDHPLFDRVEPDGNPPVQQLAAPIYHYPFVDWSSLLAKLDRLATLQAREAKPKPRWQLLIRLVTEAPVQFLKFWLARRHVFGGWKGFAFAGIAAFGRWLRIVKMLSKTTDR

SEQ ID NO: 2815 - protein, 321 aa, Unknown
  Description of Unknown: Candidatus Melainabacteria bacterium HGW-Melainabacteria-1 sequence
MPAEVHAYHAHLAAAQAAAGSNPLEALTQLWQAFDFYLEPAPLRLACQLLSPWPELAARLRHLTELIYPDQALDSPEPFGLSQAEPPEQVSAPQAEPAQLLPWRNLLWPSRRPSLSVCMIVRNEAPVLATALASIREIADEIIVVDTGSSDETMAIAAAEPKVRLSQLPWRNDFATARNASLDLASGDWILVLDADEELLPTGRQALRELLAYPPLGWQVYICPIEQLLSNGGLFYSWGTRLFRRDAALRFSGALHEMPVKWSWPQWLLAVPVPARLRHSGNLPINYVRQHKSKRAEQLRRLVEDPATYTPFLAYHYAHLL

SEQ ID NO: 2816 - protein, 276 aa, Flaviaesturariibacter sp.
MGFTSTRSYFCGGGSGSHQIRARRTMQANLSIVIICKNEADNIERAISSARGLVRDIVVYDSGSTDDTIAIVEAMGIPVHRGPWLGFGPTRRAATMLAKNDWVFCLDADEALSEALVDELGAFRPEAGNAWQVQLRNHLGKRYIRWGVWRNDFRLRLFHRHECNWNDDLIHEKVVPLQPVHIHRLKGSVEHRTAKNIRDYRGKMENYARLTAEMYFRKGKRAGLLKLLFSPMLTFLKSYFGKMGFLEGLCGLELSMATAAYTAKKYAHLKLLRKGS

SEQ ID NO: 2817 - protein, 249 aa, Rhodoferax koreense
MRLSIALITYNEAARLPACLASVDFADEVVVVDNGSTDGTVALAQSLGARVVQTPDWPGFGVQKNRAVDLCRGDWVFSIDADEQVTPELKAQILSVIAGPSSDCVAYTVNRSSSYCGRYMRHSGWYPDRVLRLFRRGQARFSEAAVHESLQAQGPVGRLEADLLHQSFADFETVLDKVNRYSTASAAALAERGKRGSVPKAVAHGLWAFFRTYVLKRGFLDGQLGLALAVSNAEGTYYRYMKLWLKQRA

SEQ ID NO: 2818 - protein, 264 aa, Verrucomicrobium sp.
MDTPSSLPLSVVLIARNEARNLPTCLDAVAGWVREIVVVVNDCTDGTEEIARRYGARVIPHPWENFREQKNVALAQATQPWILALDADERITPALRGEIVAFLAGADADQSLAAESPRLVTFLGRAIRHGDWYPDRGLRLVRRGQARWTGAHDHCKLVAEGRGPIHRFRSDLDHASFPDLASLVRKTPFHADNFVRTCRERGRRWHLLQAVIRPPWRFFRGYVLKRGFLDGYPGLVVAVAVAYETFIRYARLYESELASSSASE

SEQ ID NO: 2819 - protein, 280 aa, Hyphomonas sp.
MLLTFNEEKNLPSCFSALEWCDDVVVLDSGSTDRTVAIAKSNGARVLERPFDDFAGQRNWGLDNGDFVHEWVLHLDADEITTPEFIASLSKAEPDEGIDAYQIPSKMMLFGRWIKHAGMYPTYQVRLGHRDRLRFKQVGHGQREDLPAERVAIFDTPYLHYSFSHGLFGWLQKHVRYARDEAALIFDIRNGSSQIESGLDATSRRRSAKSKAAKLPVTLRPILRFLYIYFWKQGFRDGRAGFAYALMLSVYEGMTAIFVLEALMGTNAMPKPSKTGSIEK

SEQ ID NO: 2820 - protein, 244 aa, Unknown
  Description of Unknown: Verrucomicrobia bacterium sequence
MSERSDARAPLSVLVPVKNEAASLRDCLASVSFAQEIVVVDSGSTDGTEAIAEAAGAQVIQFAWNGKLPRKKNWALENVPWQHEWVLIIDADERITPKLEHEIREAICRIDVDGFYLNRRFWFLDGWINHCGYFPSWNLRLFRHRLGRYEQIEIGNDIYSGDNEVHEHVLLNGRAEYLSAPMEHYAFPDIATFVEKHNRYSLWEAAAWRKLHSTGEKLLRPTPFGTGIERKRWLKKSMMRAPFR

SEQ ID NO: 2821 - protein, 285 aa, Cobetia marina
MNPSDEAPAVTPTAPPSDGKLRTAVPITGCVITLNEAHNIEDCLRSLAQVCDELIVVDSGSTDATCELARAMGAVVIDQPYLGDGPQKNVGPSHASHRWVLSLDADERLTDGAVSAIRELALDSTPHDGFALRRRNFIGSRWVRHAGWYPDYCLRLYDREKLAFRDSRQHSSVQASHPCELDADLEHYSFANLGELFVKASGRFSNRAAKIMYQKGKRANAFTPFLHASNAFMRKFVFQAGFRDGVDGFSVALSASVNAYLKYAKLLEFQRDAKVREAEDFNKVW

SEQ ID NO: 2822 - protein, 258 aa, Unknown
  Description of Unknown: Planctomycetes bacterium sequence
MTNTDTTLDLCLSVIACDNERTIERTLRSVEGLARRTIVVDSGSTDGTIDICRAGGAEVIAHTWEGHVKQKQFALEQCDTQWVLSLDSDESLDETAVRAVRDAVAGDDPSVAGYQINRRVWYRGRPLRHAWQPEWRTRLVRRDRARWTGFDPHDRLDVEGTVRRIRGNIRHDSFTDFEEFLRSAVTHGLTTARSFHEMGKKGSRFRLMISPPAAVIKQLLLRSAWLDGWPGWLAAYSAGVHAAVKHVRLLELTHRDGE

SEQ ID NO: 2823 - protein, 258 aa, Methylibium sp.
MPDPHSLTVVIVAKNEARNIAECVASASFADEVVVLDSNSSDTTVALARQAGARVVQTDWPGYGPQVARGFALAQSAWVLSLDADERITEALKIEVLAAIRSGAHDGYRIPRLSEFCGQFIHHSGWRPDHTLRLGRRAQSGFTDHFLHAHMTVKGSVGTLSNDLIHFSYPNLHDVLEKLDRYSTGHARDLQAKGRTGGLGKGIVHGLFAFVRTYVLRLGFLDGRHGLMLAIYNAEYTYYKYLKLGHLQNPARRPEFPA

SEQ ID NO: 2824 - protein, 287 aa, Unknown
  Description of Unknown: Chthoniobacterales bacterium sequence
MNSKVPVSVIVPIKNEATNLPRCLEAVQWADEIFVVDSQSTDGSVEIAQAHGANVVQFQFNGTWPKKKNWALENLPFRNEWVFILDADEVLPPKAEAEFASTIANAGDIAGYWINRRFMFMGKWLRHAYYPNWNLRLFRHALGRYEKLTDAATDSGDNEVHEHVVVRGRTARLRVEMDHYAFPSVAVFVEKHNRYSNWEAQVAADTLMSGSAKKIEGVNVGTRRRLKTLFLKMPFRPLLRFLYVYLWQKGFLDGAEGYYFARLHGFYEFLSVVKTRELERQHRRMTT

SEQ ID NO: 2825 - protein, 265 aa, Unknown
  Description of Unknown: Puniceicoccaceae bacterium sequence
MSDKLPITCYIRTLNEERSIAAVIESVADFCSQIIVIDSGSNDQTIAIARSLGAKVIEQPWLGNGFQKRVGEDLAEHDWLLDLDADELVSSELQSNIRSVFEMSETIPYDVFSLKLVTITPIGVIWKHSCLAWRNKLYRKSIYRVPAHKAWDQFKIKDQKKLKKLDGDLYHHSFENFEHLIAKMNRVSSVRSREKRVPNTAVLVLRILFGFPIYFCKKYFYQRMFLTGIYGLVAAILMAAQRWFTDVKMYENILIEREKNLSKKS

SEQ ID NO: 2826 - protein, 259 aa, Desulfospira joergensenii
MISVYIIAFNEQDKIRAAIKSVQWADEIIVADSFSTDKTAKIAESLGARVIQIPFRGFGDLRNRAIEACSNDWIFSLDSDERCTEQVKGEILKIIQAEDSLDAYYIPRKNFFMGKWIRHSGFYPDYRQPQVFRQGVMHFLDDPVHERYEVKSDRPCGYLKNAIHQIPFKSLDEILYKANRYSTLGAKKLAQAGERPGKMKSVGHAVWSFIQHYFLKLGFLDGWPGFIIAFGNFEGTFYKYAKLYEQNCGRTDLDTNPKE

SEQ ID NO: 2827 - protein, 260 aa, Unknown
  Description of Unknown: Acidobacteria bacterium sequence
MNRLTATLITCNEEQNLPRVLDSLADLPDEIVVVDSGSADRTREIALQRGARVLCRAWTGFADQRNFAAAHAAHDWILALDADEELSPELRESLRAWKNRDPAEMAYEFSRLASYLGQWIRHSGWYPDRKVRLYRRDRARFAGVAHDSLVTDGRVGRLAGDLYHHAFRTVAEHTATVNSYSTAGAEEMFAAGRRSWLPAMLLAPPWMLLRRFFLQAGFLDGSRGWRIARMSAKYTFLKYRKLGVLARGGSLKASHRDANP

SEQ ID NO: 2828 - protein, 271 aa, Unknown
  Description of Unknown: Acidobacteria bacterium sequence
MQKTAEAGRTDIRNAGILPVSVVVPVRNEAHNLPRCLEALRDVGEVYVIDSQSTDETVEIARSHGATVVQFHYQGGWPKKRQWAMNSLPFAYEWVLLLDADEVLTSGLREEIGRAVERADVDGYWIALQMRFLGRPLHFSGACFWKMSLFRRGQAHYECRLKDQDASMADMEIHEHLVVPGKTAKLVSPLMHHNVESLSRYIQKHNEYSNWEAKVWLQGDAAELPPSIFGNQAQRRRWLKKKFLALPGSPLFFFLYKYVFRLGFLDGACPA

SEQ ID NO: 2829 - protein, 297 aa, Methylobacter sp.
MLNLTVVVLSFNEEHHIYRCLDSIGGLASRVVIVDSESTDQTREFALNMGAEVYCNPWINYAKQFNWALDHCNIGTEWVMRLDADEVVTPELAVQLREQLASVPTSIAGITINRQIHFMGKWIQHGAIYPIRTLRIWRNGKGRCENRWMDEHILVDGDIHHINADIADINLNNITWWINKHNHYASREAIDLLMGENNQAVDGGNGMNAQARIKRWLKHHIYTHLPLGMRSLLYFLYRYLFRLGFLDGWQGLVFHALQGLWYRFLVDVKVYELRKLMEERGQSLAHVVKDEYGYDIS

SEQ ID NO: 2830 - protein, 270 aa, Unknown
  Description of Unknown: Gammaproteobacteria bacterium SG8_31 sequence
MSHWWERPRVNRLSAVVITLNEERSLPRTLDSVSWCDEIVVLDSGSSDRTVEIAQSYPNCRVVTQPFLGYGLQKRKAVAEASNDWILSVDADEVLDAGLQRSLQAWRLSGSAGSAGYYLLRRLCFMGREFRHGRESRDRVLRLFDRRRGNFTSARIHERVEVEGATETLDGRLLHYTYRDLEEYFDKFNRYTSVMAREMHGRRRRPSTLAMALRPPVTFLQYYFLHGNWLNGFPGYVWSCLAAGYRTVKYLKFYELETAATRPDETHSTD

SEQ ID NO: 2831 - protein, 364 aa, Butyrivibrio sp.
MYPYVFLHVKRPGGGIVVTISVCMIVKNEEACLGRCLDSLKGIADELIVVDTGSTDNTIAIAKEKGATVYNFKWTGDFSDARNYAFSLATCDYIYSADADEELDEENRQRFLKLKEDIDKLGVDIVQMYYSNQLAYRTVYNYDRELRPKLFKRIRKFVWVDPIHEQVMLEPVISDSDIEIIHRPRENHASRDLESFRKAVKDGRKFSRRLLGMYARELFMAGSDEDFIAAKDFFIQATLDNNRTIDEIKEASCVLAHIAVLEKDAEAMLKYTLKDATTEMSSEMCYELGDYYYNKKDLDEAIVWYYNAAYECESILDIRKSMELPRLAIAKCYRDLGNEEQAADYEREANDVINMEKELNDLEK

SEQ ID NO: 2832 - protein, 251 aa, Desulfovibrio ferrophilus
MPEQITAVILTFNGEKWLEQTLSSLDFCDALLVVDSGSTDTTLAIAEAAGAKILHRAWEGTIPQFKFAFEHVKTPWIITLDQDEFLSPELKESVTTALSAPGNTGGYWCPRRSWYLDRFIKHSGWYPDLLLRVFRLDKVEIRGMLPHEEFHPTGATSRLSGDIVHYPYADLSEHLDKINSYTSLAAREMAAKGKRAGVGKALAHAVGKFAKQYLLKQGFRDGRAGLVLAVHSFIYAFQKYMKLVELNRKDS

SEQ ID NO: 2833 - protein, 359 aa, Ruminococcus sp.
MKINLVMIVKNEERSLERCLNGAKPLVDRMIVVDTGSTDRTREIAKEIGAAVYTFTWVDDFSAARNFALDQSDADWNLVLDGDEYLRDSSREKLEKILQSRKGMWLGCITRYDSFRDEEGISVSTAVIPRLLPKGVRYEGMIHEQPSGTYPNYDTFLEADHDGYLYANKGERNLPYLRKAVKDYPKDGYYQFQLASTLRNLKRLEESLPYFRKFYHLIDTEDGCRAGGIVLYLYTLLDLGQGELLDEAWEIISREESSLGGWSDFCFVCGIFYMKRVLSDVKKYIGLLPNIEKCYQTCLKLGEQPKAGGVVGTGSFRAAYNLGAWYEVSGQTELAVRAYRLSLEMGYEPAGERLRAMGF

SEQ ID NO: 2834 - protein, 248 aa, Neptuniibacter sp.
MISIIIITKNEAHNIQSCLDSVAWADEIIVVDSGSEDGTQDICRTTNNCRLIETDWPGFGEQKNRALALATHEWVLSIDADERIGDPLKAEIFSAMEQSHYDGFEIPRRSQYCGRFIDHSGWTPDYVLRLFKRDKAIFSNDKVHERIILNGKTGRLLNPMLHYSYENLEQVLRKVDQYSTLGAEQLYARGKRCGLGTALYKSFWAFIRTYLLRRGFLDGKQGVMLAISNAEATYYKYAKLALMSEKAQ

SEQ ID NO: 2835 - protein, 265 aa, Rhizobacter sp.
MPATPSAPSPEHTLTVVIVAKNEARNIAECVASASFADEIVVLDSGSSDRTAALAAAAGAKVVQTDWPGYGPQVARGFRLATSTWVLSLDADERITDALRTEVLGAIRSPDFDGYRIPRLSEFCGRFIHHSGWRPDHTLRLGRRQLADFTGHFLHAHMTVDGRIGELRADLIHFSYPDIHDVLEKLDRYSTGNARDMAAAGKTAGVGKAVMHGFFAFVRTYVLRLGFLDGSHGLMLAIYNAEYTYYKYIKLMFMKSPPQRPEFPA

SEQ ID NO: 2836 - protein, 525 aa, Marinobacter sp.
MLGLLAIGLAGALIHPAILELAIIAMAVAGLAARRRAGGWDIPRELRLVHFAFWGFVIIVGVATAIAPSPASAAGRAWPLVLLLLFWPLTTGMSAIRLVAADLFTAVAAAGLLTLAASLTITVPREAAQIPILIATLGSWGAWTLFRQGRMKRALACVAGVLAGAASIGLILSPAETAMDHVWTAASLGETGVLQILGWLLLVSIPVSVGLSFATSRHSAARAVAVAALITSALLVTAILSKQAGTTALLLNLLLMAPIMASLFVELDRGDHRARAVRVSATIITRNEADNIEDCLRSVRAVADEIIVLDSGSTDDTVERARALADIVEITDWPGFGIQKQRALEKATGDWVLSIDADERITPALAREINDRLSAPDADAYKLPWAVTIYGTQLDFGRSGRAPLRLFRREGVSFSDALVHERILIPEGRTTKTLRGRMTHFTHRDFGHSLEKSAKYAWLGALEKHRRGKKTRTMLYPTLRGLMTFIQVYFIRLGFLDGAVGYLTAVTYAQVTFNKYAGLWTLGRD

SEQ ID NO: 2837 - protein, 271 aa, Leptolyngbya frigida
MQVSQASPSKSVNAIPLRQLSIVIIAQNEEECIANAIRSCKPFADEIVVVDSGSEDATVQIAHDLGCQVYHNPWSGYSNQRNFGADKAQHDWIFFIDADEVIDNRLSNALLEWKQAPTITANAFSAVRIGDFWDTWLDTRPEYHTRLYNKTVFRIKDVLVHEGPDIKDAPVVKLPGVIWHYGFRDISDLVIRFNRYTDLDAQQAHRTGTRFSLLRLVLKPLAKFVQQYLWYGMFRQGMAGFTLSGLWSFYIFLKEAKLYEIDWKARRQGRK

SEQ ID NO: 2838 - protein, 253 aa, Paraburkholderia caballeronis
MSRATLSVIVVAMNEIHDIRDCIESVRGLASEVIVFDSGSTDGTPDLCRSLGARVFETDWPGDGPQKNRALNEATGDWVLCLDADERAGDALRTEIERLLEAGSPHAAFSTPRRSSFCGRFMNHSGWWPDRIERLFRRGSARFTDVRTHTRLEIDGTLGRFDAPIIHIAIADVSEALEKVNSYSTSGALTMAEQGKRSSIGKAVFKGLWAFFRTYVLRLGFLDGKEGVILAIANAEGTFYRYAKLALLNKTKQ

SEQ ID NO: 2839 - protein, 253 aa, Dethiosulfovibrio salsuginis
MARLSVYMITLNEELRLPIALKALSGIADEIIVVDSGSSDGTVEIAKSFGAKVFFREWDNYSSQKKYAENICSGDWLMNLDADEEVSPALAKEILSAIQLGKHDAYRLRISDIYPGQNKPNPWVRHYKVIRLYRKGVAKMGDTLTWDRVALLDKNAKVGLLKGFILHRSVTSIRQALDKYNSYSEEQAVAASLSGKKYSPWRMVFAINLNFIRYFFIHRRFLHGFWGYIDSVNLSYARFLKFAKSYERDKHAD

SEQ ID NO: 2840 - protein, 255 aa, Lishizhenia tianjinensis
MTKISATIITLNEERNIERCILSLEGVADEIIVLDSFSTDKTEEICRKLGVRFEKRAWEGYSQSKNYLNALASFDYIFSIDADEALSEELKTSILAEKQKGLTGVYAVNRMTNYLGKWIKHSGWYPDVKTRIFPKASSKWVGAYVHEELEVEGNPTPVLLKGDLHHYSYYSFEDHRSRADKYSRLTAQKMNVKGKRASILKPYLSALVRFVGMYFIKLGFLDGKMGFKIAQISALSNIYKYKELRRLNREQNNKS

SEQ ID NO: 2841 - protein, 301 aa, Unknown
  Description of Unknown: Xanthomonadales bacterium CG17_big_fil_post_rev_8_21_14_2_50_64 _11 sequence
MGRMQFQPPEQAARNDVLFRASLAASMSFSGVFMGVKDNEQSLPISGVVIAMNEADRIERCVHSLRGLCAEVLVLDSGSSDDTVARARAAGARVEHQEWLGFSSQKNVAIARASQPWVLLLDADEWLVPSGARRLRELFKTSPAGDVPSERADIWRLLRRTRFLGHSLRRGGWGNEAVERLFRADCRYLPARVHESLDRRGKRVLRLPARIEHDTARSRDGYEAKLDRYAELFARQRHADGVRGFWIDAWLHAGAYWLKNYWLRGGFLDGRAGAIYHYLHGRYVFRKYRLLWRLRDTPIEP

SEQ ID NO: 2842 - protein, 253 aa, Necropsobacter massiliensis
MPTISVAMIVKNEQQDLAQCLDSVKDWVNEIVIVDSGSTDDTEAIALRYGAKFYRHTDWQGFGKQRQRAQQYVSSDYVLWLDADERVSDALRRSIIQAVAENARNTVYQIGRLSEVFGREIRHSGWYPDYVVRLYQTDFARYGDELVHERVHYPASAQVKKLTGDLYHYTYKDVQHYLVKSASYAAAWAQQKAADGKKGSLLQGITHALGCFVKMYILKAGFLDGKQGLLLALLSTHSTFVKYADLWVRTKDR

SEQ ID NO: 2843 - protein, 268 aa, Trinickia sp.
MQPHHDVPPSTTAPSAPTLGVALIAHNAAARLAQCLEALSFADDVVVVDNGSTDNTIAIAQANGARVLVVADWPGFGPQKNRAVAALSTDWILSIDTDEVVSPELAASIRQAIRAPLADVYALDRLSSFCGQWVRHSGWYPDWVPRLFKRGAARFSDDLVHERLVFDTSAARLDGKLMHYSYENFETVLRKLDAYSSAGAKQRHAAGKRGGFGKALGRGAWAFIRTYVLRRGFLDGRAGLMIAVFNAETVYYRFLKLAAMNRQRNNRQ

SEQ ID NO: 2844 - protein, 256 aa, Polaromonas sp.
MASLSVTVITHNEAHNIGACLRSVSFADQVVVLDSGSTDDTVKIARSLGAEVGVSPDWPGFGIQKNRALALASSDWVLSIDADERVTPELQMEILACIKAPSSDVYSFPRLSSYCGQYMRHSGWYPDRVTRLFRRTAARFSDDLVHEKVVSQGPVGQLNSHLLHESFRDFEAVLDKANRYSTAGAQSLLNKGRSGSVGKAIVHGLWAFIRTYFLRLGFLDGKMGLVLAISNAEGTYYRYLKLWLLRRDGKGAPAGQ

SEQ ID NO: 2845 - protein, 255 aa, Unknown
  Description of Unknown: Pectobacterium versatile sequence
MNAHKRLSVVMITKNETELIADCLQSVSWADEIIVVDSGSTDNTVEIAHQYGAKVYQHDDWPGYGKQRQRAQSYASGDYIFMIDADERVTPELRQSIESVLTASDTNTVYSCSRRNFFLGRFMKHSGWYPDKVIRLYANQHYRYNDNSVHESLDYGSATLSHLSGDLLHLTCRDFAVFQQKQLRYASAWAEERHRQGKKCRYLSILTHTASAFLKTWVLRAGFLDGKYGFLLAIINAQYTFNKYAGLWSRNNIKL

SEQ ID NO: 2846 - protein, 261 aa, Vibrio variabilis
MTVTKPTLAVALIVKNESKHLRACLETVQGWVDEIVVLDSGSSDDTKAIAEEMGAQFYTNSDWPGFGRQRQIAQSHVQSDFVFWLDADERVTPELKASILDAVSKNAPTTIYQFARLSWVFGRFIKHCGWYPDKVLRLYPTKLTQYNDSLVHEKVETDTSMTVETLQGDLIHYTYDDIHHYLVKSAGYAKAWAEQREKRGKKSSISQGILHAVACFVKMYIVKAGFLDGKQGLLLCLLSAHSTFVKYADLWVRTSTEPPKG

SEQ ID NO: 2847 - protein, 256 aa, Polaromonas glacialis
MTSLSVIVITKNEAHNIEACLRSVHFADQIVVLDSGSMDETVQLARKLGAEVIVNSQWLGFGVQKNRALALASSDWVLSIDADERLSVELQAEIQEVLAHPVADAYCFPRLSSYCGQYIHHSGWYPDPVTRLFRRGAARFSDDIIHEKLVVKGQVSPLGNRLLHESFPDFETVLDKVDRYSSAGAERLLSMGKSSSFPKALGHGLWAFIRTYFLQRGFLDGWMGLALAISNAEGTYYRYLKLWLLLLDRKASSPSS

SEQ ID NO: 2848 - protein, 671 aa, Marinobacter sp.
MTVSTRILLPALLMAGLGGALLSSSILAGATLLLAIAGCVFIARKSHYKAGWETPKELRLLHFAFWFFVLVSTYSWVLEGFDYEGGKTLGTHARFILFWPLVIALSYIGLRGRTVFYAFGLVSLSAITVLVTSVISQSGTIESFLNGRFGGGINPISFGNLALLGGVLTLISASFFFRSGNKGLAILFTVMGVAAASIALLSETRSNLVALPFLLLACIPLLGTRMRWAGLIFIPIIMALAITSGDRMSQTVQTLLHGGSVDAGIEIRLELWGLAWEMFKQQPWTGVGLGGYTHGIEAAVEMGKAPAILATCCSGHAHSDLFNSAATSGIPGILGWVLLIAIPLAIFGRHLFSAHQPAAHLAAAGTLVSISYFFFGLTEATFNRTLFLTFYLLAIAGISSALFHELSASYVRNRTRKVSATIITMNEEAHIADCLKSARLVADEIIVLDSGSSDRTAEIAKDYADVVEVTDWPGFGIQKQRALEKATGDWVLSLDADERVTPELAREINHHLADPDADAYKLPWAVTIYGKRLDFGRSGRAPLRLFRREGVRFSDALVHERILIPEGRKIKTMRGRLTHYTHRDFGHSLEKSAKYAWLGSLEKHRKGKKTRTMIYPTLRGLLTFVQVYFIRFGFLDGAVGYLTAVTYAQVTFNKYAGLWTLDRPASDARHE

SEQ ID NO: 2849 - protein, 282 aa, Rickettsia helvetica
MNKSLTEKISAFIITKNEAARIARAINSVKNIVDEVIVVDSESTDDTVSIAEKLGAKVIVKPWLGYIGQKSFAESLCVNDWVLNIDADEELSKDLQDEIESIFASKNQDQYLAYQIKLLIIHRNDQKPRMFAPFNKCTRLYNKKFASFANTVNSTTHDSVIFNKDVDFEGKIYLLNEAAYHYSGTSIEQLVTKANFYSSEQAKDLMMQDKKVSNIRIAFEMLWWFFKAFFIRRYFIFGFDGFVDSMIFAFARFLRLAKLRESSLKSKNVIASDYKEHGNLMK

SEQ ID NO: 2850 - protein, 260 aa, Mesorhizobium sp.
MPKLSVIVITLNEEACIERCLRSVDFADEIIVVDSGSTDRTREIAGAMGAKVHVTEDWPGFGVQKGRALAAATGDWVLSLDADEWVDASLAAEIKKAIADPRGCAGFEIPRKSRFCGRVVNHGSWSADYVLRLFRKDAGRFTDYPVHEKVVLRGNLSRLSHPLEHECITDLGDAHRKIRMYAEASAKHIESMGKKGSTTKALLHSAWAYLNGYVIRFGMLDGAVGLLVAGYCASYTYSKWAALPSGSCTDVPETPAIKTN

SEQ ID NO: 2851 - protein, 258 aa, Paraburkholderia megapolitana
MAEPTLGVALIAHNAAARLAQCLAAVSFANDIVVVDGGSTDDTAAIARAHNARVIVAADWPGFGPQKNRALDALATDWVLSIDTDEVLSPELAASIRDAIRNPRAEVYAIDRLSSFCGQWVHHSGWYPDWIPRLFKRGAARFSNDLVHERLVYQTAGQPVVRLDGKLLHYSYEDFEAVLRKLDAYSSAGARQRHAAGQRASFGKALGRGAWAFLRTYLLRRGFLDGRAGFMIALFNAETVYYRFLKLDRLNRERDGRL

SEQ ID NO: 2852 - protein, 365 aa, Unknown
  Description of Unknown: Aquabacterium sp. KMB7 sequence
MSTPQTVAPSYRLALVMIVKNEARGLARCLQSVQGVVDECIVLDTGSTDDTMAIAQAHGARVAHFGWVDDFSAARNAALALSTADWHLVLDGDEWLPSAEESPAGRQAIESLRQLKEQAPTFLGLLEVHSAFDAQGQSASSWLPRVLPGPVRYSGRVHEQPEWQGARQRLPVRVHHDGYLPAQRVSKGTRNQQLLERALQEQPTDAYLHYQLGKDLEVRDQFEPALQAYRQALQLLGPKAGRSPAWRHDLLLRTLFVLQACGHTDEAIALAEPEMAHWTDSPDFYFVLGDVLLTRALAHPETANDLLPMIESCWQQCLALGDGSSLEGHVHGRGSHLAAHNLVVFYESLGMQQQADTYRARAKAP

SEQ ID NO: 2853 - protein, 272 aa, Paraburkholderia sp.
MSNPHPESSDKGESRAARATLSVIVVAMNEAHDIRDCLESVRGLAMETIVFDSGSTDGTPALCRELGARVFETDWPGDGPQKNRALAEATGDWVLCLDADERVGEALRREIERLLDEGSPHAAFSTPRRSSFCGQFMNHSGWWPDRIVRLFRRGSARFTDVRTHTHLVIDGTTGTFDGPIIHIAIGDLQEALDKANSYSTSGALTMAENGKRSSLRKAIGKGLWAFLRTYLLRRGFLDGRRGFMLAVANAEGTYYRYAKLSLLNERQGSSVR

SEQ ID NO: 2854 - protein, 252 aa, Pseudomonas stutzeri
MPTISVAMIVKNEAQDLAQCLETVQGWTDEIVILDSGSTDDTKRIALNYGAKFYENADWPGFGKQRQLAQQYVTSDYVFWLDADERVTPELRESIKQAVQLDSPHTVYELPRVSEVFGREIRHSGWYPDYVVRLYRTDYANYNDSLVHEKVEFPANARIEKLKGDLQHFTYKSIHHYLVKSANYAKAWADQRQAKGKKATLWQGVSHAIGCFVKMYLLKAGFLDGKQGFLLAVLSAHSTLVKYADLWEREQH

SEQ ID NO: 2855 - protein, 254 aa, Unknown
  Description of Unknown: Flavobacteriales bacterium sequence
MSNPIQLSVVIITFNEERNIARCLDAVWGIADDLVVVDSFSTDKTELICKEKGARFVQHKFEGHIEQKNWAITQAKFPYVFSLDADEAPDVNLTAAIKAVKLDWRNDGYKMNRLTNYCGKWIRHCGWYPDTKLRLWDSTKGKWGGINPHDKYELNESAKIGFLKGDILHYSYYSIDEHYKQADKFSSIAATALLAQGKKSSMLLAVMKGAAKFFRNYIIKLGFLDGKYGFVICRISAWETYQKYHKLTKLIKER

SEQ ID NO: 2856 - protein, 254 aa, Sulfurihydrogenibium sp.
MGLSVLILTKNEEKNIERAIESVKPIADEIIVLDSGSTDNTVEIAKTLGAKVFFREFDDFPSQRNYGVSLCSNDWIFVLDADEEVSLELRKSILNAIKEESYTCFEVPRRTYYLGKYLDYVWYPEYVIRLFKKEYFKYEGKLHEKVVCEGKVGRLKGDLYHYSYKSLYHQFKKTIDYAQKMAEILYQEGKRFKFYNLMLNPIIIFIKFYFLKRGFLEGKRGLIISFSALMYVFLKYAFLYELQLKEKYKDKLWL

SEQ ID NO: 2857 - protein, 259 aa, Ideonella sakaiensis
MPKPGSLTVVIVAKNEARNIADCIRSAAFADEVLVLDSGSHDDTVARAQAAGARVVQTDWPGYGPQVARGFGLATGEWVLSLDADERITEALRAEVQAAIRAGTHDGYRLPRLSEFCGRFIHHGGWRPDYTLRLGRRAKSGFTDHFLHAHMTVDGPVADLRSPLVHYSYPDLHDVLEKLDRYSSGHAKDMLARGRSGGLGKALLHGTMAFVRTYFLRLGLLDGQHGLMLAIYNAEYTYYKYLKLKFLQSPARRPEFPGR

SEQ ID NO: 2858 - protein, 268 aa, Thiomonas sp.
MQPSDVSISAIIITRNESKNLADCLRGLGWCEEIIVLDSGSTDDTQERARSLGARVVMRADWPGFGPQKNRALDLAQYAWVLSIDADERVTPELAAEIRAIIARPDAANAYSLPRLSSYCDQFMRHGGWYPDRVVRLFRRGTARFSDDIVHESLQTTGRVGELRHDLIHISYRSLDDVLEKMNRYSTAGAHKAAAKGRTASLLSAWLHSRWAFLRAYVLRLGFLDGRLGFVLACSIAHETWYRHLKLWQLTKEKPRTVAPNTQSETQD

SEQ ID NO: 2859 - protein, 253 aa, Salinimonas lutimaris
MSHTPISVFLITLNEAATLDDVLSAVSQFDEIIVVDSGSTDDTVDIARRHGATVIHQPWLGFARQKAFALQACRNNWCFNLDGDEVVPASLAAEIQHMVDAGHCDAIRVYFDDVFIGQSLHSAAHKRSIVRVFKRDMTHYPLDRLVHENVITAGKVAHASGLIRHYGYDDVATYMGKQNSYSSLGAQEKFQRGKQYSLLKLFTVFPLMFFKEYILRKQFLSGPSGLIHATIDAMYAFLKEAKLYEQHKRRPRD

SEQ ID NO: 2860 - protein, 253 aa, Hymenobacter sp.
MPAVPLSIVIITFNEEANIGRCLEAVRGLSDDVVVVDSFSTDGTVAICQQLGARVVQHAFEGYVQQKNYATAQARHDYVLQLDADEVLTEELRQSIRQATANWQGGGYTLARLTNYCGSWVRHGGWYPDRKLRLYDRRLGRWEGLLLHERYEMQPGQPISALQGDALHYSYTSVEQHVQQLNRFTSIAADELWLRGRRRVTLFHLLFKPWWKFVHGYFFRLGFLDGFAGLSIAIISAWGVFLKFAKLKTKAAA

SEQ ID NO: 2861 - protein, 285 aa, Paraburkholderia sp.
MSDLLPSLHESDNPAPLTKRATLSVIVVAMNEAHDIRDCVESVRGLAMETIVFDSGSTDGTPDLCRALGARVFETDWPGDGPQKNRALDIATGDWVLCLDADERVGNELRREIEHLLEHGTTHAAFSTPRRSSFCGRFMKHSGWWPDRIERIFRRGSAHFTDVRTHTRLVIEGTVGRFNGPIIHIAIGDLQEALDKANSYSTSGALTMAENGKRSSLGKAIGKGLWAFIRTYIIRCGFLDGAEGFMLSVTNAEGTYYRYAKLALLTRATGTSTASGSTQQPGQTH

SEQ ID NO: 2862 - protein, 343 aa, Sphingobium sp.
MTATPPRIAATLIMRNEARCIRRCLDSVRPFVDAMIVLDTGSTDESVAIAQACGAQVHHLPWPDDFAAARNHVLALADADWNLVIDADEWIASGGEALRGWCDGPRRLGALCIRSSFDLPQPSAAPAPATRSWIARLLPRGVRYAGRIHEQPLSDLPVERIDLLIDHDGYQDAQAAGKRDRNTPMLLAERAADPDNPYILYQLGKEAESARDYPQAAIWYAQAAALIPHDAPWTHALLIRRLHCLGQSGAADDAMAIAGEQIAIWQDSPDFFFVLGNLAMDRAIADPAHALDEWLPLAATAWERCLAIGERPDLEGSVEGRGSHLARHNLDVLRQQLALLSGG

SEQ ID NO: 2863 - protein, 349 aa, Enterobacter sp.
MDEMTFGHSKISAVMICFNEEKTITSALDSLKGLVDEVIIVDTGSSDNTVKLIAQHPAGAKLYFRPWNNDFSQMRNYAISLASNAWCLVIDADEYVAEETRCIFRSTIQKISQQDRDALYAPLIDNLNGSRLINNARIFRKRPSLRYHGKVHEYLDEEASKIIFLPGIKILHYGYVNNAYEEKNKHTRNKTLLDEQILLEPDNLRWKYFSLRYLKPEDPEYKKILQHFGALPLPYDDEWEVYAYNIKSKLIISLLEKRHFQHAWQQAKALYEYYKDKDTCLLYLLANYLSAQNIFLAAVQESLDLLQLFESLHTDEYLTEKLNIDSFQNVLDELAMFMKKSEAASDSVP

SEQ ID NO: 2864 - protein, 251 aa, Rhodoferax fermentans
MRLSVVVITRNEQLNIESCLRSVEFADELVVVDNTSADQTADLARQRGAKVAVTPDWPGFGPQKNRALDLATGDWVLSLDADERVTPELRQEILTVIARADAADCYSIPRSSWFCGRFIRHSGWTPDYVDRLFKRGSARFSDDLVHERLVHRGQSQPLKNALLHYSHRSFSDVLTKIDRYSTASAQQAWGRGKRSSVWGAVGHGLWAFVRTYVFKAGFLDGGHGLALAIANAEGSYYRHIKLWQLAQPANQ

SEQ ID NO: 2865 - protein, 252 aa, Unknown
  Description of Unknown: Microgenomates group bacterium GW2011_GWA2_44_7 sequence
MSISILIPAKNEESMIEECLASARWADEVIVLDNGSTDDTKKIVKTHQWVKYFCAEGVLEKYGSRKNKLKSLATGGWLFYLDADERITPLLRNELLRVTKDNNPLAAYAVPRRNFLLGKELKFGGWGNDYVMRLFKKDALIKFIGELHEQAIFDGHFGKLTQALIHYQPVTLEEALAKSVIWSDYEAKLFLAPGINHPTVVWWRVLKMGGLTLWDRLIKKQGFRDGTEGWIESVYQAYHTMIVYLRLWELQQ

SEQ ID NO: 2866 - protein, 263 aa, Paraburkholderia phosphatilytica
MNQTTLGVAVITRNAASRLDECLAAVAFADAIVVVDSGSTDHTVEIARAHGARVLSHPDWPGFGPQKNRALDALGTDWILSIDADEIVSAELASAIRATLAAPAADVYALDRLSYFCGHQVRHSGWYPDWIPRLFRRGAARFSDDLVHERLVFEGPVQRLAGKLLHYSYEDFETVLRKLDAYSTAGARQRHAAGGHGSFGKALARGAWAFVRTYLLRRGFLDGRAGFMIAVFNAETVYYRFLKLAHMETARADTAVPASDTPR

SEQ ID NO: 2867 - protein, 277 aa, Pontibacter diazotrophicus
MTTSLDLTIAIPVRNEERNLPGCLKAIGSDLARQIVVIDSGSTDHTKEIARQHGAEVVDFVWDGKFPKKRNWFLRNHTPATKWVLFLDADEYLTDEFKSELREVLKRGDKVGYWLNYTIYFLGKQLKGGYPLKKLALFRVGAGEYERIDEDQWSKLDMEVHEHPVLQGEIGVIKSKIDHQDYRGVSHYVIKHDEYAAWEAGRFLKSSNDTQISGKWSWKQKLKYRLMNSVLIGPAYFCGSFFLLGGFRDGARGLAFAMLKMAYFTQVYCKIQENKTR

SEQ ID NO: 2868 - protein, 287 aa, Limnohabitans sp.
MQTPIAVVMISLNEAHNMDAVLQNLAGWAQQVFLVDSCSSDDTVSTALRHGVHVVQRRFKGFGDQWNFALNELPITAPWTMKLDPDERLTDELKASIQSLVASGDQDGIIIKRRLWFMGSVLPVQQPILRVWRTGTCRFTDVAVNEHPLVKGRIGHAKGILEHHDSPDLDHWLTKQNRYTTAEAISQFEGRALALPPRFFGTALERRMWFKCNFWKVPGRYLILFLYHLLVVGAWRAGRVGWVWARLRTEVYRMWEYKRFEMDCLGHVPAKIPANPGLPDPRVQLYD

SEQ ID NO: 2869 - protein, 264 aa, Unknown
  Description of Unknown: Acidobacteriia bacterium AA117 sequence
MTLSVCIITLNEEANIGRTLESVKGIADEIIVVDSGSTDDTVAIAQSYGAKAFVEPWKGFALQKNSSLEKATCDWILSLDADEEVSPELAASIRSVLHSATPQQFSGYEMARRNLYMGHWIRRSGYYPDRKLRLVKRGSATFELRAVHEDMKMPGPIGRLHGDLIHHAYASLESFIEHANRYSSLGAGMVVKERMVGFSFMNIVVRPLVRFIYSYFFRLGFLDGRMGLLVYMNHAAYVSWKYAKAWEMSVNASKSSPQRHEGTK

SEQ ID NO: 2870 - protein, 293 aa, Ochrobactrum pseudogrignonense
MTLSVLIMTRNEEVNLGACLDSLDWCDDIVVLDSFSDDRTVEIARARGARVYQRTYDSEDRQRMYGLTEIEFKHAWVYTPDADEITPDDLKTEMLAITSDPTRPEVFFKARYKNMFMGRWIKHASLYPTWITRLVRPDRVRFERSVHSRASGGAEGELKAHFIHYSFNKGLEAWYDKHNRYSTVEADLSSNHQLERTIDWRGFFSLKPEPRRRALKSLSYHMPFRPSLRFVYMYLLRGGFLDGKPGYLYCRLLAAYEFMIIVKMEERRQSRLQVSGDAVRPGMSNQQAERRMV

SEQ ID NO: 2871 - protein, 332 aa, Leptolyngbya sp.
MSTPTAKIPISVLIPAKNEEQNLPACLASLERAAEVFLVDSHSSDRSEAIATAAGAKVVQFDFDGHWPKKKNWALDNLPFSHDWVLIVDCDERITPELWDEIKTAIQRADFDGYYLNRRVFFLGTWIRHGGKYPDWNLRLFRHRAGRYENLQTADIPNTGDNEVHEHVMVEGPVGYLKHDMLHEDFRDLYHWLARHNRYSNWEAQVYYNLLTGMGDGGTIGANLFGDAVQRKRFLKKIWVRLPFKPLLRFVLFYILRLGFLDGRAGYIYGRLLSQYEYQIGVKLFELRQFGGQLNVTGKASGQEIAQETAQERALAPKPASQPPIVSVESAP

SEQ ID NO: 2872 - protein, 276 aa, Hymenobacter sp.
MNAALDLTIVIPVRNEERNLAGCLEAIGPGLARRVIIIDSGSTDKTQEIARSGGAEVIDFNWDGRFPKKRNWFLRNHTPTTKWVFFLDADEYLTTEFKAELRQALQDPQATKVGYWLSYTIYFLGQQLKGGYPLRKLALFQVGAGEYERIDEEQWSKLDMEVHEHPVLAGETGVIASKIDHQDFRGVSNYVLKHNEYAAWEAARFLKTGSTTTAGKWTWKQRLKYRLMQSIWIGPAYFCGSFFLLGGFRDGARGLAFAILKMSYFTQIYCKIRESK

SEQ ID NO: 2873 - protein, 248 aa, Unknown
  Description of Unknown: Betaproteobacteria bacterium sequence
MPLSVTIITLNAAAQLERCLESIAFAEEVIVVDSGSTDGTRELAARRGARVIRKEWLGFGAQKQFAVEAAGHDWVLCVDADECVSQELREGITEELKAPRGFVYAMPRRNRFLGRWLKHGEGYPDWSVRLFHRAHACWGSEPVHEKVMTRSPVLKLSGDLLHDSAETLEKYLDKQNRYTSLQAESMHAAGRRANAVHLVLSPLLRFIKFYLLRLGFLDGVPGLVHIAIGCMNSFNKYAKLKALERAAK

SEQ ID NO: 2874 - protein, 270 aa, Haliea salexigens
MTKSAEKLPISAFLVTCNEAAHIASVLDALQDFAEIILVDSGSTDGTQEIARAKGAKVVHQDWLGFAKQKNFAMSLCQYDWVINVDGDEILSSEVITHIRKLYEQSEDIAMRLYFEDVFWGETMSPYSGKRSIVRVFRRSQAQYPLDRKVHENLVLAKGVSTVKVQGLVTHFGYGTTELLMQKKNKYSSLKALEKFEKRKRPSLIKLCFIFPLTFVKSYVLQRMFLSGKRGLVHAHIEAMYAFLKEAKLFEYQQLAGKQHADALQRGRLK

SEQ ID NO: 2875 - protein, 261 aa, Unknown
  Description of Unknown: Microgenomates bacterium OLB22 sequence
MNEPVLTVVINAFNEEKHIVDCIESARGLTDSIIVIDTESTDATATLAKDAGANVYSFPYPRIVEPSRSFGIHKASGDWVFVLDADERITKALSAEIKMAIKNADTDGITHYLIPRKNMFARRIWLKHGKWWPDYIPRLIKKEAFKEWPAHIHSTPVITGSKGTLREPLIHFSQGDLDDMVRKTILFENAESDLLAQAKKPASVPIFFRKYLAELYRRFLKQSGYLDGTMGIIGSFYQAYSKTITYLLVYEKTHVKKGSHH

SEQ ID NO: 2876 - protein, 302 aa, Mesorhizobium sp.
MAPVRERLVSGKDTAGDDAKIERALTGISVLILTRNEEANLPACLQSLSWCDDIVVLDSFSTDRTVEIARAAGARVYQRQYDSEPKQRTYGVTQIPYRHPWVYSPDADELTPPDLRDEMLAIAADPARPEAFFRMRYKNIFMGRWIKHASLYPTWVTRLMHTDRVRWERDIHARCVGDGPVGQLKSHFIHYSFNKGLHAWYDKHNSYSSTEANIAIQRTGDEKIGWARLFSKVPSDRRRVLKEISYRLPFRSTARFLYMYVLRGGFLDGWQGYAYCKMLAAYEFMIVIKTEELRRRKAGLPV

SEQ ID NO: 2877 - protein, 258 aa, Unknown
  Description of Unknown: Photobacterium kishitanii sequence
MNTPTDKPTLSVVLIVKNEAKHLAACLDTVKDWVDEIIILDSGSTDETETIARRYTDKFYVNTQWPGFGRQRQLAQQYVNSDYVLWLDADERVTPQLKQSIQNVLQTNQHNVVYSVNRLSTAFGKFIRHSGWHPDWIVRLYRPQDTHYNDVQVHESVIVPPNYNIVKIDGNLEHYTFDDFFEFQKKQSQYAELWAQEKHSKGKKTSISSAIGHALFSFIRSYFIKCGFLDGKHGFIIACINMQYVLNKYLGLYLKQNK

SEQ ID NO: 2878 - protein, 257 aa, Acidithiobacillus sulfuriphilus
MTAQLSVVYITLNAERLLERSIRCVRPLAEDIVVVDSGSTDGTLAICAALGVRVIQRPWPGFGAQRQFAVSQAAHDWVLIVDADELVPESIHGGIRRAIAAPGDRVAFRLRRRNYLAGRPVRFGDWRKDLVLRLVDRRRGHYSEDPVHERWIATGPVGDLPGWLLHYPFADYRSMLAKLQTYAALNAEGLVQRGRRVKASDPISHSIWAFLRTYLFRLGFLDGVNGAAIAWTTALGAFMKYATALELQEQAAKEKER

SEQ ID NO: 2879 - protein, 271 aa, Corticimicrobacter populi
MTSPSTAATRATLSVIIITKNESRHIGACLESVSFADEIIVVDSGSTDDTCEIAARFDARIQVTPDWPGFGPQKNRALDLATCEWVLSIDADERVTPELADEICRQLQTTPANNTYEVARLSHFCGKAIRHSGWWPDYVLRFFKRGSARFTDAAVHEKLVAKDGRTGRLQAHFLHYPYDNLEALINKINRYSSDAAAMMYAKGKRTHVLGAVGHGFWTFVRSYLLRRGFLDGAHGFILAVAAGAGSFFRYAKLWLLQRQEASSRSKPHRNA

SEQ ID NO: 2880 - protein, 261 aa, Unknown
  Description of Unknown: Photobacterium proteolyticum sequence
MSATKPTLAVALIVKNEADNLQACLESVSGWVDEIVVLDAGSTDNTETIARQYTDKFFVNAEWPGFGPQRRLAQSHVESDYILWLDADERVTPELKQNIMDVLSSPKDKTVYSIPRLSWVFGRYIRHCGWYPDRVNRLYPTKLTQYNQDLVHEKVELSPEIKVQPLQGDLLHFTYNDLHHYLVKSAGYAKAWAEQREKRGKRSSIGQGLLHAIGCFLKMYVLRAGFLDGKQGFLLSILSAHSTFVKYADLWIRSSTEPPKA

SEQ ID NO: 2881 - protein, 281 aa, Cyanobium sp.
MISILILTKNEENDLPGCLSSVAWSDDVVVYDSLSTDATQSIALAAGARLIERPFDNWSSHQNWGLRNIAFKHPWVFYIDADERLPFAAADEFGFIASIPLHPDLMNPVAYRICRRDFFHGRHLKHVQSSPWYIRLFRPEYVHYERLVNPLTVVDGLIGDLQHPLDHYPFSKGLSHWIARHNSYSTFEAQQILLNRQNQEPFSLSAAFFEGDFNRRRFHQKELFYRLPARPLIKFLLLYVIKCGFLDGTPGFTYALLQSFYEAMIVLKVQELELTTSPPNP

SEQ ID NO: 2882 - protein, 256 aa, Lysobacter tolerans
MNVRAPLSAVVTTFNNAATLDRCLASLAFCDEIVVLDSGSTDDTRDIANAHDARVSVEPFKGYGPQKQSAIDKAGHDWVLLLDADEYLTDAGRSVIERELQSPRADGYRLPRQEWLFWCWPHPATRGNHQLRLFRRSQGGMNQVPVHAAPEVQGHVIDLDAPFRHCGETELSIRVDKINRYSSGLLEHTRGKRRRFIAMRLLFYPMLAFLKLYIGKRYFLNGWAGFFAAKTQSFYAFLKYAKLLEADRKREVQPFE

SEQ ID NO: 2883 - protein, 275 aa, Unknown
  Description of Unknown: Aquabacterium commune sequence
MTPVSVLILTKNEAQDLPGCLDSVAWSDDVHVLDSGSTDETAAIATARGAKVSVRPFDGYASQRNAGLKLPFLHPWVLVLDADERIPPELAREMGGFVAKAPANVAGGRIRRRDIWWGTWLKHAQISPFYVRLVRVGRAHYEREINEVMVVDGDILDLGQSFDHHPFSKGLDHWIAKHNVYSRMEAQVIASGQRGQPSWREAFFNPDFNERRVHQKGLFYAMPGRPFIKFAYMVLARRAFLDGWAGIRYAILQSIYEYFIVLKTKEMREGQGSGS

SEQ ID NO: 2884 - protein, 268 aa, Escherichia coli
MKFSVLIMTLNEQKNIASCIKSVQPFSDDIVVLDSISTDDTVAISNQLGARVYNRVFDNYASQRNYGINELKYDNTWLLMLDADEILTEELGEEILKLEPDSNDAIFRFRRKDFFCNKWIKHSSGYPTWFGRLVKIGSVSVQREINEEYHTNGNVRMLQHHIDHFPFNNGVSFWLERHNKYSTMEADRMGESVSVQYTKLFSKDPSDRRACLKSIVYKLPLRPLVVFMIFYIYKLGFLDGVPGLKFSLLKFFYEFMIDLKVEEKGTSL

SEQ ID NO: 2885 - protein, 254 aa, Burkholderia multivorans
MAEPTLGVAIIAHNAARRLAQCLDALSFADDIVVVDGGSTDDTVEIARAHGARVVIAPDWPGFGPQKNRALDALSTDWVLSIDTDEVVSEELSASIRAAIRAPSADVYAIDRLSAFCGRWIRHGGWYPDWIPRLFRRGAARFSDDLVHERLVFDGLVERLTGKLLHYSYDDIDSVLRKLDAYSTAGARQRRAAGEHASVGKAIRRGLWAFFRTYVLRRGFLDGRAGLMIAVFNAETVYYRFLKLAHDDTRAQRG

SEQ ID NO: 2886 - protein, 298 aa, Pseudovibrio sp.
MTSSCTASEKLPISVVILTKNEEDTVEGAIASAKADFEEVIVLDSYSTDQTSERAKSAGAVFVQNIFEGYASQRNFALKIMRHRCKWVFFLDADERISSELIAELRENFAEKAASVGMFYLRRKDMFGGRWIRRSSGYPTWFGRLCHADFVHVEREINEEYHCSRPTDRLEEHLLHYPFAKGLSHWLERHNRYSSAEAFTKAPPNNSSASNPLMRLIFSSDPGLRRKGLKQVYMSLPFRPFFGFLYLYILRGGFLDGLPGLRFALLRAFYELMISIKLDEIRSNTVPTATKTAKTELL

SEQ ID NO: 2887 - protein, 250 aa, Paralcaligenes ureilyticus
MTLSVIIISKNESRNIGPCLDSVAFADEIIVLDSGSTDDTCSIARAKGAKVSQTMDWPGFGPQKNRALDLATQEWVLSIDADERVTPELAQAIRDELQSPRAQAYKIARLSNFCGRWIRHSGWWPDHVLRLFKRGTARFSDAAVHESVQSEYPAVVLGGHFLHYPYADMESLIAKMNRYSSDAAAMMHARGKKTSALGAAGHGAWTFIRIYILRRGFLDGKEGFILAATGAAGNFFRYSKLLFLNKRDKS

SEQ ID NO: 2888 - protein, 276 aa, Unknown
  Description of Unknown: Histidinibacterium lentulum sequence
MKASVLILTYNEEINIRRCLESLEGFDDVVVIDSGSMDATCAIANGMGARILTRPFDNFANQRNFGLDEGGFVHEWVLHLDADEVLTPAFRTALAALPPTDALDGWRVPSKTMLNGKWLQHAGMYPTYQARLGHRDRLRFRQVGHGQREDVPPDRLGTFPEPYLHYSFSHGLAKWFAKHVRYAEDEARQLAQDATHPAARGRLLSGNATERRRALKAMVGRLPVWLRPPLRFFHVLVLRRGILDGRAGVQYALMLSAYEAMIGAFSFRRPGDQETL

SEQ ID NO: 2889 - protein, 280 aa, Clostridium sp.
MNDITAIILTKNEELNIARCITSIKGLADRIVVVDSGSTDKTMDIAKGLGAEIYQHEPFEHYAKQFNWALDHVNVQTKWVYRIDADEVVTPELKEEIIKNCLEHSEDDVNGLVMKFKIYFMGRFLTHGGIYPFYNLTIFKYGYGRYEDRSMGEHVVLSEGRTVDLENDCLHYDFKDLTAWINKHNWYATREVNDYMETLAMRQADTNLYHEAEKTKKLRDGLYYKLPKFWRARFYYWYRYYIKLGFLDGQAGRVHAFLQAYWYRYLIDAKIMEQELKNKK

SEQ ID NO: 2890 - protein, 266 aa, Vibrio vulnificus
MSESINKANKPTLAVALIVKNEAANLDACLKTVEGWVDEIVILDSGSSDETEAVARRYTDKFFINKEWPGFGPQRRLAQQYVESDYVLWLDADERVTPELKLSIQQAVQSNEANTLYSMCRLSWVFGRYIRHCGWYPDRVVRLYPTKLTQYDDALVHEKVEITKAMKVKELQGDAIHYTYNDLHHYLVKSAGYAKAWAEQREKRGKKSSISQGVLHAIACFVKMYIVKAGFLDGKQGFLLSLLSAHSTLVKYADLWIRTSTEKPKD

SEQ ID NO: 2891 - protein, 259 aa, Pantoea ananatis
MTSPRQRLSVVMIAKNEAELLPDCLASVSWADEIIVLDSGSTDDTMALARAAGAQVFQATEWQGYGKQRQRAQSFASCDMILMIDADERVTPELRQAIERVLEAPPGDTVYSLSRSNLFLGRFMRHSGWYPDRVMRLYPRTLSYNDNSVHESLNTEGAFVQALKGDLQHLTCRNLMVFQRKQLAYAEAWAQERFQRGKTCSLFSVFSHALGAFAKTLLLRAGFLDGKQGWLLAVVNAQYTFNKYAALWALTHASAKGRT

SEQ ID NO: 2892 - protein, 371 aa, Ralstonia solanacearum
MRKQPKPGGRSDIALVVIARNEAACIERCLRSAKPHVDRMIVLDTGSTDETVAIAEGCGAKVHPFTWVDDFSAARNAALQLANADWNLVMDADEWLESGAGELREACTFGPLLGVVCIQSLDDAGGAAQRTNTWIPRLLPRGVRYQGRVHEQPVASLRRVRLPLVFGHDGYVSAKLEKKRGRNAALLHAELADRPDDPYVLYQLGKETEINGKDPARAADLYARAVAGAPADAPYRHDACIRLLLCLRQSGRLEEAITRAGEWMDAWNASPDYFFVLGHLMFDSAVKHPAQAAEQWLPMAERAFLRCLEIGDQPKLDDSVFGRGSFAAAENLAVVYQAQSSALSAKANEYQALAERLKANLAAPGGAGSAR

SEQ ID NO: 2893 - protein, 375 aa, Selenomonas ruminantium
MKEIKLSVCYMVKNEAHNLPSSLASIQEAADEIIVVDTGSTDDTKSIARSYGAQVFDFPWQDDFAAPRNYAIEQAKGDWILFLDADEAFPRPLNRGALLDYLSRMAAQDVILLRRHDVETLTDRKCFNMDWSPRLFQRRSDLRYRGRIHEHISKSVGDLQVAYAPLEFYILHTGYAKMISEDKCRRDLQILQQVIASGDWEPVYDFFLTDCYYGIKDYEKALQHAVAFTESGTVIHGGNGHVYHMILECMRALGRPDADMLPWAEAAGRLYPDLPDFYAEQGMVLCGLGRLSEAQLLLTEALRRYDEGSADICHATYFSPAVAAKVAARLGEIHELWGEQNLAAQCFIRALDYCSEDEAVLNKAKRFLTTQDGGK

SEQ ID NO: 2894 - protein, 288 aa, Opitutus terrae
MDARCPISILIPTRNEAANLPACLASCAFADEVVVVDSGSTDGTQAIAAQHGARVVPFMWDHRFPKKKNWALAQVPWRHEWIFILDADERITPALAVELQQIVAAPGADGYYVNRCFWFLDGWLRHCGYYPSWNLRFFRHRLGRYEQLAGLDETDSGDNEVHEHVVLQGRTGYLQAEMEHYAFPTIATWLEKHNRYSNWEARLLNAPARQTTDTAVKLAPELARKRWLKRCARRLPFRPTARFVYHYLLRRGFLDGYRGYVFCRLMAFYEFLGSAKAQELRRQKPAPR

SEQ ID NO: 2895 - protein, 371 aa, Paenibacillus sp.
MKRSVTVSLCMIVKNEEATLERCLDSVSGLVDEIIIVDTGSTDRTREIALRYTDKVADFTWVNDFAKARNYAFSLATQDYLLWMDADDILLPADAEKFSTLKSALEWDTDAVSMNYNLAFDEHGNVTSSLTRNRLVKRENGFRWIGIVHEYLEVSGKVRRSDISITHGRVHGNSDRNLNIYESRHAAGEIFSTRDLFYFANELREHKQWDKAISFYEMFLQQVDSWIEDRINACGSLSDCYRELGNEQQAKAKALQSFSYDLPRAENCCRLGSLYMLENDFSKAIFWYKMASELTKPLDNYAILQHACWSWLPHLQLCVCYDRIGQYERASAHNEMAAEHIPFDSKVLANRAYFTGLGVARQTYTLGGTTR

SEQ ID NO: 2896 - protein, 369 aa, Unknown
  Description of Unknown: Cardiobacterium sp. sequence
HHTATDPYHWLQKRLAYAATWAADAAARGKKSSALGAVVRGLWALFKQYLADGRFLRGRIGWVYACLFAQYTYNKYALLCDHNRRPQSYRADYQPHTVNIHNLPASTLPASALPATPHPHPLSVVLITQNESRHLPACLASIQGLADEILILDSGSQDDTARIAAHFGAKWHENRDWQGFGIQRQRAQALASGEYILMLDADEQPDAALCTAIAQVLTHPPAAGTVYAVRRTNIFCGTRVHGWYHDRIARLYPRAHYQYHPYEVHESLDSGDARVITLPGSLLHHTNDNLAHFLEKNLRYSREWADEHRARRAPNLWTLPLKSLVAFLREYLVRGALCGGGYGLFLAASTACYHYNKYLMLAYHDKGQP

SEQ ID NO: 2897 - protein, 310 aa, Aestuariivirga litoralis
MKQPAPRAGAPNLTVIILTRDEELHIERALASVSDIASRCIVVDSGSTDRTLALAKAAGAEVWHHDWLNHAAQFNWALAELPPGTGWVLRLDADETVTPALATEIRQHLAALDGAVTGVVVGRRMTFLGRPIRWGGLFPVPVLRLIRHGHGRCESRWMDEHLVTDGRTASFAGEIIDDNRKPLGWWIDKHNGYAAREVVDILSREHGLGPQDNRGELEGHARGKRWMKTAVYARLPSGARAVLYFLYRYVLRLGFLDGYEGLAFHALQGFWYRFLVDAKLFEVRAYMARTGAPPADAIRAVLGIDLAKRG

SEQ ID NO: 2898 - protein, 262 aa, Arenimonas donghaensis
MSPRLSACIITFNEAARLADCLASLAFCDEIVVVDSGSTDATAAMARQAGARVFERPFEGFRSQKQFAIEQAAHDWVLCLDADERVDEVLRASIRAEQVLGFEHAAGYRFARLTNYFGRFLRHGNAYPDRVLRLFDRRRGGWRGAREIHEAASVDGPVRTLAGDLLHFPYRSLEQQLAKTQRYARMMAEHDFKRGKRASLARLVLSPAWRFWRGYVLRAGFLDGWHGLVYAYVRANYVRQKTIMLWMLQNKQPVVDPPGQAR

SEQ ID NO: 2899 - protein, 258 aa, Unknown
  Description of Unknown: Photobacterium damselae sequence
MKPDNTRASLAVALIVKNEEKHLAACLDSVKDWVDEIVILDSGSSDATEEIARQYTNKFYVSEDWPGFGIQRQRAQAFVESDYILWLDADERVTPKLRESIQNAVEQNQKNTIYQINRLSTAFGQFIHHSGWHPDWISRLHHRTETHYNDIKVHESIIIPSDGKVEKLSGNLEHYTFEDFFEFQNKQQKYAELWVEDRFSKGKKSSITSAIVHSVFSFIRTYILKAGFLDGKHGFIIACVNAQYVLNKYLGLYLKHKK

SEQ ID NO: 2900 - protein, 253 aa, Thermocrinis albus
MLSVLIRAKNEEKNIERAIRSVQGVADQVVVLDSGSTDGTVELAQKMGAEVFFREWTNYADQINYGVQLCKGEWVFVLDADEELSEELRESVMRALKDPECDVYMVCRRTYYMGKFLKHAWYPEWRVRLFRKGSVKFEGVLHERAVFEGRACKLKGDLYHYSYRSLWDQYSKTINYAMLMAKDLHEKGVRFSVAKLMFNPLWAFLKVYVVKGGFLDGMQGFSVAVSSGIYTFLKYLFLWELELKERKGGDLWR

SEQ ID NO: 2901 - protein, 265 aa, Rhodoferax saidenbachensis
MTPISVYIIAYNEAEKVRATIESVRWADEVIVVDSWSTDGTADIATGLGAKVVQVAFTGFGELRNQAIAACSHEWIFSLDADERCTPEVAAEIQSIVGNSNALDVYWTPRRNYFMGRWIKHSGWYPNYRQPQLFRKNAMRYDLKPVHEGYELLTDKPLGHMQNAIWQFPFKNMAEVMHKANRYSSLGAEKIKHKKISMWTALLHAKWAFWKHYLFKLGFLDGWAGFVIALGNFEGTFYRYVKAIESQNGQAWQAPQFENKTSDRS

SEQ ID NO: 2902 - protein, 288 aa, Unknown
  Description of Unknown: Verrucomicrobia bacterium sequence
MVVVASILRAAGGRGRIEPRPQCVRNSGSPRAGGEGAPGVNISFCLITLNEEENLPRCLASCADLADEIVVLDSGSTDGTAKIARRFGATFAHQDWLGYVGQKNKILSLAKYPWIFSLDADEELSPELRDEIRLFKGLEPANDRSGFSVPRCVFYEGRWIRHGDWYPDRLVRLFRRERARFSGGKVHERLEIEGRIVALHGELHHYSFKNAADHWDRCRKYARLWAETQREDGKSANAAAPYLHAAFRWLRGYVLRRGFLDGKQGWRIAALNAREAYLKYRLLREMNR

SEQ ID NO: 2903 - protein, 257 aa, Lonsdalea iberica
MSHPRLSVVLISRNEAELLPDCLASVSWADEIIVLDSGSSDDTQAIARQYGAQVFQHHDWPGFGRQRQRAQSYASGDYIFMIDCDERMTPELKLAIEQVLAAPDGKTVYRCARRNLFLGRFMRHSGWYPDEVIRLYPRHYRYNDNAVHESLDYGDAHVVSLAGDLEHLTCRDFFTFQQKQFDYATSWAQSRFEAGKRCSYLSILTHTLGAFAKTWLLRAGFLDGKRGLLLAIVNAQYTFNKYTGLWALNNQRKHHDD

SEQ ID NO: 2904 - protein, 535 aa, Unknown
  Description of Unknown: Comamonadaceae bacterium NML970147 sequence
MIVKNEAANLRRLLPLVAPVADEIILLDSGSSDDGQAVAQQYGAQWHVASDWQGFGIQRQRAQALSRGDWILVLDGDESPDAALLEAIARVKTQAPGDTVYGIRRIDEVFGHLIDYPRRGIKAHWRLYPRRFGYCDSAVHESLQLQGAQTQVLPGFLRHHTAATPHFWLEKRLSYAMAWARDRMQGRRVGVASVLLHTFWAFIKQYFVDRRFLCGRYGWIYAWLFAQYTFHKYALLNDVQRRPQGYAPDFEPHAINRHHLPPPPTAPVADAARPYRLSVVLIVCNEAKHLPACLASIADLAHEIVILDSGSTDESERIARHFGAQWHTSADWPGFGVQRQRAQALASGDYVLVIDADEQPDATLKNAIRQVLASAPDARRVYNIRRRNIFCGSVVHAWYTDGLVRLYPREHFQYHPYDVHESLDSRDAAVVTLPGRLDHYTNDNLYHFLQKNLRYSHTWAQEKAAQGKRAPSLWLLPLKSAFAFFREYIIRGAFWGGRYGLYLAISTAGYHFNKYLMLHWAREQAERTPNDPNPS

SEQ ID NO: 2905 - protein, 279 aa, Unknown
  Description of Unknown: Candidatus Entotheonella gemina sequence
MANPLSVCIITCNEEANLPRCVASVGFADEIVVVDSGSTDRTVALAVEAGCRVIDQPFLGYAAQKNMAVQAASHQWVLCLDADEWLLPGAEAVIRQALATHRPEVAGYALKRHTYYLGDWVNHGGWWPEYRLRLYDRQRGEWVGDSIHEDVEVQGAVARLDVEVGHFSFRDIAHHLNKINTYTSMRAQHWHAQDHASAGWLQLIGRPLWRFCRMFLFRGGWREGQRGFIIASIVAFYVFTKYAKLWELQHGQGQGKGPDVPVWDAVSDARVRNGNAMIK

SEQ ID NO: 2906 - protein, 277 aa, Shinella sp.
MSISVLIMTLNEEKNLPACLASLDWCDDIVVLDSYSTDATVEIARAAGARVYQRVHDTESNQRTYGLKEIEYKYPWVYTPDADEVTPPDLRDEMLAIARDQKRPESAFRIRYKNMFMGRWIKHSSLYPTWITRLVRPDRVRYERDAHSRCLTEGPEGRLNAHFIHYSFNKGMNAWYDKHNRYSSSEARETVVSLREKRVPWHDVLSGVPEVRRRALKELAMRLPFRPTARFLYMYVLRGGFLDGKEGYHYCRLLAAYEYMIVIKTEELRRREEGLPV

SEQ ID NO: 2907 - protein, 257 aa, Ahniella affigens
MRQPLSVVVTTLNNADTLPALLESVRFADEVYVLDSGSTDQTLELLLAAGARIGSQPFQGYGPQKAAAINAASHDWVLLLDADEAVTPALAAQIQATLMAPMCDAYRIARRERMFWQWQHPGSKHNRHLRLFDRRLISMSNDPIHAAPESRGRIGLIDAPILHWGEPDLYRKVEKINRYSSGMAAARLERASALLPLRLVFYPPLVLLKQLIVKRQLLNGWAGWINAVSLSYYAFLKDAKVLELQRQKATSAPSDQP

SEQ ID NO: 2908 - protein, 268 aa, Kushneria avicenniae
MSTAAARTPITGVVITLNEAASIEACLTSLERVCDELIVVDSGSADDTCALARAFGARVIEQPYLGDGPQKNVGPKAATHRWVLSLDADERLTDEAVTAISALQLADTPHDGFALRRRNFIGSRWVKRCGWYPDYCLRLFDRDRTAFSDSRQHSSVQARSPQALDADIEHYSFANLAELFTKAGGRFSTRAAKIMYLKGKKVNACSPLIHGANAFVRKYLFQRGCLAGLDGLSVSLSAGVNAYLKYAKLLEFQRDPQVREREDFNQVW

SEQ ID NO: 2909 - protein, 283 aa, Streptomyces aidingensis
MAGPPTLPIVVAIPTKNEAENIVSTVRSVIGRFKAVVVVDSDSTDDTRALAEAEGAEVVPYTWNGKYPKKKQWCLENVHPETDWLLFLDGDETPSPEMLAELERIFLDGRPVRPAAFDIPLGYWFAGRRLRHGYTMVKRSLLDRTRCRYPEPDDLHAPGMGEQEGHYQPLGEPVARLRAPIEHNDLDPVRTWFDRHNRYSDWEAWLETAPGAREEIRQAKTRQGQLFHKVPLKPLVSFAYGYLYKRGFLDGRAGFDFALALSFYRWQIGLKAREYARRNGPPG

SEQ ID NO: 2910 - protein, 277 aa, Unknown
  Description of Unknown: Gammaproteobacteria bacterium TMED34 sequence
MSTVPATATIIVRNESRNIVECINSVSFFDEVLVVDSGSIDDTVAKANQLGARVIVNQWPGFSRQRQFATENASNDWVFSIDADERVSDELRHAIEQVFKDGTKLDGYQINRRNYFMGQALAHGEGYPDWLLRLFHRGRAEWSHDAVHERVKLIGRIGKIKGDLNHRSQESLAAYFHKQNMYTSLQAKSMWESGRRSSLLKIAASPTVRFLKFYVMRLGFLDGVPGLVHIAIGCFSSFAKYAKLRELEINGGADLPEDDPISPVVGKAGSINPQRQS

SEQ ID NO: 2911 - protein, 269 aa, Trinickia symbiotica
MTVPSSDRPRPTLGVAIIALNSEARLAQCLEAVSFADEIVVVDGGSSDATARIAEAHGARVVVEREWPGFGPQKNRAVAALATDWILSMDTDEVVTPELAASIREAIAAEQAEVFELDRLSNFCGHWMRHSGWSPDWVPRLFRRGAARFSDDLVHERLVFEGPPGRLSGKLLHYSFDDFETVLRKIDAYSSAGARQRLAVNGKRGGVRQALTHGLWAFVKTYLIKGGFLDGRMGFILAVSNAEGAYYRYLKLMLALERQHASDDDRHVS

SEQ ID NO: 2912 - protein, 342 aa, Sphingobium sp.
MTANRPRIAATLIMRNEARCIARCLDSVRPHVDAMVVLDTGSTDDSVAIARQCGAQVHHLDWPGDFSAARNHVLALADADWTLVIDADEWIAQGGETVRDWCDGPPRLGALCIRSSFDLPQQAGPALPSTRSWIARLLPRGVRYAGRIHEQPVSDLPVERTTLILDHDGYEDAQAAGKRDRNTPMLLAALQGDPENPYLLYQLGKEAETARDYGRAADWYDQASARTPDGAPWTHGLLIRRLHCLGQSGASAKAIAIAGQQMAHWQESPDFFFVLGNLAMDRALAEPASALTEWLPLAATAWERCLEIGERPDLDGSVEGRGSHLARHNLDVIRQQLALLGG

SEQ ID NO: 2913 - protein, 252 aa, Unknown
  Description of Unknown: Chitinophagaceae bacterium K23C18032701 sequence
MAVSVVIIAKNEAHAIERCINSALQLTDNVLVIDTGSTDNTAALAATAGAKVVHSAWLGYGNTRNWGAPQAKYAWILSLDADETISPELAREIKQLPLNDNNVVYKIKRQNFFRQKKIRFGAWKNDQVLRLYNRNSTGWNQAPVHEDIELQNMQVTLLQQYIHHYTAKDFYSFIQKNLAYAQLSANKYAAAGKKAGTLKMYFSPLFNFLQGYVFRLGFLDGVEGWYIAKGNAFYTFMKYALLKEASANKEHT

SEQ ID NO: 2914 - protein, 260 aa, Unknown
  Description of Unknown: Gallionellaceae bacterium CG1_02_60_325 sequence
MPLSVILITRNEAANIRECLQSVAWADEIIVVDSGSTDETVAIARSLGARVYEHDWPGFGPQKNRALGYATSDWVFSIDADERVTPELRAELEAAMLDGNADGYCSPRLSQFCGTFIRHSGWYPDYVLRLFRRGKGSFHNLLVHESVQLHGRTEKLHTPLLHYSYHGRADVERKVAAYSTAAAQQMYAAGQRASGLRAATSAGWAFVRTYIFRLGILDGRAGWQIAGMNARTTWLKYRKLIALNMARNRSGEHTPDKPPA

SEQ ID NO: 2915 - protein, 273 aa, Xenorhabdus mauleonii
MNAKKRLSVVMIAKNSADLITDCLLSVNWADEIIVLDSGSTDATCQIAREMGAKVYSNTQWPGFGRQRQLAQSYASGDYVFMIDTDERVTPELRASIEHILAAPDADPDTSNKVYSCARLNLFMGRFMKHSGWYPDRVIRLYRREHYQYNDNHVHESLDTQGATIVALNGDLRHLTCRNLMEFQQKQLNYARDWAKHRYEQGRKTHYFAIISHTLGAFCKTWLLRAGFLDGKQGLILAIVNAQYTFNKYAALWELTQTKSKKNEKKSDLSRHL

SEQ ID NO: 2916 - protein, 385 aa, Frankia sp.
MITRSQRPTADSREPAPPSGGRAGWPVPYDAAGRDATTGQATATGQDAATGQDAVGPVPAPGSVPVTAIILARNEAPNIVRAVGSVGWCEQVVVVDSGSTDDTVELARRSGAAVWHIPWRGYAGQRQQAMMSPEVRHDWVFFLDSDEWVSTTLATEIASRLGTEECVAYSQRRRFVFDGRWIAHSGWYANSWQARLLDRRAASFDDSVNYGERASVAGPVARLAADLIDEDRKGLAAWLRKHVHYAELEAQRRTAQPALRERISRIRREIRHPGRSTRPLGRSIAKDVVFPLVPAKPAALFCYMYVLRAGWRDGRQGLLFCLYYAWYELTVGALARAGHTGAPGATGEPGRGDTAAATAPGAERAVPVPRQRTIPAGAAKGPIGA

SEQ ID NO: 2917 - protein, 266 aa, Acidovorax delafieldii
MPVATGGASAPPTLTVAVLTLNEAHRIEACLQSAAFADQLLVVDSGSTDDTVAIAQRLGAEAHSYPDWKGFAVQRNRLLAHARGDYIFFLDADEVMTPAFAQELQAIVRSGAQAVWTIRWRMVAYGHELKYFRSQSQIERLFVRAMVREFTGVVHEQAELLPPPGGGAVPRRLIEARLLHYSRTTVRGSLEKLTQYAMLGAAKRAATGKKGGVVRGLASGTSMFLRLYVLCGGAGFLYCLFVALEAFFRYAALEYDHQQLSESVRR

SEQ ID NO: 2918 - protein, 258 aa, Unknown
  Description of Unknown: Zetaproteobacteria bacterium CG12_big_fil_rev_8_21_14_0_65_55 _1124 sequence
MNPVSVFIPVLNEEDKIADAVQSVQWADEVLVVDTGCTDGTITIARKLGCRIESLPFEGFGKLRNQAVALCSNDWVLSIDADERCTPELSLEIQATLTGEPTFDAYFIPRRNYFMGRRINHCGWYPDYCQPKLFKKGALTYRNDMVHEGFDIHGRLGYLKSDVLHYSFRDLDQVINKMNRYSTLGMQKMQQQGKTAGMGTALARGLWAFFRIYVLKLGFLDGWAGFVIALGNFEGTYYRYAKLALRDKQAGVSGSHQA

SEQ ID NO: 2919 - protein, 257 aa, Psychromonas arctica
MSVKKHSLSVIVITKNEADRISRCLESVKNVADEIIVLDSGSTDDTVAICQQYTEHVFVTDWPGFGKQKQRALDKATCDWVLSIDADEALDEKMQAELSKLLAQPTIQHDAYKLPWGVTIHGKTLKYGRSARAVLRLFKREGAEFSLDEVHEKVIPVGTNFGKMKGILLHYTHRDFKHGLDKSANYAWLGSQKYFRKGKKSHGLLLALLRSMWVFFHIYVLRLGMLDGSIGFLVAMRYAHGNFNKYAGLWLLENDRS

SEQ ID NO: 2920 - protein, 260 aa, Thiomonas bhubaneswarensis
MKKSEKLSLIIITKNEARNIRNCIHSASGLVDEIIVFDSGSTDGTQLICREMGASVYETDWPGFGVQKNRALEKATGNWVLSLDADEQLSQELKNEIEKILSIDSDAADSYSIPRKSSYCGQFMKHSGWWPDRVVRLFKKSSGRFSDDIVHEKFISPGKTGRLNSPIIHHAITSVEQSIQKMNAYSTAGAERIFARGERTSVTRAFLKGLWSFLRTYILRLGILDGRMGLILAIANAEGTYYRHIKLWLKQRGEHGADKT

SEQ ID NO: 2921 - protein, 285 aa, Unknown
  Description of Unknown: Acidobacteria bacterium sequence
MSVSALILTLNEEVNIARCLESLRWCDDVVVLDSGSSDRTVTIAEAFGARVVHRPFDDWSTHQNWAGRNIPFKHRWVYYSDADEIVPEDLASELIGAAADVKSPNVAYRLRYKNIFQGRWIAHCGIYPVWVLRFFRPERVRWERSVNPIAVVDGSEGRLKSHFEHHSFSKGLEAWIDKHNRYSSLEAREAVAARIEGWPSLARLFSANPTVRRQILKHVGFLLPFRPTLRFAYMYLLRRGFMDGAPGFTYCRLLRMYEAMIDFKIREFASDTTSSTTPVVHPQSL

SEQ ID NO: 2922 - protein, 257 aa, Unknown
  Description of Unknown: Rhodocyclaceae bacterium Paddy-1 sequence
MPLSVVIITLNAAAQLPACLDSVDFANEVLVVDSGSSDGTVELARARGARVIHQDWLGFGPQKQFAVEQAAHDWVLCLDADERVSATLRASIVAALAAPGAKAYRFARCNRFLGRYLRHGEGYPDWSLRLFQRGHGRWSDDAVHEKVVLGPAAGAVATLAGDLMHDSAESIAAYLTKQNRYTSLAAEAAVAAGKRASAVRVVLSPLVRFIKFYVVRRGFLDGLPGFIHVAIGCFNSFAKYAKMREIQLRAAAMGAKR

SEQ ID NO: 2923 - protein, 261 aa, Unknown
  Description of Unknown: Acidobacteriaceae bacterium KBS 83 sequence
MQTHRRATLSVAIITLNEEANLPRTLASIAWADEIVIVDSGSTDTTRAIGQSHGARVVTEPWRGFAAQKNFALSLCTSDWVLSLDADESVSPELAASIQKTIASSPLHTGYALPRRNLFLGRWIRHGGYYPDTKLRLFPRGQANFQETPVHETATFAGNIQTLDGDLLHDAYPTLTSYLNHMQRYSTLGARIAVARGRTGRGLVSFLDGVLLNPLVTFLYNYILRAGFLDGREGLLLHLYHSAYVSWKYAKAWESSRRKIP

SEQ ID NO: 2924 - protein, 261 aa, Unknown
  Description of Unknown: Photobacterium marinum sequence
MSANKPTLAVALIVKNEAKNLQACLETVKGWVDEIVVLDSGSSDDTEAVARSYTDKFFVNADWPGFGPQRRLAQSYVESDYILWLDADERVTPELKASILAVLATPKPDTIYSIARLSWVFGRYIRHCGWYPDRVNRLYPTKLTQYNDDLVHEKVEISEDMAVKPLEGDLLHFTYNDLNHYLVKSAGYAKAWAEQREKRGKRSSISQGLLHAFGCFFKMYVVKAGFLDGKQGFLLSILSAHSTFVKYADLWIRTSTEPPKS

SEQ ID NO: 2925 - protein, 257 aa, Serratia rubidaea
MENRKSLSVVMIAKNEAELLPDCLQSVSWADEIIVLDSGSQDDTVAIAENLGAKVFVNRNWQGFGKQRQLAQSYAGCDYVLMIDADERVTPELRRAIEQVLSAADDDRVYSLGRRNLFLGRFMRHSGWYPDRVNRLYARERYRYNDDLVHESLNTLGARIVPLQGDLLHLTCRDFFAFQRKQLHYAQEWATQRHTAGKRCGYFSILTHTLGAFCKTWLLRAGFLDGKQGLLLAVVNAQYTFNKYAALWALGRNYSEK

SEQ ID NO: 2926 - protein, 223 aa, Unknown
  Description of Unknown: Gemmatimonadetes bacterium sequence
MKPRASGSTNARRAVSAVIIAKNEAERIEDCLASVAWADEIIVVDSGSTDATCDIARRHTDRIHAIPWRGFGPQKQAAVDLASHDWVLSVDCDERIGPELADEIKRLLAEDAPCDAYSIPRRTFLGRKEIRHCGWYPDRTVRLFDRSKARFSDSLVHEHVVTTGPVGECREHMLHYSFSGLAPLLDKLNHYSDLSARQMFDAGRRCSVFDLTLRPSFAFFKTY

SEQ ID NO: 2927 - protein, 266 aa, Unknown
  Description of Unknown: bacterium HR21 sequence
MLLSVCMIARNEASRIAAALESVAWADERIVLDCGSQDTTADIAAACGARVYRAEHTPNLNVNKNRCLRLACGEWILLLDADERVSPQLAAEIQERISGAPREQAFWIPRRNWYFGHPLRYGRQYPDYQLRLFRRGAAYFPERHIHEYPTVHGAVGYLHTPLEHFPYETLSHYLQKLDRDTDFQARWLQQRYGAISLGKFFRHGLWRAAKRFIERYIIWGGFRDGFAGFWAAWLDGVNTFVTLAKWWHLSQYEHGYALSETNSLLR

SEQ ID NO: 2928 - protein, 301 aa, Unknown
  Description of Unknown: Verrucomicrobia bacterium sequence
MSERSEARAPLSVLVPVKNEGANLRDCLASVSFAEEIVVVDSASTDGTLAIAKAAGARVVQFVWNGSFPRKKNWALENIPWQHEWVLIVDADERVTPQLEREIREAIRRTDVDGFYLNRRFWFLDGWINHCGYFPSWNLRLFRHRLGRYEQIEIEDNVLSGDNEVHEHVMLNGLAEYLSAPMEHYAFPDIATFVEKHNRYSTWEAAASGKLHEREGEKTLRATPFGTPVERKRWLKKLATRTPFRPSLRFLYHYVWKQGFRDGYRGWMLCRLLAWYERMILLKQREATAQSGVSSHSITQR

SEQ ID NO: 2929 - protein, 257 aa, Pantoea sp.
MMPRQRLSVVMIAKNAAPLLDECLASVAWADEIIVLDAGSRDDTPARARALGARVWQSDDWPGYGPQRQRAQQYASGEMILMIDCDERVTPALRQAIEQVLDAPPTDRVYSIARRNLFLGRFMRHSGWYPDRVTRLYPRRYRYSDHLVHESLETGDAEVVPLRGDLLHLTCRDFADFQRKQLAYAEAWAQERHQRGKRTGLLAIFGHALGAFVKTLVLRGGVLDGAQGWLLAVVNAQYTFNKYAALWALHQAAKGDK

SEQ ID NO: 2930 - protein, 276 aa, Unknown
  Description of Unknown: Gammaproteobacteria bacterium TMED50 sequence
MSTVPATATIIVRNESSNIVECINSVSFFDEILVVDSGSIDDTVAKAEQLGARVMVNPWPGFGRQRQFATENAANEWVFSIDADERVSDELRRAIEQLFANGTDRDGYQVNRRNHFMGRPLAHGEGYPDWLLRLFHRQRARWSQDSVHERVELIGRIGRIRGDLDHHSQESLDDYFHKQNMYTSLQAHIMWESGRRSSLLKLASSPTVRFIKFYIFRLGFLDGIPGLFHIAIGCFNSFAKYAKLRQLEINGGASLPEDDQISPAAETAGSTNPQQR

SEQ ID NO: 2931 - protein, 268 aa, Unknown
  Description of Unknown: Burkholderiales bacterium PBB4 sequence
MSKISVYIIAYNEAAKVAATIKSVKWADEILVIDSWSTDATADIAAQLGARVVQVKFQGFGDLRNQAIAQCSHEWIFSLDADERCTIEAANEIKTIVQDSDAADAYWMPRRNFFMGQWIRHSGWYPNYRQPQLFRKGRMTYEPKQVHEGYVLHSAKPIGHLKHAIWQIPFKNMAEVMHKANRYSTLGADRVSEKKVSMWMALGHGTWSFVKHYVFKLGFMDGWPGFVIALGNFEGTFYRYVKALEIQKGVQWQHPDSSSTYSEPQDSV

SEQ ID NO: 2932 - protein, 266 aa, Unknown
  Description of Unknown: Planctomycetes bacterium TMED75 sequence
MGTSQEQSDPIPGLTACFTCMNSMRTMPRSLDSIQGLVEHVVVVDSGSTDGTIEFCRERGAEVVHRDWTNFPEQKTRALELCADSPWVLNLDSDESPDSELVAGIRSALADPSESVDGFELNRLTLLHGQLLRHTFQPEWRLRLCRGGKGRVNHDSPVHDRIDVPGGVERLPGVLVHDSWIGATDMLTRGVRYGALVAEGYRGGGRPINLLVNPASAFLKQLLLRRGFLDGWRGWVAAGGVASQALAKHLAIMELRELKREERRSS

SEQ ID NO: 2933 - protein, 370 aa, Pseudacidovorax intermedius
MTRKTALVMIVRNEAARLARCLDSAAPWVDAMVVLDTGSTDGTPALAEAHGAQVGHFAWIDDFAAARNAALALSDADWNLVLDADERLVDGFEQVAALRDAMDDALGLVRIDSVYDNAGHEAVSSAWVPRLLPRGVRYEGRVHEQPIGPPALPRRRLPIVLDHDGYLPERLAEKRGRNGALLRLALQDHPDDAYLHYQWGKEQEVVLRDHAGAAAAYERALARMDPSLAWRHDVVVRLLFCLKCAKRFEDALALAQHEMPHWRHSPDFSFAVGDLLLDWAVAEPARAPALLPAIEQSWLRCLEIGEQPELEGAVHGRGSFLAAHNLHAFHLSLGDEAKAAAFAALRTAQGSRQSGASHGIEGTAGGTEEI

SEQ ID NO: 2934 - protein, 297 aa, Mameliella alba
MTLTVVLLTLNEARHIERALRSVAPFADRCVVVDSGSTDDTVARVRALGAKVLTHPFVNQARQFNWALDQLPEDTGWVFRLDADEVVSDALAAEIAARLTGLPNDVAGLTVPRRIAFLGRPIRYGGLFPAHVLRIFRHGRGRSEDRWMDEHIAVQGRVAALRGELLDDNLNPLGWWIDKHNRYASREALEVLLAERRSAAPGAVAMGQQAAAKRWLKRNVYDQLPPGLRALAYFLYRYLLRGGFRDGYPGLAFHVLQGFWYRFLVDAKLYEARSHLSKNGGDLVATAQEVLGIEIGD

SEQ ID NO: 2935 - protein, 260 aa, Grimontia marina
MSQAQRATISAIIITKNEEQILPECFASLDWVDEIIVVDSGSTDNTIAIAEAAGAKVHVNAEWPGFGKQKQLAQSHATKDWVLAIDADEVITDELKRSILDVLANPPQNTLFILRRTTWVFGRFLKHSGWYDKIVRLYPRELTGYNDALVHEKIIEPEGSTKQTLNGDMLHYSYRDLHQYLVKSAFYAKSWADGRQARGKKSSISQGILHALGCFLKMYLLKRGFLDGKQGFLIAVLSAHSTFVKYADLWIRANDSRAAK

SEQ ID NO: 2936 - protein, 254 aa, Selenomonas ruminantium
MPRLAVLILTKNEEANIEECIKSASFADEIVVIDSGSTDSTQAKAESLGARFVVHPMDDSGFAGQRNFAMTQTEADWVFFLDADERIVKDAAEKIKAIVAADTPTAYRVQRKNVIMGKMMQYGGHRPDYVARFYPRQSVKWHGRVHEGIETVLPIKELPGCLHHYTYTTWQQYFSKSNQYTSLSAQTMFANKKKASRMGVLSHAFFAFLKSYVLKQGFRDGYLGFVMSVLAANASMTKYLKLRNLYRLAKGQQE

SEQ ID NO: 2937 - protein, 307 aa, Halioglobus pacificus
MNVVAIVLTLNEEKHLRRCIESVSGVVDEVVVMDCYSTDSTLDIAQEMGARVIQHEWVNYAAQFNFALTELDQDTGWVLRIDADEYLTPDLAAEIRQGLALLSTDLEGVYLPRRMKFMGRLIRHGGVFPVQVLRLFRYGKGECENRWMDEHVKVSGNTACFSNELIDDNLNSLTWWIDKHNKYASREVVDMLNLEYAFMPHDTVASLSDGSQASLKRWIKENVYARLPGGFRAFAYFCYRYFLRLGFLDGKEGTAFHILQGFWYRYLVDAKLAEVKRYMKANGCSAPVAIQDVLEIDVVPESVSQAK

SEQ ID NO: 2938 - protein, 262 aa, Coraliomargarita sp.
  MOD_RES (49)..(49): Any amino acid
MSRVPVSCFIRTYNEEKRIKPVILAAREIVNEVIVIDSNSTDNTRIIAXEAGARIIQHKWLGNGHQKRLGEDAASHNWLLDLDADEILSPELQEAIRELFAAGDPHPGIYSLRLVTVPPFPKGAVWHRSNLFYRNKLYHRKIVRMPAHAAWDQFEVPSNQTVRELKGALLHYSFADIGQQMTKMNRVSSVRASETKLKPKPVLAFRILFGFPFYLFKKLFLQGMYRAGIYGFACAAVIASNRWLKDVKMYEIHLAKNGRNEI

SEQ ID NO: 2939 - protein, 254 aa, Unknown
  Description of Unknown: Hymenobacteraceae bacterium SYSU D60016 sequence
MEVSLSVVIITYNEEQNIARCLDSVEGIADDVVVVDSFSTDKTKAICLNRGVRFVERPFDGYVTQKNFANAQAAFPHILSLDADEVLSEELQQEVRALKQNWQLGGYYLSRLTNYCGAWVRHGGWYPDLKLRLYDRRQGQWEGLLLHEKFELAAGARSGAVKGDLLHYSYTSIKQHLDQINHFTEVALEEMKQQGKQVSVLGLIVKPPFRFLKMYFLQLGFLDGFAGFCIAVLSSYAVFAKYAKLYLFHKQPLS

SEQ ID NO: 2940 - protein, 250 aa, Bordetella genomosp.
MTLSVIIISKNESANILACLESVAFADEFIVVDSGSTDNTVELARDFGARVEITPDWPGFGPQKNRALDLATGDWVLSIDADERVPPELAAEIQAVMANPTADAYEIARLSDFCGRFIRHSGWWPDFVLRLWKRGSARFTDAAVHERVVPQQGTPARLKGHFIHYPYNNFEALIAKANRYSSDAAAMMHARGKRATIFSALGHSFWTFVRIYLIRRGFLDGKHGLVLAVTAASGSFYRYAKLMFLTDQRK

SEQ ID NO: 2941 - protein, 271 aa, Desulfomicrobium apsheronum
MIHDGHTVTALVITKNEETHLSECLASVIGWVDEVVVLDSGSTDRTKEIAEQYGARFYQNLEWQGFGRQRQIAQDYVTSSWCFWLDADERVTSALRDEILSVLRQGTANNVYAIPRLNWFFGRFIRHCGWYPKPVVRLYPLALTHYDDANVHEQVEIRDSFCVKTLVNDLMHYPYKDLRHYVTKSASYANDWAKMKDAEGKKSSLVGAFFRAVLRFFRMYLFQKGMLDGKQGFLLCVLSSYYTFLKYAELWILGQDKEKEIRNRHLQERQK

SEQ ID NO: 2942 - protein, 255 aa, Unknown
  Description of Unknown: Candidatus Sulfotelmatobacter sp. SbA7 sequence
MGLSVAIVALNEEANIGRTLESVRWADEIVLVDSGSTDRTPEIAQQYGARVVVEPWRGHVAQKNYALELCTQTWVLALDADEEVSPSLAKEIRSAIEDPNAQNGYWIPRKNLFLGRWIRFGGFYPDPKLRLFRRGEGYSTGHDPHDRYELKTGRAVGRLKNPLVHYAYPTLSYYLEHMNSYSSLGAKLAVANGHRRFSLVNIVARPILTFVYNYFLRLGFLDGREGLLLHLYHSVYVSWKYSKAWELGKQDHRHS

SEQ ID NO: 2943 - protein, 255 aa, Unknown
  Description of Unknown: Pectobacterium actinidiae sequence
MRKYLSIGIITKNESELIEECLQSISWADEIIVVDSGSTDNTVEIAHQYGAKVYQHNDWPGYGKQRQRAQGYASGDYIFFIDADERMTPELRQSIESVLLKPNLDDKIVYSCARKNLFLGRFMKHSGWYPDKVIRLYANKHYKYNDNNVHESLDCGDAPIQHLAGDLKHLTCRDFSAFQKKQLRYAVAWARERHEREISCRYSEILTHSIFSFLKTWIFRAGFLDGKQGLLLAFVNAQYTFNKYTALWSFNKNKK

SEQ ID NO: 2944 - protein, 300 aa, Unknown
  Description of Unknown: Oscillatoriales cyanobacterium sequence
MTSSSSKIPVSVLIPAKDEELNLPACLASIARADEVFMVDSQSSDRTVEIAISSGAKVVQFYFDNRWPKKKNWSLDNLPFRNEWVLIVDCDERIPPELWDEIARAIADPNFDGYYLNRKVFFLGQWLRYGGRYPDWNLRLFKHQKGRYENLGTESVPNTGDNEVHEHVILAGQVGYLKHDMIHEDYRDLFHWIERHNRYSNWEARVYYNIIEGRDDSGTIGAHLFGEKPLLRFILFYFIQLGFLDGKAGYIYARLLSQYEYQINAKLYELRSCGGQLNVAGSEPSLSPVVRSQETEVKSP

SEQ ID NO: 2945 - protein, 258 aa, Leptospira wolffii
MTLPISACIITLNEEDNIERCLSSLDFVSEIIVLDSGSKDKTEALAKKKGAKVVRRKFDDYVSQKNHVIGLAKFPWILTLDADEEISSQLKEEIKGLFQTVPKEDGFLIPRLTMYMGKWIRHGGWYPNYRVRLFQKSKGQFVGGKVHEAVKLEGKRKKLENPVLHYSYASLHDHVNFINRYSELAALEKFGKGKRYGLFLALLEASYKSFWMYFVRFGFMDGRRGLILAIMGFYYNFLKYTKIFEMTLLEKGKTDPKK

SEQ ID NO: 2946 - protein, 261 aa, Saliniradius amylolyticus
MSTTPISAFIITKNEQAHLAEVLDSLSKFDEVVVVDSGSTDQTRSIAREKGARVIERDWPGFAKQKQYAMTCCQHDWVLNVDGDEVLPEGTYEQLQKLIGAQAQSNTVIRLYFEDLFWGEPMASMSAKRSIVRCFHKSAVSYPDDRRVHENVVPKNVVNEKPMPNLVKHYGYDSTHGLMDKQNQYSLLKAKDKYDKGKRGSILKLAVIFPLTFIKAYVFKKMFASGARGFVHATIEAMYAFLKEAKLLEMNYRQRTKDRSI

SEQ ID NO: 2947 - protein, 297 aa, Marinobacter profundi
MALVNSTWEPGTAPVSVVMISLNEAHNMEAVLENLKGWAQEVFLVDSCSTDATVDIALRYGVHVVQRPFRGFGDQWNFALRELPICAPWTMKLDPDERLSDSLKQEIIEKVEKAADRSFTVPIRLYFMGKRLSSVLRLLRLWKTGTVQFSDVQANEHAISEDPPGILVGEVKHMDSPSLDHWVVKQNRYTTAEAISQSQNKPLAVPPKLFGNALERRMWLKRNFWKVPGRYLILFGYHFFVLGAWKAGKVGWIWSHLRTEVYRQWEYKRFEIEQTGRLPTSIPSNPGEPDSRVRYYE

SEQ ID NO: 2948 - protein, 267 aa, Unknown
  Description of Unknown: Gemmatimonadetes bacterium sequence
MPDRAPPVPPVPSVPPASLPLTVVIPTLNEAWQIAEALASLRWADEVIVADGGSTDDTVAIARAHGARVIEVKGPTIAAQRNAAIAAARNQWILALDADERVTAALREELGVVLAAPAHAAYRIRMQNIYLGRERRRGRWGRDWHVRLFQRSRRFVETRVHEHLERVPDTGELSGCIRHAPYRDLTHHLEKIILYARWGAQDLHARGRRATAWDLTARPLWRFARDYVVAGSWLDGRGGIVASVLTAYSGFLKYAYLWDLGARSPTA

SEQ ID NO: 2949 - protein, 256 aa, Dechloromonas agitata
MPATRQPLSVAIITLNAAAQLEACLRSVHFADEIVVVDSGSTDGTQELAERCGARVIAQPWLGFGPQKQFAVEAAKHDWVLCLDADERVSPELQAAIESTLQQPATGAYRFARCNRFLGRYLKYGEGYPDWSLRLFDRRQARWSDDAVHEKVVSQASVGTLPGDLLHDSAETLAAYLTKQNRYTSLAADMAWEAGKRSSFGRLVFSPIVRFIKFYLLRQGFRDGLPGLIHIAIGCMNSFLKYAKMLERQRTDSALR

SEQ ID NO: 2950 - protein, 258 aa, Xenorhabdus hominickii
MSEKKRLSVVMIAKNSADLIADCLQSVSWADEIIVLDSGSTDATCRIANEMGAKVYTNTQWPGFGRQRQLAQSYASGDYVFMIDTDERVTPELKSSIEHVLNNPDDNKVYSCTRLNLFMGRFMKHSGWYPDKVIRLYCRERYQYNDNQVHESLDMQGASIVTLKGDLRHLTCRNLMEFQQKQLNYARDWAKYRHEQGKKAHYLSIFSHTLGAFFKTWLLRAGFLDGKQGLVLAMVNAQYTFNKYAALWELTQMKSKKR

SEQ ID NO: 2951 - protein, 264 aa, Burkholderia sp.
MNRPTLGVAIITRNAGARFAQCLEALSFADEIVVVDGGSTDATADTARTHGARMIVRTDWPGFGPQKNRALDALATDWVLSIDADEVVTPELAASIRATLAAPGADVYALDRLSSFCGQWIRHGGWYPDWIPRLFRRGAARFSDDLVHERLVFDGAAKRLTGKLLHYSYEDVDTVLHKLAAYADAGARQRAAAGGRGSFGKALARGAWAFVRTYLLRAGFLDGRAGFMIAVFNAETVYYRFLKLALLNTRERETPKRRNPAARQ

SEQ ID NO: 2952 - protein, 254 aa, Pasteurella dagmatis
MSTLSVAMIVKNEAENLEKCLKTIQGWVDEIVILDSGSTDNTEEVALKFGAKFYTNTDWPGFGKQRQIAQQYVTSEYVLWLDADERVTPELRQSIQSAVEKNEENVIYKISRLSEVFGRKIRHSNWYPDFVLRLYKTKFTQYNNEPVHEKVIIPNNAKVEKLSGDLEHYTYKDMHHYLVKSAGYAKAWAEKREKAGKKGSLFSAFTHAIGCFTKMYILNAGFFDGKQGLLLAILSAHSTFVKYADLWVRTETKK

SEQ ID NO: 2953 - protein, 251 aa, Bordetella trematum
MSLSVIIITKNESANILGCLESVAFADEFIVVDSGSTDDTVELARSFGAKVQVTPDWPGFGPQKNRALDLATGDWVLSIDADERVTPELADAIRQAMAQGQAQAYEMPRLSWFCGRFIRHSGWWPDYVLRLWKRGTARLTDAVVHEKVVADGKVERLEPHLVHYPYPDFESLINKVNRYSSDGAAMMHAKGRRANVLTALGHSFWTFVRIYLLRRGFLDGRHGLVLAVTAASGSFYRYAKLMLKSEPGPPK

SEQ ID NO: 2954 - protein, 247 aa, Legionella sp.
MLSVIIIAKNEAQNIRRCLESVAWVDEIIVLDSGSADNTVAISREYTPHVFQTDWQGFGVQKQRALELATGDWVLNLDADECVGDTLRQRIVEVMAQNTHEGYRIPIQMCFYGKPLRFASSPSRHIRLFKRAGAVYSADYVHEKIELPFAARIGQIKAPILHYSVRDVSHAINKLNLYSSYSAAIRCQAHQPASLFKTIASSCWMFFRSYILQCGFLDGAPGLVFALLQSQGSWYRGIKQLYRDEIE

SEQ ID NO: 2955 - protein, 258 aa, Pantoea sp.
MTARQRLSVVMIAKNEAALLPACLDSVSWADEIIVLDSGSSDDTVDIARQAGAQVFHAEAWAGFGKQRQRAQRYASGDMILMIDADERVTPPLRASIEAVLAQPPSGTVYSLSRSNLFLGRFMRHSGWYPDRVMRLYPRALNYNDNLVHESLDTQGAPVVRLEGDLQHLTCRDLIAFQQKQLAYAAAWAQERHQRGKRCGLFSVFTHSLGAFLKTFLLRAGFLDGKQGCLLAVVNAQYTFNKYSALWALNHAADKGRL

SEQ ID NO: 2956 - protein, 254 aa, Selenomonas bovis
MSRLAILILTRNEEVHIEACMESASFADEIVVVDSGSTDRTQAIAESMGARFVTHPMGDDGFAGQRNFALTQTTADWVFYLDADERIEAAAAEEIRRIVSEDLPAAYRVERKNIVFGQLMRHGGHRPDFVDRLYPRTAIRWRGKVHEGIETDLPRKTLHDVLRHYTYTTWQQYFAKFNQYTSLAAQSMYERNKRVGEAGALGHAVFTFLRDYLLRGGFLDGFPGFTMSVMASVYTFVKYLKLINLYRCQDGGCK

SEQ ID NO: 2957 - protein, 266 aa, Unknown
  Description of Unknown: Gammaproteobacteria bacterium sequence
MTTDSRYSSQPQILISVFIIAKNEEDRIQKAIESVIDWVDEVIVIDSGSEDKTVQVAQASGAKVIYNSWQGYGQQKRFGEDQCKHPWILNIDADERVTPEAKNEIQTILSGEPKYSGYRMSFKDIMPFELTPHRRAWATNHLRLYDVRQGRFRNHSSLDSVVMDKSIVDSIKSPCHHQSIRSFDHLVAKANFYTNLQADDMTKKGRIIGAGRLLIEFPISFIKAYFLRHYYIYGVYGFGFSMIFAFSKFLRLAKRYEQQLQQKMKP

SEQ ID NO: 2958 - protein, 333 aa, Blastomonas natatoria
MIVRNEERCITRCLDSVRPWVDRMLVLDTGSTDSTRELARQAGADVHEIEWPGSFSEARNRSLDLADADWNLVIDADEWILSGGELLRAWCRNPARLGVVCQRSMIELGQDAPAAAARAEGQHWITRLLPRGVRYEGRVHEQAASDLPRIRLELHLGHDGYLDAQLNAKRDRNGALLLLDLKDNPGDPYILYQLGKEAEVRREFGDACRYYRQSLEATPGSANWLHCLSTHYLYCLGQTGDFDTAFAFADQNMTRWAHSPDFFFVLGNLALDKAMTDPANALGEWIPFAAAAWEQCLEIGDQPSLEGSVHGRGSHLARMNLEAIRSQMPGLAA

SEQ ID NO: 2959 - protein, 252 aa, Glaesserella parasuis
MPTLSVAMIVKNESQDLAQCLETVKGWVDEIIILDSGSSDNTKEIALQYGAKFYENTDWQGFGKQRQLAQQYVTSDYVLWLDADERVTQELKQSIQQAVSNNEQNTVYQIPRLSEVFGKQIRHSGWYPDYVVRLYRTDFAQYGDELVHEKVHYPKEAKVVKLKGDLLHFTYKDIHHYLVKSASYAKAWSEQRAKAGKKATLFQGVTHAVGCFVKMYILKAGFLDGKQGFLLAVLSAHSTFVKYADLWNKYQK

SEQ ID NO: 2960 - protein, 266 aa, Desulfuromonas sp.
MNNSSVRQTLSVTIITKNEEDRLPVCLDSVKDLADEIIVLDSGSDDRTVEIARQYTEQVFVTDWPGYGKQKQRALEKASCDWVLAIDADEALTPELQDEIQDMLARDVQEVAYFLPWAVTIFGKRLDYGRSARAPLRLFKREGARFTDAMVHETVITAPGKAGKMKGRLLHFTHRDFGQTLYKNAHYAWLGAQQRYQKGKKGGLVGATVRGILVFIQIYILRGGFLDGRVGFIMAVMYSQGAFNKYAGLWTLYRMEKLRGNGKMLK

SEQ ID NO: 2961 - protein, 257 aa, Xenorhabdus khoisanae
MGAQKRLSVVMIVKNASDLIEDCLLSVNWADEIIVLDSGSTDETCQIASEMGAKVYTNTQWPGFGRQRQLAQSYASGDYIFMIDADERVTPELKASIEQVLANPDDKKVYSCSRLNLFMGRFMKHSGWYPDKVIRLYCRERYQYNDNQVHESLDTQGASIVTLKGDLRHLTCRNLMEFQQKQLNYARDWAKHRYEQGKRTHYFSIFSHTLGAFFKTWLLRVGFLDGKQGLVLAMVNAQYTFNKYAALWELTQTKSKK

SEQ ID NO: 2962 - protein, 664 aa, Marinobacter sp.
MLNRQSISQALLLTGLGGALASSSIIAGTTLLLAIVGGYLIKQQTLIKEGWEVPKELRLIHFAFWFFVVTSVASWIAEGFEYEGGKTLGAHARLILFWPLAIALIGAKVNARTIFAAYMVSCGVICLLFLTELAGNSWSLTTTLRQRFGPGINPIHFGNLALLSALLAAAGAFFFHSQRQKTLSVLAILLGIGALAVALMSQTRSNLIALPALLPFFALLIPGRKKILAIAVLGAIAFTAVFNSERFTDSLEAVLEGKIDNSLEMRIEAWQLAWNQFLENPVMGSGLSGYHEAASRHEDDTFLACCTDHAHNDLLQQAATKGITGILSWLFLLAIPFAIFIRQTRNQNRTVSILATAGALVPSGYLVFGLTEAAFDRSLFLTYYLVSIAAISAAMLHELELSYTRKRKRKVSATIITKNEEDHIAACLSSVRPIADEIIVLDSGSTDKTVEIARQYADIVEITDWPGFGIQKQRALELASGDWVLSIDADERVSPALAREINHTLSDPDADAYRLPWAVTLYGKRLDFGRSGRAPLRLFRREGVRFSSAMVHEKILVPEDRKIRSMRGRLTHFTHRNFGHALEKSAKYAWLGSQEKFRKGKRTRFLVYPTLRGLMTFLQVYVFRLGFLDGSVGFLVAVTYAQGSFNKYAGLWTLTRTERQKSRE

SEQ ID NO: 2963 - protein, 251 aa, Unknown
  Description of Unknown: candidate division Zixibacteria bacterium sequence
MLTLSVIIITLNEEANLPRCLESVKWAEELVVADTGSVDRTLEIAKECRAKTIQLEWEGFGKAKQRALEAASCDWVLSLDADEVVSERLRAEIQNLLTSDPPPFDGYSIPRRSMFLGHWMSHGGWYPDYILRLFKREKGRFEHKKVHESLSLTGRAGRLKGELLHYSDPDLEHYLKKMNRYTSLSAQELQERGKVASLADVLFRPMATFWKIYLFKGGFLDGIYGFLLALFSSVHVVTKYVKLWLLSRNAE

SEQ ID NO: 2964 - protein, 260 aa, Robbsia sp.
MHAPTSSPARPTLGVALISLNAAARLAPCLAALSFADDIVVIDGGSHDATQQIAREHGARVIVEPVWPGFGAQKNRAIDALGTDWVLSIDTDEIVTPALAQAIAAAIRQPSADVYALDRLSSFCGRWIHHSGWYPDWVPRLFRRGAARFSDDLVHERLVFDARCERLAGKLMHYSYEDFDTVLRKLDAYSSAGARQRFAAGKRGGFGKALGRGFWAFVRTWILRRGFLDGRAGFMIAVFNAETVYYRFLKLGAHHDDRVA

SEQ ID NO: 2965 - protein, 290 aa, Unknown
  Description of Unknown: Aquabacterium sp. NJ1 sequence
MNKQLRISVLILTKNEQQDLPGCLQSVAWSDDVHVYDSGSTDDTLAIARAHGASISQRTYPHSTAPFGGDEAAHRNWGLREIQFKHDWVLLLDADERITPHLLDTISARLNQAPGRAAFRFCRRDYFLGTWLKHVTPSPMHIRLVRPRQVHYERLINPVLVVDGEIEDLSSYFDHHPFSKGIAHWFAKHNGYSDLEARQIANTPDQAGTFEWRKALFSRDVTERRQHQKSLYYRLPLRPAIMFLGLYIGKRGFMDGRAGLVFATLRAIYEYMIVLKVTEMQSRLQQGGQR

SEQ ID NO: 2966 - protein, 279 aa, Unknown
  Description of Unknown: Proteobacteria bacterium sequence
MNRSERITGASAGTDSRITGCVITYNEESVIETCLRSLSVCDELLVVDSHSTDRTREIAARCGARVIERDWPGYRSQKQFAVNEATYDWILFLDADEQLSPELAAEIEALKAQGLGRYAAYDIPFLSSYFGRYLRHGDWHPDHHIRLFDRRRASFGGYEIHEKVVVRGPVARLRGSILHDSYTSLEDQLAKLARYARLMGEAMYASGKRGSWAQVFFNPLWRFFRAYVLRRGFLDGWRGLAVALIEANYVRQKYLWLLILQRLARERARQNATGAPDRH

SEQ ID NO: 2967 - protein, 308 aa, Synechococcus sp.
MDSAALQLRGSGYSSSFHLPANTQITPTVKHASSPTIAGVVLCLNEASNLARALRSLSWCDELMMIDSGSSDGSQAIASSFGARVMEHRQEGRFLISEQRNWALSHGKLQSQWILFLDADEEISITCQQAIQQVIQHPAAADAYELTPRYWFLGRWLKRTQGYPNWHPRLVKRGVVGFEGGVWESFTAGHTIGRIQEPYEHYAFSKGIDDWLERHRRYADWEAEKIDAVLSGQGVQALGTRRWQHLRLAMAHAWPLRPILRFSQKYVLQGGFLEGWQGLLFALLMAGYDLITITKLIQRRRLKQGLPL

SEQ ID NO: 2968 - protein, 291 aa, Butyrivibrio sp.
MLDLTVVILAKNEEADLKRCIDSFGGIVKRFVVIDSGSTDNTVELAKSLGADVYYHEWTNYATQFNWGLNNTNIETAWTMRIDADEYLTPELCKEMAEKLPSLDYSVTGIELNRRLIFLGKWMRHGGIYPIFFLRIFRTGKAYCEQTNMDEHLILTEGKTIQFRNDFVNGDPKSLSWWIGKHNGYSDREVLDYLSKEKQLEDNATIKPNLFGNPAERKRWLKYNLYYKCPGSVRARLYYIYRYYLKLGFLDGKEGQMFAFFHAYWYRYLIDAKLYECKKYGIRKTGQGEAK

SEQ ID NO: 2969 - protein, 255 aa, Unknown
  Description of Unknown: Photobacterium profundum 3TCK sequence
MRKHTLSIILITKNEADRVTACLRSIAPIADEIIVLDSGSTDETVTICQEYTDNISITDWPGFGKQKQRALDKATCDWVLSIDADEALDTKMQQALIQLLEQDVIQPTAYKLPWGVTLYGKTLKYGRSARSVLRLFKREGARYTLDEVHETVIPVEGETATLPGFLLHYTHRDYGHGLDKSSQYAWLGAQKYHRKGKRSHGLGLALLRAIWTFFHIYILRRGFMDGSVGFIMAMTYAQVNFNKYVGLWLLEKGRS

SEQ ID NO: 2970 - protein, 256 aa, Leptospira langatensis
MSLPISACIITLNEEDNIERCLSSLDFVSEIIVLDSGSHDNTEKLAKKKGAKVVLRKFDDYVSQKNHVISLAQFPWILTLDADEEMSPALKEEILALFRKGEPDADGFLIPRLTMYMGKWIRHGGWYPNYRIRLFQKSKGKFVGGKVHEAVQLSGKKKKLKSPVLHYSYKNLYDHVNFINRYSELAAAEKFGKGKRTGILLALLEAGYKSFWMFFVRFGFLDGRRGLILAIMGFYYNFLKYIKIFEMSLAEKEKQK

SEQ ID NO: 2971 - protein, 256 aa, Unknown
  Description of Unknown: Pectobacterium versatile sequence
MIKKISILLIAKNESKLLESCLQSISWADEVIVVDSGSTDSTVEIAHRYGAKVYQHEDWQGYGKQRQRAQSYASGDYIFFIDADERVTPELRQSIESVLLEPNLDDKTVYSCARRNLFLGRFMKHSGWYPDKVIRLYANKRYKYNDNNVHESLDCGDAPIQHLSGDLKHLTCRDFSAFQEKQLRYAVAWARERHEKGRSCRYSEIFTHSIFSFLKTWIFRAGFLDGKQGLLLALVNAQYTFNKYTALWSLNKKTRK

SEQ ID NO: 2972 - protein, 255 aa, Unknown
  Description of Unknown: Enterobacteriaceae bacterium ML5 sequence
MADKKRLSVVLIARNEAGLLRECLESVAWADEIVLLDSGSEDETVEVARSFGAQVFRNAQWPGFGKQRQLAQSYATGDYILMIDADERVSPELRQSIENALKDPQENTVYSLGRSNLFLGKFMRHSGWYPDRVNRLYPAHFRYNDDLVHESLETDGARVLPLQGDLLHLTCRDFFAFQRKQLGYAQAWATQRHQQGRRCSFFSVISHTLGAFVKTWILRAGFLDGKQGLILAGVNAQYTFNKYAALWAFSQPLQK

SEQ ID NO: 2973 - protein, 235 aa, Unknown
  Description of Unknown: Candidatus Rokubacteria bacterium sequence
MAERPEISVVLITRNEAARIRACLDSVRWAEEIVVVDQHSHDDTAAICRAYGARVIARDMAAGFGEQKNFAIAQATRPWILSLDADEEVTPALRRAIEAAVAAPGACVGFRIPRLTSYLGRCIRHCGWYPSPVLRLFRRGRGRFTDALVHEEVLVDGPVGDLREDLQHRSYDSLADHVRKLLDYTAWDARMLRRRGVRLGLLGALWWLAVKPAATLVRKLVVQRGYREGWHGFVL

SEQ ID NO: 2974 - protein, 253 aa, Unknown
  Description of Unknown: Bacteroidales bacterium sequence
MRHISATIITFNEEHRIKACLASLDGIADEIIVVDSFSTDRTAEICIEHGCKVVRREFTGYGAQRQFATSLTTHSYVLSIDADEVLSPALRSTIQHLKETGFDHRVYRMSRLNFYCGQPVRHCGWYPDIQIRLFDKRYANWNLRDVSERVIFPDSLRPEMLDGDILHYRCTTPEEYRQVQTRHAAITGKVLSAHHDSISPVTPYIKGVTAFLDCYLNKGAILDGAEGRAISREQYRMAYLAYNLARRALKKAR

SEQ ID NO: 2975 - protein, 267 aa, Advenella kashmirensis
MPAEAARPTRRVTLAVALIVKNEAQNLAACLDSVAGWVDEIVILDSGSTDATEQIARRYTQAFYTSSDWPGFGPQRQRAQTHVTADWILWLDADERVTPELRASIQAVLQNPPDNTIYQVARLSWAFGQFIRHCGWYPGHVERLHPRGLTQYDNALVHESLVLPPGARLATLQGDLLHFTYATVDEHLRKSAGYAIAWAEQRAAAGKKGSLATATLHAAARFFRTYFLRLGILDGRAGFLLSVMAAQSVFNKYACLWSRTRQAKPPR

SEQ ID NO: 2976 - protein, 282 aa, Azospirillum sp.
MPRPSFSDASLTVVVVTLNEAVRLERCLDAIPDRYPVLVLDSGSTDDTLAIAQRRGCVVAHNPWPGFAEQRNVALTRCGIESRWVLFVDCDEFHQPAFFDWFEAEGRERQDFDVAMLTSWLVFRGVTLRHAPGYPIYHPRLVRRGAVHFVPNQSGHGETVAAGTRCLTLDIPYAHHFYDGDLSGWMTKHIGRAAQEAFLLPGPGREESRRARLLRLAGRLPFRPMLRFLYHYLLRGGCRDGRAGLEYALMYMWYEATKSLFRLAAGGRPASRAPAAHAQIVP

SEQ ID NO: 2977 - protein, 321 aa, Rhodopirellula sp.
MRRGHQGCARVDDRCGQSGSRDSQAGNQRVTQPRSDSADRPTRLAVSVVVLAKNEEINIARCVDALAWADEVVVVDDASTDATVALAERSGARVVNHPFESFAGQRNWALDHAGLRNEWVLMLDADEVSTAEFAEEIGRAIESAGPEVVAFRTCRKTMLDGVWLKYSDGFPVWIMRLVRRGRARFEDSGHGEVPVPAVDGDLGTIRAPFIHEAFSRGMDDWWMRHVRYAGREAKRECGQERDETPWLIFSLDASRRRRGLRSLARRVPARGAMRFFYQYILMGGFRDGPTGRRFCRMMACYESIISIRKSESLTVDRNGDP

SEQ ID NO: 2978 - protein, 281 aa, Parvibium lacunae
MPDLTQPTEAKSTTRRVPISVVIITLNAGAVLADCLASVAWAAEILVVDSGSTDNTVALAEAAGARVLQQIWLGFGPQKQWGVEQARYDWVFCLDSDERVTPALAASIATWLTQPFDPEKTLARCARRNRFLGRYLRHGEGYPDWNTRLFHRAYGYWTDLPVHEHVRSRQPVSCLATLEGDLLHHSQENLPDYLRKQERYTQLQAMLMYAKMRDLPLVKRLWRLGVTVLKVLLAGPVRFLRFYIFRLGLLDGWPGFLHIAIGSWFTAVKYAKLLRLLKRAS

SEQ ID NO: 2979 - protein, 251 aa, Aquifex aeolicus
MDRLSVVILTKNEERNIARAIKSVKEIADEILVIDSGSTDRTVEIAKELGARVIFRDFTNYPDQVSFAISKTNNKWVFVLDADEEVSEELKRSIKETLKFPKHDCYVVNRRTYFMGKFLNHTLYPEWRIRVFKKDKVKYEGELHEVVKCSGSIGKLKGDLYHYSFKNLDEFFSKNLKYSKISAEILYKNGRIVKNYELFTRPVWTFFKFFIMKRGFLDGWRGFLISASYAFFNFTKYAYLKELQITKNKLR

SEQ ID NO: 2980 - protein, 260 aa, Yersinia intermedia
MSARKRLSVVMIAKNEASLLADCLASVSWADEVVVLDSGSEDETIALAQQYGAKVYSNVQWPGYGKQRQLAQQYASGDYILMLDADERVTPELKTAIEAVLIAPDEGAVYSCARRNLFLGRFMRHSGWYPDRVTRLYPHHQFQYNDNLVHESLNSGSAKVIPLSGDLLHLTCRDFFAFQRKQLSYAEAWATQRHQQGKSCSYFSILSHTLGAFCKTWLLRAGFLDGKQGLLLAVVNAQYTFNKYAALWALSHQYQKSENS

SEQ ID NO: 2981 - protein, 259 aa, Ferrovum sp.
MSLSVIIIAKNEEAALGACLDSVLWAEECIVLDGGSQDGTVELARQRGARVEIAADWPGFGPQKNRALALTCGDWVLSLDADEQVSPALKAEILAVMANPEALDLYRMPRSSRYCGRALRHGGWWPDYVVRLFRRGKAHFSEDWVHERLVGTEEGSIGTLNNPLEHDTYVDLEEALDKANHYSTLGARQAYAKGRRATLGKALRHGCWAFFRTFILRRSFLDGGQGFLLAVSNAYATFYRYAKLWCLDQPECRSFPVDH

SEQ ID NO: 2982 - protein, 259 aa, Hyphomicrobium sulfonivorans
MTNSRADSMSTGLSCCIITHNEADRIERCIEAVRGVVDEVVIVDSGSTDDTLARAEAMGARIFHNDWVGYGPQKRFAEDCAQHDWILNLDADEIVTPELAAEITALMRTPKSDRLPAYRFRQVTVYPGKERPRLWADYHNYIRLYDRSKVRFRNSLVHDTVDAGSHPVGQLKGIALHYSWRSLKHVRDKLERYTDLQAKELKKPRWYAYARLPFEYPVLFFRYYILRSNVTGGITGLRITHEIARARTRRLLKIARSPR

SEQ ID NO: 2983 - protein, 286 aa, Unknown
  Description of Unknown: Planctomycetia bacterium sequence
MTTRLTVIIPCKDELPNIEACINSVVALADELIVADSGSTDGTLELVKARGDCRILEREYVNSANFKNWVIPQATHDWILLVDADERVTPELAAEILRLKQSGELEQTPHVAFNIPRRVFLLNQLVRFSGWQHDRVRRLFRKTCRYETRRVHAELDVSLTQMGVLTSSFEHHTFRSLKHFNAKLERYAYWSAEDLYAQGKRSGWLSLTLRPAFRFIKHYVFQYGVLDGRIGLLISTLMAFSVYLKYAALWELECQSATVSEASSAAATADPQTLALPDSQRQRRVA

SEQ ID NO: 2984 - protein, 258 aa, Unknown
  Description of Unknown: candidate division Zixibacteria bacterium sequence
MSLTVCIIAHNEEEKLPEVLESVRFADEVIVADCGSRDETNLIARSFGARVFSRPNLANLNINKNFTFDQAKSEWILCLDADEVVPPETAREIQEVIRRKPAQAGFYLPRRNHFFGQWLRHGGQYPDWQLRLFRRGQGRFPEAHIHERLKVEGTVGRLRHPLDHYPYSTPEDIRRKLDFYTAFEAEHLYRTGVRPSPLHALRLLYATPAQRFLRRYLLKGGFLDGRPGLQAALMDVRNFRQRYRKLRTLAAKLAHPAR

SEQ ID NO: 2985 - protein, 254 aa, Magnetococcus marinus
MSPKLPISGVIITLNAAHQLEECLQSLALCAEIVVVDSGSSDGTQALAARYGARIIEQPWLGFGPQKQFATQQASYPWVLCLDADERLSAPLQQSIVELFSTQPPAQHAYQMPRCNRFMGRWLRHGEGYPDPNLRLFHRDYAHWSQDPVHEHVVALGAVGNLAGDILHHSEEGLECYLNKQNRYTSLQAEKLAQGKAISPHKIYLSPLFRFIKFYLLRRGFLDGLPGLLHILIGCFNSMIKYAKAYHHQQNPTH

SEQ ID NO: 2986 - protein, 254 aa, Burkholderia glumae
MAEPTLGVALIALNAAARLPNCLAALGFADEVVVVDGGSTDATVEIARAHGARVLIEREWPGFGPQKNRAIAQLSTDWILSLDTDEVVTPELAASIRAAIRAPAADIYALDRLSSFCGTWIRHSGWYPDWIARLFRRGTARFSDDLVHERLIYDGPTARLTGKLLHYSYEDFETVLRKLDSYSSAGARQRHAAGQRGGFGKALGRGLWAFVRTYLLRRGFLDGRAGFMIAVFNAETVYYRFLKLGAQARRGPHA

SEQ ID NO: 2987 - protein, 283 aa, Azospirillum brasilense
MIPVSVVVMTRNEAANLPHCLPALKRFAERFVVDSGSTDGTPSIAEAAGARVVPFRWDGGYPKKKQWCLDRLPFRQDWVLFVDADERLGGALVEEIAALMTAGPRHAGYFIDGHPVFLGRRLRFGARNRKLALFDRRKAHFPTVPDLDVATMWEVEGHYQPVIAGTVGRLRHSLDHADDKPVAAWFDRHARYADWEAALRSDGRMRDLVAWECGARRWLKALFDVVPARPFLVFLYGYVWRLGFLDGGPGFQHALARAFYYWQVGVKIADARRRAEPPASTDD

SEQ ID NO: 2988 - protein, 259 aa, Proteus mirabilis
MSENKRLSVVMISKNVADVIEACLDSVQWADEIIVLDSGSDDTTCQLAHEKGAKVFSNTQWPGFGKQRQLAQQYATGDYIFMIDSDERITPELKASIQAVLQQPESGVVYNCARRNLFMGRFMKHSGWYPDKVTRLYAREQYQYNDNLVHESLETQGATIKTLPGDLLHLTCRDLIEFQQKQLKYAKAWAQERHQRGKTTGYSAIISHTVGAFFKTWLLRMGILDGKQGLILAFVNAQYTFNKYASLWELSRKNREYEK

SEQ ID NO: 2989 - protein, 298 aa, Unknown
  Description of Unknown: Chitinophagaceae bacterium sequence
MRPERLDLTIAIPVKNEEKGLPGCIRAIGDDLAKEIVIIDSGSTDATRQIAREAGVGVVDFAWDGRFPKKRNWFLRNYQPTTKWVLFLDADEYLTPAFKTELREVLQNTDKVGFWLNYSIYFMGKKLKGGYPLKKLALFRVGAGEYEKIDEEQWSHLDMEVHEHPVLEGEIGHIKSKIDHLDDRGISHYVAKHNEYSSWEAARYVKLTGSKAEMKNFNWKQRLKYKLSGSILIAPVFFFGCYFLMGGFRDGVRGFAFALLKMAYFVQVYCKIKELKTKQSQRQMLKIASPSSVLQENA

SEQ ID NO: 2990 - protein, 273 aa, Paraburkholderia acidipaludis
MSDSGKFSAQSDAISVIVIVKNEAHDIRDCLASVHGWVGEIVVLDSGSTDGTQAICREFGATVVETDWPGFGPQKQRALEAARGPWILSLDADERIPPALRDEILASVKASAADLFRLPRRSNYCGQWIRHSGWSPDYVTRLFRRDAAHFSNDLVHERVIAAPDTRLGTLSEPLMHYSFRDFSEVLGKIDSYSSYGATQRAARGQPGKRSGGVGRALLHGFWTFVRTWIIQRGFLDGKMGLVLAISNAEGTYYRYLKLMLLEAEPTREGTKKP

SEQ ID NO: 2991 - protein, 359 aa, Unknown
  Description of Unknown: bacterium 1XD21-70 sequence
MKINLVMIVKNEERSLERCLRTVDNLVDEVIVVDTGSTDKTVEIAKGMGAKVYSFAWVDDFSAARNFALDQSDADWNLVLDGDEYLRAVTREKLEEMLQARKGMWLGCITRYDSFRNEEGISVSTAVLPRLLPREVRYEGKIHEQPEGEYLCYAVPLQADHDGYLYSDKGERNLPYLEQAVAEHPGDGYYLFQLASTLRNLKRHEESLPYFREFYRLTGREDGYRAGGVVLYLYTLLDLSTPEHLDEAAAIIEKEEPALGGWSDFCFVCGLFYMKRVLSDAGRYIDLLPNIEKCYLKCLELGEQPEAGGVVGTGSFRAAYNLGAWYEVSGQMDRAARAYLMSAQEGYAPAVKRLKREWH

SEQ ID NO: 2992 - protein, 285 aa, Unknown
  Description of Unknown: Methylobacterium sp. 4-46 sequence
MTRADDEPIPLTVLMRAFNEADRIEAAIRSALPLRAEILVIDSGSTDATATIARSLGARVVTNPWAGFGPQRRFGEGECRHDHVFSMDADEVLTPALVREIRALFRPGPPPALAKVRKAMALPHRDRPPPFAFCTEQIYLYDRRVARTIDNPNWDHLEIRTDEAPRRLRAVAWHFTYRDWNHAVAKANYVAELAARTSAPRSRLSLTLRLLVEFPSTFLRFYILRRLFLAGADGFAMATILAFGRFLRIAKMREAKMREAKMRERAPSRAADPAGGATDAQGAAR

SEQ ID NO: 2993 - protein, 260 aa, Marinomonas sp.
MPDRTSTISVVMIVKNEEQKLQHCLDSVTGWVDEIVILDSGSSDATLSIAKKYTSKIYQNTDWKGFGHQRRLAQSYATCDWILVLDADEQVTETLRSEILKVVKTSHLNVCYKVNRLSKAFGKYIKFSGWSPDWIVRLYPRELTQYNDALVHEKVIVPKDITINKIKNGYLLHDTYENVHHYIEKTTGYIKAWSDQREGRKYPSLATALFHAWGCFVRMYIFKLGFLDGKHGFILAWLGMHSTFVKYIDLWLRNYRGNDE

SEQ ID NO: 2994 - protein, 269 aa, Unknown
  Description of Unknown: Opitutaceae bacterium BACL24 MAG-120322-bin51 sequence
MSVSILILTLNEAPNIAACLESVAWADDVVVLDSFSSDETCAIAESMGARVVQRKFDDFGSQRNYALDSIEFKHDWIFHLDADERFNPELQSECERVVGLEERSAYFVPNRIIFLGKWIPRCTQYPFPQVRLIKQGEVRFAKAGHGQREAAAQRGVGHIDVAYDHYNFSKGVEDWIAKHNRYSSEEAQWAAEIERRPLGECLSKDSMLRKRALKSWFVRMPCRPWIKFFYLYIVKRGFLDGYAGLVYCRLQMMYESMIAIKRAELERGE

SEQ ID NO: 2995 - protein, 253 aa, Caballeronia catudaia
MTHPTLGIALITYNAAARLAQCLTSVSFADEIVVIDGGSTDATVEIARAHGARVRIERDWPGFGPQKNRALDALSTDWILSIDADEVVTPELAAAIRAAIATPVADVYAVDRLSSFCGEWIRHSGWYPDWIPRLFKRSAARFSDDLVHERLMVSADTPVQRLQGKLMHYSYEDFETVLRKLDAYSTAGALQRHAAGKRGSLSIAITRGLWAFTRTYILRRGFLDGRSGFLIAVFNAQTVYYRFLKLAHLDQPR

SEQ ID NO: 2996 - protein, 276 aa, Unknown
  Description of Unknown: Chloroflexi bacterium sequence
MSISILLLTLNEEANLPACLGSVEWSNDIVVLDSFSSDKTCEIAERLGARVIQRSFDNWASHQNWAMEHISFKHEWVFYLDADERMTDSLKQELLAVASNRTRPEVAYYCGRKNYFMGKWIRHAMPPGAIMRFFQPKHVRFERLVNPTPIIDGVYGYLENYLEHYNFSKGLTEWFTKHNRYSTWEALEGHNLLANDRFAIEMLFQKDRYSRRQTLKRISLYLPLRPLLKFAYLYIVNKGFLDGRPGLQYCLLQTSYEYMIVIKQYELRRRQLGLPV

SEQ ID NO: 2997 - protein, 305 aa, Hymenobacter amundsenii
MTTSPSLATDLVPLAAPAPWLSERAPVSIIILTHNEQADLPACLAAVGWSDDVHVLDSGSTDQTEAIARAHGARVWLNPFVSFGQQRNFALDELALRHEWVLFLDADEVATPAFARAVRTAVATAPAEVAGYYCCWKMMLEGRWLRRCDNFPKWQFRLLRRSRARFTDFGHGQKEGEVQGRIDYLPEPYLHFGFSKGWTHWLARHNRYSSLEAAARLHQRPPLRDVLSAHASRRNPALKSWLSRLPGWPLLRFVQTYVASGGFLEGIPGFIYCTNMAYYEFLIQIKMREIGLRAASPPHSTGGPA

SEQ ID NO: 2998 - protein, 254 aa, Psychromonas sp.
MLNKISAIIITKNEQNNLPHCLDSLGWVDEIIIVDSGSQDDTQEIALRYGAKFYSHPNWQGFGKQKQLAQNYASHTWILAIDADEVVSDKLQLSIQQQIIQTNVNSVFQITRKTWVFGRFLRHSGWVDKIVRVYPKKIANYNDALVHEKVIFNKDINIKKIKGDLLHYSYSNLTNYLIKSASYGKAWADGKQQRGKQSSIFQALIHGLGCFLKMYILKKGFLDGKQGFLIAVLSSHSAFIKYADLWIRENDIRK

SEQ ID NO: 2999 - protein, 261 aa, Unknown
  Description of Unknown: Photobacterium angustum sequence
MNQQNTKPSLAVALIVKNEAKHLAACLDSVKDWVDEIVILDSGSTDKTEAIARQYTDKFYVSDDWPGFGIQRQRAQQYIQSDYVLWLDADERVTPELKISIENVLQSPDHKTVYLINRLSSAFGQFIHHSGWSPDWLVRLYSTQFTQYNDALVHEKVIIPEYAQQQKLSGRLHHHTYDNLHHYIEKTTKYIKAWTDEREGRKKSSITTALLHAFASFLKMYVIRLGFLDGRRGFILAWLTMHSTFVKYTDLWLREQQDKTQ

SEQ ID NO: 3000 - protein, 606 aa, Paenibacillus sp.
MSSGRISLCMIVKNEERSLPSCLNSVRGAVDEVIVVDTGSTDLTVKLARQQGAAVIPFEWCDDFAAARNRGLEAATGDWILFLDADEMLDDRAREELPLWAAQEGVDGFFLQIHNYTGNGSGGVTINPVLRMFRNHPEHRFAGRIHEQIAESIVNHNPQAHFHMTDMIIHHYGYSEEIVLEKDKVSRNTRLLQQVIHEDPDNPFHRYNMGVEWLRIGRLEEALSSFRKAWEGLDPIKASYAHLVLKYEIRCLQALGRWEEAEAQITKGLQLYPDYTDLLHCRALTEEAFGREKQAEAALREALRLGPAPDLYHTEEGIGTYQTHYLLGLNAEKREALDEAVDCYVKAIRCKPSLTPPLYRIFRIMQAALQEEHIPELLKARFSFSTPESTWKVIHILNECGCYSSVIPMLHQLEQESPPHARKQIRVHRVEAMWKAGEWKQADRLRRKAHIPSSSSRSELMNWSMDIRSKEEAYQDPAIRLLQNKCSLSEALGGGAEQGAAADTTREEIPQLWSSFASLCQAAMNAKRQELFSSVLEGWIETVEQGLQEGEFTSVSGVNMLLHTMISAADHHLAHMSTLQREQEHRGKDWRIIQRLRLTLPWSDGH

SEQ ID NO: 3001 - protein, 499 aa, Salinibacter ruber
MLPDFALMWFRSPSCVERHEHGRRRARHCRQPVGPEVRRRRARPPGAVGRWRRPVSMDAAPALRRAERAAASLRGRGGLQRPHSPPRHNLLPLEPVGWRLELGRGGGPHLQPRADRDWRAGDDLPAGTPLRRYARRERSRHAPPKAADCRRRPGLGVCRRVRRARGDRRGWGRRWGAGRGGYGRRAVDDRRRKPGPSPQRTHPRPRRILMISVLVLTLNEEVNIADCLDSVAWADDVLVLDSGSEDRTVEIARSKGARVLHRDFDNFASQRNYGLEEGGLRHDWVLHLDADERVTPALRQALRDKADRGAHRAYRVPSKLMFQGRWLKHAGMYPTYQIRFGRREALTFTQVGHGQRGALPADQVGTLDEPLLHYAFSKGITDWVRRHNRYSSDEAEHARETQLGDVDWSALMTGDAQARRRALKDLSYALPFRPLLRFLYVYVGRLGLLDGRPGFDYAVLLAFYEYLIGLKQREHRRGGGRTNGEESADSPLETEARKA

SEQ ID NO: 3002 - protein, 253 aa, Sulfuricella denitrificans
MQQKTPLSVVIIALNAASQIEACLKSAAFADEIVVVDSGSRDDTREIALKYGARVLHQDWLGFGRQKQFAIEQASHDWVLCLDADERVSDPLRASIVEMLQAPRFRAYRMARCNRFMGRWLRHGEGYPDWSLRLFDRRVANWSEDEVHEKVLTTSPAGNVQGDLLHESQESLTVYLEKQDRYTSLQAEALARRGKQVSFGRLVASPLLRFVKFYFLRLGFLDGVPGLVHIVIGCFNSFVKYAKLHELNEKGKL

SEQ ID NO: 3003 - protein, 298 aa, Unknown
  Description of Unknown: Candidatus Woesebacteria bacterium GW2011_GWA1_39_21 sequence
MISVVINTLNEEKNLPRVLDSVKNFADEIVVVDMYSDDDTVVLAKKAGAKVYQHKRMGYVEPARNYAIEKATGDWILILDADEEIPKSLTEKLKKLVETPKSYDYFRVPRKNIIFGKWIKHSNWWPDYNIRFFKKGFVSWNEIIHSVPVTCGNGADLEVDEKNAIVHHNYSTIEQYIDRLNRYSSHQKTALLKGGYKFTWKDLIREPMHEFLRRYFQGEGYKDGLHGLSLSLLQAFSELTVYLKVWQEEKFKDEKATVENVTVVVKESQREMNYWVADTLYKIDNSLVQKIKRRFRLS

SEQ ID NO: 3004 - protein, 254 aa, Hymenobacter amundsenii
MPAVPLSVVIITFNEEANIARCLEAARPVADELLVVDSFSTDRTVEICRALGARVVQHAFEGYVEQKNFATAQAGHDYVLQLDADEVLTEELRASVLAAKTQWQGGGYTLARLTNYCGSWVRHGGWYPDRKLRLYDRRLGRWEGLLLHERYELRAGHPTPLPLAGDALHYSYTSVEQHVAQLNRFTSLAAEELWQKDKRQVSAFHLLLKPSWKFVHGYVIQGGFRDGFAGLSIAVISAWGVFLKFAKLKTRSAA

SEQ ID NO: 3005 - protein, 351 aa, Butyrivibrio sp.
MVTVSLCMIVKNEEKNLQSCLDSLKGLMDEIIIVDTGSTDSTVNIALANGAKVYDFKWIDDFAAARNFAFSKAGCDFIYTADADETMTEEGRQMFMGLKSLLTASDIPEGDDLPVDIVQMYYVGQLQGKRSVYNYDRELRPKLFRRVRGFYWINPIHEQIRVEPIVVDSDIEIIHHMDESHAARDLAIFEKMVEEGRQITPALLDFYARELYMAGNRENFEKAGDFFRNITESEESSVDDIRKASVILCKRASIMGDLQEMMKYALKEVAAGASSETCCELGDYYMKEGDPSEASLWYYNAAYEQVPVLDIRSGKGRPLMALYKCYSMMGDEKQAQMFKQKAIEECGEEDI

SEQ ID NO: 3006 - protein, 259 aa, Frateuria sp.
MAREPLSVVLITYNNADTLEACLREVDWAEEIVVLDSGSTDATLAIAARHGARIAAHPFDDYGPQKQRAYAMASHDWILNLDADEILSPGTREVIEQALESPRHAGFRLPRRERMFWTVQHRRSWRNGHLRLFDRRRGGMNDVEVHAAVEVRGPVKTLRRADFVNDGDSDIATRVEKINRYTTGMVAHKLRKRQRFTGLRMVCYPPLFFLRQYVGKRYFLSGWAGFIASVCGAFYAFLKYAKLHEARERARREDSGGLR

SEQ ID NO: 3007 - protein, 285 aa, Bacteroides finegoldii
MTDITAIILTKNEDVNIERCIKSLNGVADRICVVDSGSTDRTIEIAESLGAEVFYHEPFNHYAAQFNWALDNVDIKTTWVYRIDADEEVTPKLAVEIVAACKEHRDDDVNGFVMKFLIAFMGTFLKHGGMYPFYNLTIFKFGKGRYENRAMGEHIILSEGRILDLENDCLHYDFKGLDAWVNKHNWYATREVADYFSTRTVGQADPNTLYHEARKTSKLRDGFYYRMPKFLRAKLYFWYRYYFKLGFLDGKAGYVHAYLQAYWFRFLVDAKIMEQEIKSKQQNKK

SEQ ID NO: 3008 - protein, 286 aa, Streptomyces hoynatensis
MTRLPIVVAIPTKNEAANITGAVRSAAGHFEAIVVVDSASTDGTRELAKAAGAEVIPYVWDGRYPKKKQWCLEHVRPETDWVLFLDGDETVSGELLAELRRIFLDGRRVRPAAFDIPLGYWFGGRRLRHGHTIVKRALVDRTRARFPEPDDLAAPGMGEQEGHYQPLADPVHRLRAPIEHRDLDPVRTWFERHNRYSDWEAWLEAHPEVREQIRRAKTRQGRLFHRAPLKPLLSFGYAYLYRRGFLDGRAGLDYALAMSFYRWQIGLKARELAAGRDPGDPASGSP

SEQ ID NO: 3009 - protein, 279 aa, Streptomyces sp.
MTVLPIVVAIPTKNEAANIAGTVRSVADHFTAVVVVDSDSTDDTRALAEAEGAQVVPYRWDGRYPKKKQWCLENVRTDIPWLLFLDGDETPSPALLAELRRIFLDGRAVRPAAFDIPLGYWFGGRRLRYGHTIVKRALLDRTRARFPEPDDLEAPGMGEQEGHYQPLADPVHRLRATIEHKDLDPVRTWFERHNRYSDWEAWLEQHPDVREEIRVAKTRQGQLFHRAPFKPLLSFAYAYVYRRGFLDGRAGLDYALAMSFYRWQIALKAREAGAPPHAD

SEQ ID NO: 3010 - protein, 258 aa, Unknown
  Description of Unknown: Acidobacteria bacterium sequence
MNRLSVCLIAFNEEHNLPRALTSLAGIADEIVVVDSGSTDRTAEIANARGVSFFERTFTNHADQKNYAASCARNEWIFLLDADEELSGELRKSLMEWKHREPEFPVYEMARLTWYLGAWIRHSRWYPDFQRRLYLRNKASFSGMIHSALRFQGRAGRLSGNLLHYTIRTFAEHEAKVEGYTTVMARELFSQGKRSWRAAMWLATPWSWFQNYLLHLGFLDGYRGWLISRMAARGTWLKFKKLGELLEAERRAGGARTP

SEQ ID NO: 3011 - protein, 251 aa, Unknown
  Description of Unknown: Candidatus Rokubacteria bacterium sequence
MTRARLSVVLVTLNEEERIRQCLESVVWADETIVVDAESQDKTAAIARELTDHVIVRPWPGFAAQKNFGLAQASGDWIFSLDADEIVSPALRAEITAVLEGHGEAAGYAVPRRNIFWGRWVRHGGLYPDWQVRLFRRGRGRFVERAVHESVTIDGAVGRLRGHLEHRSYRDVADFLARADRYASLAADEWIAGGRPSRPLRDLVARPVGRFLGMYVARAGFLDGWRGFLLATLYAYYVLMRSAKIWERARR

SEQ ID NO: 3012 - protein, 253 aa, Barnesiella sp.
MRHISATIITFNEEHRIEACLESLKGIADEIIVVDSFSTDRTAEICASHGCKVVKREFPGYGAQRQFATSLTTYSYVLSIDADEVLSPALRMSIKKLKETGFDHRVYKMSRLNFYCGQPVKHCGWYPDLQIRLFDKRYANWNLRDVSERVIFPDTLRPEMIDGDILHYRCSTPEEYRQVQTRHAAITGKVLSAHLESVPAITPYIKGIKAFLDCYINKGAILDGAEGRAISREQYRSTFIAYNMARRTLKKTR

SEQ ID NO: 3013 - protein, 298 aa, Unknown
  Description of Unknown: Acidobacteria bacterium sequence
MTISVVLITQDEEANLPKTLESVMPLVRDGKGEIIILDSGSTDQTLEIARSYGAKIFSEPWKGFAEQKNSAMQKASCDWVLQLDADEALAPELAEEIHRIIEFPADMDREQRKRRIHELAYVLTARTLRQIHEITQREGSKTRDYGSFDKLSGFWIPRKNFFLGRWIKHGGFYPDPKLRLVRRGAGRFEEYGAHPTMKVDGPTGQLKHALVHNAYPTLRGYIDHMNSYSSSGAVIAQEKGHCDFSFTNIVLRPLFTFVYNYFFRLGFVDGSEGLLLHLYHSVYVSWKYAKAWEIGRRP

SEQ ID NO: 3014 - protein, 247 aa, Methylomonas sp.
MLSVIIVTKNEAENIVECLASVAWADEVIVLDSGSTDDTIALAAAAGARVIQTDWPGYGPQQNRGIASASHDWIFSLDADERITPELAKEIRSAIENEQFNAFDVPRRSWFISRFMHHSGWWPDRTRRLFKKGHARFSEHLIHANLTTQEPVGHLNNPLIHYSFRDYHAVIEKMNRYSSGSAQDLYVSGKRGSLWLALVHGMWAFFRTYCLRAGFMDGQQGLILAIANANGTFYKYIKLWELQNRKS

SEQ ID NO: 3015 - protein, 291 aa, Cephaloticoccus primus
MISVVILTLNEEGNLPRCLASLSQCDDIVVLDSGSTDRTADIAREHGARVFTNRFENFAQQRNFAHEKIPFRHPWLLHLDADEQMTPELWGECCEIAQKDLGPPGGTASATRRPPPDSPAIYDGYYVAPRMIFRGRWIPHCTDYPSYQARLVHAARFRFIQVGHGQREAPGLRIGTLRASYLHDLSAAPEPHWLAKHRRYAAGEVATHLAQRRSAPPPRLRDLLSRDRLTRRRTLQRFAFHLPFRPQLRFVYQYILRRGFLDGLPGLRYCRLLMHYERFIVEALREAKAKR

SEQ ID NO: 3016 - protein, 254 aa, Burkholderia metallica
MAELTLGVAIIAHNAAGRLAQCLGALSFANDIVIVDGGSTDDTVAIARAHGARVVLATDWPGFGPQKNRALDALSTDWVLSIDTDEVVSDELAASIRAALRAPQADVYAVDRLSAFCGQWVHHSGWYPDWIPRLFRRGTARFSDDLVHERLVFDSPAARLDGKLLHYSYDDVETVLRKLDAYSSAGARQRRAAGERASVGKAVRRGFWAFVRTYLLRRGFLDGRAGFMIAVFNAETVYYRFLKLAHDSAPSAER

SEQ ID NO: 3017 - protein, 272 aa, Unknown
  Description of Unknown: Methylobacterium nodulans ORS 2060 sequence
MTQDEPPIPLTVLMRTFNEADRIEAAIRSALPLRAEILVIDSGSTDATVAIARSLGARVVTNPWGGFGPQRRFGEALCTHDHVFSMDADEVLTPELVWEIRGIFLFGPPPALMKLRKAMALPHHDRPPPFAFCTEQIYIYDRRVARTTENPNWDHLDIRTAEKPRRLEAVAWHFTYRDWNHAVAKANYVAELAARTSEPRSRLELGLRVFVEFPFYFLRFYFLRRLFLAGADGFAMATILAFGRFLRIAKMREQAASRAVDPAAQAAADEAR

SEQ ID NO: 3018 - protein, 253 aa, Haemophilus pittmaniae
MPTISVAMIVKNEAADLADCLETVKDWVDEIVILDSGSTDNTQQIAEQYGAKFYQNVDWPGFGKQRQLAQQYVTSDYVLWLDADERVSSLLRQSIEQAVQQNLPSTAYQLPRLSSVFGREIRHSGWYPDYVVRLYRCQDGQYGDELVHEKVHLAKGTQIKKLQGDLLHFTYKSIHHYLLKSAGYARAWAEQRAAKGKKATLWQGISHALGCFIKMYFIRAGFLDGKQGLLLAILSAHSTFVKYADLWERGQKK

SEQ ID NO: 3019 - protein, 204 aa, Unknown
  Description of Unknown: Gemmatimonadetes bacterium sequence
MASPAPVTVVIPTRNEGAQIAECVGRLAWAAEVIVVDGGSTDGTRELARAAGARVLDGAVVQGPTIAHQRNAGIGAATHEWVFALDADERVGPELSAELAATVAAPAREAYAVRRRNVFLGETVRHAGWGRDWVVRLFRKNRRFVAAHGRRPRVTDLIVRPPARFVRMYFLQLGILDGWRGAMLCGLAAASVLVKYARLWERSR

SEQ ID NO: 3020 - protein, 257 aa, Unknown
  Description of Unknown: uncultured archaeon GZfos18F2 sequence
MPSVKLSVAIITLNEETNIGRCLYSVARVADEIVVVDSFSVDKTKEICIAKGVRFIENRFESYMQQKNFALWETTHDHVLFVDADEALSDELADSVRKVKNNWDADAYQFNRLTSYCGQWIRHCGWYPNRRVRLWDRRKGIWGGGELHEKVIMEEGSKVSVIAGDLLHYSFPSIKSHVQTANNFSEIAAREAVRRKKNVNFVIHILLNPAYTFVYGYIFRLGFLDGYYGFVICAISAVANFLKYSKIRQLQKSVEDE

SEQ ID NO: 3021 - protein, 254 aa, Burkholderia sp.
MAEPTLGVAIIAHNAARRLAQCLDALAFADDIVVIDGGSTDDTVEIARAHGARVIVAADWPGFGAQKNRALAALSTDWVLSIDTDEVVSDELAASIRAALRAPQAEIYAIDRLSAFCGRWVHHSGWYPDWIPRLFRRSAARFSDDLVHERLVYDGPAARLDGKLLHYSYDDIESVLRKLDAYSSAGARQRRAAGEHAGIGKAIRRGLWAFVRTYLLRRGFLDGRAGFMIAVFNAETVYYRFLKLAHDSTPPSGR

SEQ ID NO: 3022 - protein, 274 aa, Unknown
  Description of Unknown: Flavobacterium sp. ACN6 sequence
MNKIPITVIVSVKNEALNLPSCLDKLKRFDQIIVVDSGSTDDTPVIAVAKGAEVLQFKWNGKFPKKRNWALQNANLRHEWILFLDADEFVTEEFVSEVGFKTQDPTYNGYTIQFENYFMGRKLKYGYGFQKSALFKKSKGSYEKIEEDLWSHLDMEVHEHPIIEGKVGIIKAKVIHKDFKNLEHYIAKHNAYSTWEAQRYLQLKQSKNEHLSFNQKIKYSLLNTGLLPAVYFMGAYFLKLGFLDGKEGFYLARFKSHYFFQIQTKVNSIKNNIE

SEQ ID NO: 3023 - protein, 254 aa, Burkholderia pseudomallei
MAEPTLGVALIAYNAAARLAECLSALSFADDVIVVDGGSTDATVDIAKAHGARVIVAADWPGFGPQKNRAVSALDTDWILSIDTDEIVTPELAASIRAAIRAPRAPVYSLDRLSSFCGTWVRHSGWYPDWLPRLFKRGAARFSDDLVHERLVFDGSSAKLDGKLLHYSYEDFETVLRKLDAYSSAGAEQRRAAGKRGGLAKAFGRGAWAFVRTYVLRCGFLDGRAGFMIAVFNAETVYYRFLKLGLARQRKARD

SEQ ID NO: 3024 - protein, 374 aa, Sphingomonas elodea
MEPNIAYNAERGVATAPRGKVRVVRLALVMIARNEARAIARALDSARPYVDRMIVLDTGSTDDTVAIAERCGATVHKFAWCDDFAAARNAALDHSDADWNLMLDADEWLEAGFEALAPSALPSASAARPAFIGCARLRNEGAEGNTARRFLPRLLPRGVRYAGRIHEQPVSSLPLVPGALQIGHDGYAEAQLAAKHGRNLALLQAALAETPDDSYLWYQLGREHLVRGAAEAAVMPLQTAYRLTPPEAAYRHAVVLSTVRSLKEAGQLQGALALVDAEQAAWPSSPDFYFAVADLYLAWAGHAPEIAFDELLPVVEGAWLRCLEIGEQPMLDGSVIGCGSYLAAANLAMFYEQLGIQDEAKRYAALERDLRAAA

SEQ ID NO: 3025 - protein, 250 aa, Unknown
  Description of Unknown: Nitrosomonadales bacterium sequence
MQTQPFSVVLITLNAAHQLDACLQSVKFADEIVVVDSGSSDDTHAIALKHGARFIHRDWLGFGPQKQFAVGQASNNWVLCLDADERVSGDLRASIAAALQQPEFQAYHMARSNRFMGRYLRHGEGYPDWSLRLFDRRHARWSGDAVHEKVLTGSQIGTLRGDLLHDSAEDLGAYLDKQNRYTTLQAAAMHSAGRRASMAQLIFSPAVRFVRFYFFRLGMLDGIAGLVHIVIGCGNSFIKYAKLMALQKGE

SEQ ID NO: 3026 - protein, 256 aa, Unknown
  Description of Unknown: secondary endosymbiont of Heteropsylla cubana sequence
MFHKNLLSVIIITKNEAELLPACLLSVNWVDEIIVLDNGSTDQTRNIAIKAGARVFHTDEWIGFGVQRQLAQTYASSDYILMLDADERVTPSLREAIQNVLKNPKSNTVYSCTRRNLFLDRFMRYGSWYPDRVVRLYEREHYGYNALPVHESLTIGHADVVSLGGDLEHLTCRDLITFQRKQLWYAEIWAKSSFKKTNKYGIIKIIIHTISSFLRSWLLRAGFLDGKHGWILAMINAQYTFNKYTTLWALNKQNKL

SEQ ID NO: 3027 - protein, 259 aa, Biostraticola sp.
MPTAKRLSVVLITRNEAELLPDCLASVHWADEIVVLDNASADQTRQIALGQGARVYEAPDWPGFGKQRQRAQAYASGDFILMLDADERVTPELRQSIEAVLRQPAPNTVYRCIRSNWFLGRYMRHSGWYPDKVVRLYPRETYRYNDDTVHESLACRQASVVTLQGHLEHLTCRDLIAFQRKQLQYAEAWALERHRQHRHCGFLSIIGHTLGAFIKTWLWRAGFLDGKQGWLLSVVNAQYTFNKYTALWALRRSEKRDVL

SEQ ID NO: 3028 - protein, 253 aa, Polaromonas sp.
MKLSVILIVRNESVNLKACLSGVTVADECVVVEHGSDDDTVETAAALGARVIVAPDWSGFGAQKNRALDAAQGNWVLALDADERVTPKLMAEILTAITLDQADAYEIPRLTQFCGTWIHHCGWTPDRVVRLFRRGSARFSDDLVHERLVMLDGRSRIGRLAEPLLHYSYPTPASYWQKLQRYSHDWALQKQAEGRRTSIVRAAVSGVTAFLRSYFFRLGFLDGSMGFVVCVLQAQAAFGKYFELYWLNQKNET

SEQ ID NO: 3029 - protein, 409 aa, Unknown
  Description of Unknown: bacterium CG17_big_fil_post_rev_8_21_14_2_50_64_8 sequence
MGRLSLCMIVRNEQRMLPDFLASVAGIWDELIVVDTGSEDDTPRLAEAAGARVLHHLWQDDFSAARNASLAAATGDWICYLDADERCTPELAVQVRDLLEDPQAGAATVVMRNRRPDGTHRDADLLRLFRNDPDIRFRHRIHEDPSGHVQAYLERTGLAMRRLTGVVDHLGYLKNVAAAQGKRRRDTALLRRQVKGNPDDLYSWFKIMEQARYWEDRSAWRKAARGCRRRFEKADPADLARQPWADELCALLAQGLHNHPAQGLQWLDALPEELRMGPAVQLRRGMWLEEVGRPDDAEAAYTACAAAGDRAGNDTQFGLRCGMGLCRLKAGAGDVPGAWDQAVRAGRACPSDPEALLAAVMFAPSDLARADWLAGHLTAYPEAAPAVAETLKSCGLTDLAEALAATQLS

SEQ ID NO: 3030 - protein, 248 aa, Unknown
  Description of Unknown: Candidatus Cloacimonas acidaminovorans str. Evry sequence
MEQLSAVLIVKNEEQNISRCLKSISWADEIVVLDTGSSDETVNLCKALGAKVYYLDKWEGFGKAKQQAVDLASFDWILSIDADEEFSQELQKELQALKKRNFDNSAWRLKRRSYYLGKPIHFCGWQNDAPVRLFNRKKGGFNEKLVHEGIQTSQKVKSCKHYLYHFTNPTAEVHYAKMRMYGELSAKQLYAQGKRANEFIAWVRGIFKFLKMFIFQLGFLDGAKGFLLCKNSAWGVWYRYHLLGKMKK

SEQ ID NO: 3031 - protein, 254 aa, Unknown
  Description of Unknown: Chloroflexi bacterium sequence
MIPLSPPAPRLAAVILTKNEDAHIGDCIAGLRDWVDLVVVWDSGSTDATCARARAAGAAVVQRPFDTYAAQRQAVLDTLTVEWVLFVDADERAGPELAAEIRRRLAEDTAIDGYWIPRRNWIAGRETRWGGFYPDYQLRLLRRAAARYARGVHEIASVTGETAYLQTPLLHYNYRDWAHFHAKQPGYARLEAGLLAARGIRPRPHNFVLQPLREFRRRYFTLQGRRDGLHGLRLALWLAWYYGFMPYWYLLRGG

SEQ ID NO: 3032 - protein, 252 aa, Pontivivens insulae
MTRLPLSIFIITKNEEARLPRTLAAIEGWVDDLVIVDSGSTDRTLEIARDAGARVLHRDWTGFGEQKRHGEEACRNRWVLNLDADDLVTPELREEISALFAEGAPEPASYKTRQYLVYPGDEAPRGQVLDYNVIRLYHLDAARFSDHPLFDRVHAEPGTNVHQLNAPMWHFSILTYGDFAEKVVRSAAFQAEAAKRKPRWQLLIRLWLEFPLQVLKIWLTRGHWRAGWRGFAVAVIAAFGRWLRVLRLLERG

SEQ ID NO: 3033 - protein, 258 aa, Paraburkholderia caballeronis
MNHTTLGVALITRNAAARLADCLDALSFADEVVVIDSGSTDGTADIARAHGARVIVQTDWPGFGPQKNRALDALGTDWVLSIDADEVVSPELAAAIRAAIAAPQADVYAVDRLSNFCGAWVRHSGWHPDWIPRLFRRGVARFSDDLVHERLVFEGAARRLTGKLLHYSYDDYAAVLRKLDAYSTAGAQQRAAAGQRGSFGKAIARGAWAFVRTYWLRGGFLDGRAGFMIAVFNAETVYYRFLKLALLNKHDGNARGPR

SEQ ID NO: 3034 - protein, 356 aa, Intestinimonas timonensis
MATISLCMIVKNEEKVLSRCLESVAGLVDEMVIVDTGSTDTTREMALSYTNRVYDFTWRDDFAAARNFAFSKGRMEYLMWLDADDVLLPEDREVFLELKRTLTPDVDVVMMPYHSGLDEGGRSVFTCYRERLVRNLGRDLWEGAVHEAIAPFGKVIWSRAAVTHRKEGPGDPDRNLRIYEQKLARGETLSPRERFYYARELMDHQKYGLAAVQLEQFLDRGGGWIENEIEACRLLSRCRLEAGDESGALQALLDSFRYDDPRAETCCALGAYFQAREAWRRAIFWYELALTRERNDEGGGFVQPDCYGFLPCIQLCVCWDRLGRHAEAEAWNQRAGGYKPDDPSYLWNLAYFSSLS

SEQ ID NO: 3035 - protein, 261 aa, Pusillimonas sp.
MTLSVIIITKNEARHIAACLDSVSFADEIIVLDSGSTDATCDIARAKGAKVSVTPDWPGFGPQKNRALDLATGDWVLSIDADERVPPALAESIRQVIAQSENDAYLVARLSSFGGRWIRHSGWWPDHVLRLFRRGAARFTDAAVHEKVVAQTKPAVLSGHLVHYPYADMEAMVTKVNRYSTDAACMMHARGKKTSVAGIVGHAFWTFIRIYFIRRGFLDGKEGLILALTAASGSFFRYSKLYFLGRHPQGRWPDDTSHPSK

SEQ ID NO: 3036 - protein, 536 aa, Desulfotomaculum profundi
MSEGMKVSLCLIAKNEQHCILSCIESVKHLVHEVVVVDTGSSDDTVLLAQKAGARVFHIAWTGDFAQARNFGLEQAAGDWILVLDADEVLAPGSTEEFHQLLNDAEVEGYFLTIINFLGNGQEFTTDKVVRLFRNKPSYRFTGAIHEQVAPSILKATGGKGLVSAPVVIHHYGYLDAELAEKDKFSRNTSIIYRELAKNPGDPFLLYSLALEHFQRGQVAEGVRCLEWALSQMKGSEGYFEDVLVHTAIGLWGLENLQRLLDFLNNSLSMLPEQGDLLLIRGMTFLTLKQYAEAAGDLVHAFKTGSSKLFPQYKILCLAGDAFSLSGDFIKAEENYLSALRMNTRFLYPLLQLIGLIQRGHLLLDCDRLARFCPLKNKDSLWRDLLSGGGTLLALIVLLLEIYHLAVDPDQEFLLWQLSGELVSLVEKLDSLPARKPVHEYISVASREIHAYALIIDKGYQGRYFCALDKMKDLVIRLLLMFMRECCPQWRWTPRNRHLFVQWKGDMNDKKSYGGKSCQAKKSNPERISRVTGEIG

SEQ ID NO: 3037 - protein, 252 aa, Unknown
  Description of Unknown: Xanthomonadales bacterium CG17_big_fil_post_rev_8_21_14_2_50_ 64_11 sequence
MTRQPISAVVTTLNNAGTLEACLASLAFCDELVVLDSGSSDDTALIAQRFAARWQVQAFQGYGPQKQAAVNLAQHDWVLLLDADEQLTEAGRERIERELRAPRAVGYRLPRQEWLFWRWVHPLARANWHLRLFRRSHGGLNDVPVHAAPEVHGRVIDLPAPFRHFGEADIAARADKVNRYSSGMVAHKRARRVRLPGLRMLLQPGLAFLKLYLLKRYFLNGWAGFIAARLHAHYTFLKYAKVYEAQRRERDQ

SEQ ID NO: 3038 - protein, 277 aa, Unknown
  Description of Unknown: Phyllobacterium myrsinacearum sequence
MSVSVLIMTLNEEASLPACLASLSWCDDIVILDSFSTDQTLEIARKAGARIYQHKYETETRQRMYGLKEIEFKHPWVYMPDADEITPDDLRDEMLAIARDPDRPEALFRVRYKNMFMGRWVKHSSLYPTWITRLCRPERVRYERECHSRCVGDGPTGRLESHFIHYSFSKGLTAWFDKHNRYSGFEAKESLQILRDKGIPWKEFFSPLPEARRRALKELSYRIPFRPAARFAYMYLLRGGFLDGWQGYHYCRLIAAYEYMIVIKIQEQRRREHGLSI

SEQ ID NO: 3039 - protein, 259 aa, Unknown
  Description of Unknown: Fusobacterium sp. oral taxon 203 sequence
MTLTVAMITLNEEKNLERTLKSVQDFADEIVIVDSGSTDKTEEIAKKFGAKFVYQQWLGYGPQRNRAIELSTSDWILNIDADEEISPELANKIKGIKENSRYKVYKINFMSVCFNKKIKHGGWSNTYRIRLFRKNAGSYNENSVHEEFVTNQEIVKLHKYIYHHSYSDLADYFKKFNKYTTLGAIEYYKKGKKARLISIVLSPLYKFIRMYIIRLGFLDGLEGFLLATTSSLYTMVKYYKLREIYKNGSYIEGEENNGN

SEQ ID NO: 3040 - protein, 252 aa, Halomonas sp.
MTPITGIIITLNEQDNVEEAIASLAPVCDEVIVVDSGSSDDTVALAEAAGARVIHQPYLGDGPQKAFAVPQASHDWILALDADERLDDDAVAAIRELSLDDPRKAYRFKRRNFAGRHWIRAAGFYPDPVTRLYNRTTSGYLPKKAHSSVQAPEVVDVDAHLRHFTYRDLSHWMQRIDQLSTRDAWAMKERGVTPSSTRPTLHAMTAMLRKLVLKGGLLQGQDGMTVAITTAFHAYMKYAKLNELYENERADR

SEQ ID NO: 3041 - protein, 289 aa, Unknown
  Description of Unknown: Planctomycetes bacterium sequence
MISVLILTKNEEANLPHCLDAVKWSDDIVVLDSFSTDRTVDIATAAGARVFQRTFDNERSQREYSLTLPFKHSWVYNPDADEIATEQLRDEMLKAVRDGRHVAYRVRFKTMFMDRWIKHSSLYPTWVMRVFRPECIQFAREVNLTYIANGSVGRLNEHFLHMTFRKGIAAWLDKHNLYSTGEAAESVQSLRNKRIPWGDLFQTSDPVRRRAGLKELSTRVPCRPLLRFLYMYFAKLGILDGVAGYHYCRLLSIYEYMIVLKMRELQRQSLPQHTRLRMVTGAPVITAES

SEQ ID NO: 3042 - protein, 273 aa, Zavarzinia sp.
MSKTNDKDGPKAVPPLSCYIRTLNEERNIEAVVRAARRVAAEVVVVDSGSTDRTAALAEAAGARVVVNPWPGNGFQKQFGEAACSHDWVLDLDADEVVTPELAAEIAALFATGEPPLGVYEIDLTCVPPVGEPWYDFDHAFRRKLYDRRRFSMPGHKVWDQLELPAGTRVGRLRATLMHYAFRDIAHVVAKLNGYSTMGARDGKRKTKGKLLFRIWCALPFYFFKHYILRGLCRAGTYGLIIAASAAYGRWLRDAKMYEAIRIEERRAREAGR

SEQ ID NO: 3043 - protein, 368 aa, Sphingomonas gei
MAIGTAVPAKDITAMPCLALVMIVRNEARCIARCLDSVRGHVDAMIVLDTGSTDDTVAIAEACGATVHHFDWCDDFAAARNAALDYSDADWNLILDADEWLEGDVGALGRATLPPAPAPARFIGCVRIVNRTASDQPVARKFVPRILPRGVRYEGRIHEQPVSPLPMKVLPLAVRHDGFDGAQLARKAGRNEALLRAELDADPGDSYFWFQLGREHLVRGKPDEAADALMTAHRTGTPDSAWRQGVVVAALQALKRAERFDEALAFADAEHAHWQRSPDFFFAVADLYLEHASRNPGIAMVELLPIVEGAWKRCLEIGERPDLDGSVEGCGSHLAAQNLAMLYETLGIDDEAQSYAAMAAEMRERLAA

SEQ ID NO: 3044 - protein, 255 aa, Rahnella variigena
MADKKRLSVVLIARDEAGLLPECLESVAWADEIILLDSGSKDATQDVARSFGAKVFQNTDWPGFGKQRQLAQSYASGDYILMIDADERVTPELRQSIENVLKTPQENTVYSLGRSNLFLGRFMRHSGWYPDRVNRLYPSTFSYNDDLVHESLNTGSAAVVPLQGDLQHLTCRDLFAFQRKQLSYAQAWAEQRHQQGRKCSFFSVISHTLGAFMKTWILRAGFLDGKQGLILAGVNAQYTFNKYAALWALSHQLQK

SEQ ID NO: 3045 - protein, 266 aa, Acidovorax valerianellae
MPAERGGVARATLTVAVLTLNEGHRIEACLASASFADQIVVVDSGSTDDTVAVAQRLGAQVHAYPDWQGFAVQRNRLLAHATGDYIFFLDADEVMTPAFREELQAIVRSGERAVWKIRWRMVAFGHELRYLRTTSTVERLFRREMVREYVGVVHEEAVLTEPGVPRHVMRAQLLHHSRETVRGSLEKLTQYAMLGAAKRAAAGKRGGVGRGLASGTSMFVRLYVLRLGFLCGGAGFLYCLFVALEAFFRYAALEYDRDRLSESVRR

SEQ ID NO: 3046 - protein, 281 aa, Deinococcus apachensis
MNPRISVVINTLNEEHNLPLALDSVCRWVDDIVVVDMHSNDRTATVARAYGARVFLYERLGYADPARAFALAQATGDWVLVLDADEVVPAALAAQLHAIARRGDFDAADLPYQNFVGGVAVRGLGWGPTQDHHVRFFRQGQMRVTGEVHNFFHPLPGTRVLRLPYQGDNALLHFSYTDYTSVMEKINRYTGIEAQTKQGQGVRPSLLRETALPVREFLLTFLVKRGYRDGRHGLRLAVLLALYKYLREIKLDERVQRGTREDMLNRYRQLARQAIHPKDPL

SEQ ID NO: 3047 - protein, 302 aa, Albimonas donghaensis
MRPLFPPLTELSRRAAPESSVPESRRLSSPRLRPYPRPPVPDRSAAVSAPLSVFLITRNEAARLPRTLAALKGLADQVVVVDSGSTDDTLAIARAAGAETHHRDWTGYGAQKRHAEDLCRHAWRLNVDADEIVTPALAEEIRALLASDPAPAAYRAKILNLYPGRDRPRPLANDYDVVRLYHRDAGRYRDHPLFDRVETTGPVKRLRAPIHHVPFLDWAGLVAKENAYSSFQAEAAKPRPMWKLRARLLVEFPFVFLKGYFARGHVLGGWDGLIFATVIAFARWLRIAKMIEAAKARKRRGA

SEQ ID NO: 3048 - protein, 283 aa, Streptomyces sp.
MTRLPIVVAIPTKNEAANIASTVRSAIGHFAAVVVVDSDSTDDTRALAEAEGAEVVPYAWDGAYPKKKQWCLDHIRTDIPWLLFLDGDETPSGQLLLELRRIFLDGRPIRPAAFDIPLRYWFAGQRLRHGHTIVKRALLDRTRARFPEPDDLAAPGMGEQEGHYQPLADPVHRLRGPIEHLDLDPVRTWFERHNRYSDWEAWLETHPEVREEIRTAKTRQGQIFHRAPLKPLLSFGYAYVYRLGFLDGRAGWDYAWAMSFYRWQIGVKAREAGRAAARAGDGG

SEQ ID NO: 3049 - protein, 490 aa, Unknown
  Description of Unknown: Candidatus Rokubacteria bacterium sequence
MASARPTGPGCCSVSGPDPDLSRRVSDSRPREGPALRRLPALSACLIVKNEEKFLDRCLGSLGGLVDEIVVVDTGSTDRTREIAAAHRARLDEFPWRDDFAAARNRALGLAHGEWILYIDADEHVRPTSPDRLRSQLSEPGYVGHHVLLHPRPGFTPYWEMRLFRNDPLIRFRGIIHENIWPGIQAYRARHGGKLGRSDLVLDHDGYERDQDVKHRRNLPLLRKSLRRDPSKVFSWCHLAGIYTALGKPRLAEQAWKSGLAASRKRPRSGIGEDSLPYIGLIRSRLGTWRRVERLLAEALERFPQNHELQWLQGLTHMKARRHEQAIPWFGRLITAGRTGEIDRSMAYDVRLFDVLAAEGLATCHFKLGRYAESRRYFDLASKHDPDKLEYRVKQALCARLERASSNPRARVRSQADRRSLEPAHAGRSGARRPSELHAGSPGSGRASSRPVQAALRRRASAPSASLAARSRRQRRAGPGSRGPAARRRR

SEQ ID NO: 3050 - protein, 254 aa, Desulfuromonas sp.
MNFKKNQQQKISAVIITRNEQQNIERCLNSLDWVDEIVVLDSGSTDKTKTICRQKGCRVISAQWVSFGSNKQKAVENASYDWILSVDADEQVSPELKNRIRELLVKPTYSAYRIKRESFYLDRFIRYCWKNDYPVKFFNRQKAAFNSQQVHETVDLCGELGVIEQPLYHYSYLSISSHLLKMDRYSQITSEVMKNEGKRVNLFSVFLRFHLMFLKMYLLKRGFMDGKWGLILSFNSAYGVFLKYLKLWVSQNQN

SEQ ID NO: 3051 - protein, 273 aa, Spiribacter curvatus
MGQALPLSVAIITKDEEANLPRLFDSLERLEPAEVIVVDSGSTDSTVAIARDYGAQVIETDWPGHVEQKNRALSACHQPWVLSLDADEPISPELADNLRDLLAKNNAPQRNGYEISRLTYYLGDWLRHVWYPEWRLRLVRRGMAKWTGYNPHDRLEVEGATGRIDGDIHHYSYTGVEDHFRRSIDYAKIGAEALSARGKPFRWHKMIFSPLARFIRLLIFRQGWRDGWRGWIIAWSSMFSGFLKYAFLYEMQRQQRKFGTGTNGTTDRDGSHG

SEQ ID NO: 3052 - protein, 261 aa, Unknown
  Description of Unknown: Betaproteobacteria bacterium HGW-Betaproteobacteria-10 sequence
MPASRQPLSVVIITLNAASQLEACLQSARFADEIIVVDSGSTDDTQALAERYGAKVMAQDWLGFGRQKQFAVEAARHDWVLCLDADERVSPALQASIEIALKTASTAENATPAFRFPRCNRFMGRYLKHGEGYPDWSLRLFDRRQARWSDDAVHEKVITQAKIGELSGDLLHDSAESLASYLSKQNRYTSLAADAAVAAGKRASFGRIALSPLIRFIKFYFIRQGFRDGLPGFIHIAIGCFNSLMKYSKMLERQNSDTTLR

SEQ ID NO: 3053 - protein, 253 aa, Unknown
  Description of Unknown: Desulfobacteraceae bacterium sequence
MNEEDRIETCLKSVAPIADEIIVLDSGSTDRTRDIAGNYTDRVYETDWPGYGPQKQRALEKASCEWVLSIDADEALTPALRDEIDQVLSTRPVEVGFNLPWAPVILGKTLGYGRSARAPLRLFKRAGARFTDARVHEKVLLPRGKTRKLKGRLLHFTHRDFRHALYKNAEYAWLGAVQRHEAGKRGMGLFGATIRAILEFFQIYILRGGFLDGSVGFLMAVLYSQVTFNKYAGLWVLYRQDKLKPPAQNEQQE

SEQ ID NO: 3054 - protein, 299 aa, Parapedobacter koreensis
MISVLILTKNEEQDIAGCLSSVSWCDDVHVLDSFSSDDTVDIARAAGARVSQRAFDGYASQRNAGLALPFKHEWVFILDADERAPQCLFPILREAVLAADDRIAGFRLRRRDFYNRRWLKHAQITPYYIRLVRKDKAHYYREVNEVLQIAGEVGELPAYFNHYPFSKGMRHWLKKHNRYSTMEAMRWIEEHDGNIKFSIKKALFSKDFSEKRYHQKGLFYKLPARPLIKWLYIVFFRLAILDGRAGLTYATLQAIYEYFIRLKTKELLRADKRLNGSLWAAQEMEDRRSVPNTLLMERI

SEQ ID NO: 3055 - protein, 263 aa, Acidipila sp.
MPETLSVATIAFNESANIARTLESVKWADELIILDSGSTDNTVAIAESYGAKVYVNKPFPGHGEQKNVAIDHCTSDWILLLDADEVITPELAKEIRQVLAGPAKHDAYWIPRLNLIFGRWIRHGGFYPDRKLRLFRRGSARLSEGVGPHSTPQFAGTPGILKGDMLHYAYPTLPLYLEHMNRYSTEMGRLAAAKGKTSRSLFAFLWNVVLNPVATFTYNYFFRLGFLDGREGLLLHLYHSGYVSWKYAKAWESARKASKQSGV

SEQ ID NO: 3056 - protein, 358 aa, Brevibacillus brevis
MLRITLSIITKNEEAKIKRCLDSANVIVDEIILVDTGSTDNTKQIAIECGAKVYDFPWTGSFADARNYSLEQATGDWILVLDADEYLAPGSADAIKEFISGPPAIGRISQLSNYLDNGEIRYESVPISRLFPKGVYYTGSIHEQVVSDLPHRMTSVTVYHDGYFETDKTGRNIPLLEKELQKDGNNPYLLMQLAREHKNKQDYVQADYFFSQAYLYATKLEGYYPKLVVEYLYNLMKIGKLDTGYTVIQAEQNQDQLSNFPDFHFALGMFYMDYVLSNTAAHIDKLPRIEASFHKCLELGDRKEFGGIIGAGSFLAAYNLGVFYEVIGDHKKAVEYYHFSAEHDYQKAKERLSSLING

SEQ ID NO: 3057 - protein, 322 aa, Unknown
  Description of Unknown: Candidatus Eisenbacteria bacterium sequence
MAAPRGTARRDRGSGPGLPPLQRDGLPLGRGSVFALHAGRDDGDGDRGVPRAAPRTGRERRLSAREAGSAREPLSVLVTTKNEERTIRACLESVRWAEEVVVVDSGSTDGTLPIARSIADRVVDHEYENPAAQKNWALPQLRHTWTLILDADERVPPPLRSEIESVLADAGREDGYWIYRENHFYGRPIRSAGWQRDKVLRLFDRTKGEYRPTMVHEEMVLRGREGFLRERLVHEPYRDLDQYFEKWNRYSRWSAEDLRRRGVRASGSRLLVRPWLRFLRMYALEGGFREGRRGMVLCWLAAFSVFTKYARLWEAETRDEER

SEQ ID NO: 3058 - protein, 260 aa, Polaromonas sp.
MAYPPRLTIAVLTKNEAQRIERCLRSAAFADELIVVDSGSSDDTVALARALGAQVFVHADWQGFAVQRNHLLAHAHGDYIFFLDADEEITPALQQELCAAVQSGARAVGCIRWRVVAFGRELRHFRSQAPVERLFPRDRLQRFEGAVHEHAVLAGEPLPRHALRTPLLHYSRDSVRASLEKLTQYAMLGAAKRARAGKPGGIGAGMVYGVSVFIRLYVFKLGFLGGGAGFLFCYFIALECFFRCVAQRYDSASLTDAVGR

SEQ ID NO: 3059 - protein, 625 aa, Hydrogenibacillus schlegelii
MEDRPRRSGAMLLGVHILAKNEAARLPAALESVREIADEIIVIDTGSTDGTPEVARAFGARVLFVPWQDDFAAARNSGLEAARTDWVLVLDADERVVAGRRVLRSLIRETENEAFTVEIQNAIGSDPWARVVFRPVRLFRPSAFGGLRFLGRIHEQLVTPDGRPAPFRPAASPLVIEHVGYRPDVLREKGTAERNARLLARCLEERPDDPFYRYHRGITLVQLRRLREAAAELERALETAPKSAPYRPSLVRTLSLVYEGLGRPERARTLLQAEAPDVEGQPELWHLLGESFLAAGWVRPAEAAFRAALAAALRADPSDDNVRTFGVGGFRTRTRLTEALARQGRWAEAMEALRAALLERPDFAPARRLLEALVEPPALPGRPADRASQGGRREQDAAPEAARASPAPEAAGRRPKTAAEAWAMYRAGAVRPAAEFFLESLGDGTLTAEGAYALGELLYERGHGAAAEAMFVRAIALAEAAEGRRRVLQADESGGDVPPAADKGPGGAGEGAFGPAGLSDRARVGAALSRLDDLLAGVARALRRADERAASAVRRAEEGRDGSSPGPAAVVRRWTAAEAALRRMHHRLAEARTALAGLPWRVRMIGDRGGSGEGTRRTEGAEGAD

SEQ ID NO: 3060 - protein, 281 aa, Aeromonas salmonicida
MGANSSMPRQPGANKSLQPVKKPTLAAVLIVKNEADNLKACLASLDGLVDEIVILDSGSQDETPAIAAEFGARFFVNTVWPGFGRQRRLAQSHVQSEWVLWLDADERLTPELKEAIATVMANPASDTIYSIPRLSWVFGRFIRHSGWYPDRVLRLYPKALTRYNEVLVHEKVEVRANMQIVNLHGDLLHYTYRDLEHYLVKSAGYARAWADQRTARGKKGSLGQGLVHAVGCFLKMYLLKAGFLDGKQGLLLAILSAHSTFAKYADLWIRQQPQAPDQTGS

SEQ ID NO: 3061 - protein, 265 aa, Unknown
  Description of Unknown: Desulfobacteraceae bacterium sequence
MSKNKNYTLSVILIAKNEEDRIERCLRSVAPIADEIIVLDSGSTDRTKEIAQQFTRQVVETDWPGYGPQKQRALEKATGDWVLSIDADEELSPELCEEIQETLAAGPSEAGFKLPWAVRIFGATLNHGRSGRAPLRLFRRTGARFTDALVHETIVLPKGKIKTLKGRLFHYTSRDFGHYLEKNRQYAWLGARQRHEKGKKGLGLTGAALRAIWTFFLIYVIRLGFLDGRVGFLVAVMYGQSSFNKYAGLWTLRQVGASENKSEQP

SEQ ID NO: 3062 - protein, 257 aa, Jonquetella anthropi
MTVKLSLFILAQNEERRLPRTLQAVAPLADEIVLIDSGSTDRTVEIAEQFGARVIYHPWKDVGDQVKLGQDQCSNDWVLLLAADEVLTPELQQEIRKIKEHPDCDGYKLRICDVFPGTRPNRWVKHYKLIRLYNRRKFTMAGRIGHDDVDPLVPDATSRVLHGLVAHYSQLSISHTVGKYNLATDRRVNECERKGVHYSPWRMVGALSGNFLRVYFLDRFFLLGWWGFIHSVRIGHMRFLKFAKWYERGHSAGWFDS

SEQ ID NO: 3063 - protein, 262 aa, Halomonas sp.
MATITGVVITLNEAANIEACLASLANVCDELIVVDSGSTDATCRLAEQAGARVIAQPYLGDGPQKNVGPAQASNRWVLSLDADERLTDEAIKAIRGLELDNSEQEAFALRRRNYLGSRWIKTCGWYPDYCVRLFDRERTAFSDSRQHASIPASNATRLDADIDHYSFANLSELFTKASGRFSSRAAKIMYLKGKKANALSPFVHGTNAFVRKYVFQRGFSSGLDGMSVALSAAVNAYLKYAKLLELQRDSQVREAEDFDRIW

SEQ ID NO: 3064 - protein, 257 aa, Thiomonas delicata
MDSPISAIIITLNESKNISECIDSLRWCREIIVVDSGSTDDTVARARDAGARVHITEDWPGFGVQKNRALALATQPWILSIDADERVSPALAREIQMAIAENNRFDAYAVPRLSSYCGQYMRHGGWYPDVIVRLFRRGKARFSDALVHESVQVQGTIGRLHHHLYHESFHDLEQVLVKLNVYSTSGAQMMLRDNRSSGVLTALVHGWWTFIRCYVLKLGFLDGRLGYVLAMSNAHGAYYRYLKLWLINKKRSQEKQG

SEQ ID NO: 3065 - protein, 278 aa, Xylophilus sp.
MQPLHGDRAGGVDRPTAAARTPTLSVAVLTRNEAHRIRECLDSAAPIAHELVVVDSGSTDGTMAVAEAAGARVFSHPDWQGFAVQRNRLLAHCTGDYVFFLDADEQMTPALRDELQAIVQSGARGVWKIRWRMVAFGRPLTWYRAQSQIERLFPRELLREFTGVVHEEAQLRGEPLPRHLVRAPLLHHSRETVRGSLEKLTQYAMLGAAKRAALGKRGGVLRGLASGLSMFFRLYLLRLGFLCGGAGFLYCLFVALESFFRYAALSYDRAHLTGQVVR

SEQ ID NO: 3066 - protein, 279 aa, Unknown
  Description of Unknown: Kiritimatiellales bacterium sequence
MAGVSVLILTKNEETNIERCIDSVSWSDDIVVYDSLSDDRTVELAEKLGARVVKRKFDNWSAHQNWGVENIDFKHPWVYYTDADETCDDQLRAELQNLPETGEGFSAFQVRRKDYFMGRWLKRSQLYPTWITRVFRPDKIRYERLVNPVAVVDGATGKLEGHIIHYPFSHGVGHWFDRHNKYSQMEATDLVEEVAAKVGFGDFFSRDAATKRRALKTMAYRMPGRPVLMFGYLYFFRLGLLDGLPGLRYSIMRSMYEYMIDLKVAEIRYKEQMNEGEML

SEQ ID NO: 3067 - protein, 362 aa, Ralstonia solanacearum
MRRQPKPGRRSEIALVVIARNEAGCIERCLRSAKPHVDRMIVLDTGSTDETIAMAEACGARVHRFTWVDDFSAARNAALQLADADWNLVMDADEWLESGASELREACTFGPLLGVVCVQSLDDTGGAVQRTNTWIPRLLPRGVHYQGRVHEQPVAPLRRVRLPLVFGHDGYVSAKLDKKRGRNAALLHAELAERPDDPYVLYQLGKETEINGKDPARAADLYALAAAGAPASAPYRHDACIRLLLCLRQSGRLEEAISRAGEWMDAWSASPDYFFVLGHLMFDAAVRHPAQAAEQWLPMAEHAFLRCLAIGDQPKLDDSVFGRGSFAAAENLAVVYRAQNQPSKADEYQALSQRLRAQPTAR

SEQ ID NO: 3068 - protein, 290 aa, Streptomyces sp.
MDKLPVVVAIPTRNEARNIAGTVRSVIGHFAHVVVVDSGSTDDTRALAEAEGAEVVPYTWDGRYPKKKQWCLDHVHPEVDWVLFLDGDETPSEELLREIRRVFTPPPGRTVRPAAFDIPLGYWFAGRRLRHGYTIVKRVLLDRTRCRFPEPDDLAAPGMGEQEGHYQPLAPTAVRLAAPLEHRDLDPVRTWFERHNRYSDWEAWLEGRPRVREQIRQAKTRQGRLFHRAPLKPLVSFAYAYVYRRGFLDGRAGFDYALAMSFYRWQIGLKAREAADPPGAGTGSGARGRR

SEQ ID NO: 3069 - protein, 253 aa, Gayadomonas joobiniege
MTVKPISVYFITLNESATIAEAIQSVQAIADEIIVVDSGSTDNTVEIAESLGARVIKQSWLGFSAQKSFAMKQCRNDWVFNLDGDEIVPENVNKEIMQLVASDCCDAIRVNFEDIFMQQPMHKKSHKRSIVRVFNRHKVRYPQDRLVHENVIVEGKVAQINGCIIHHGYADVGNLMAKQNKYSSLSAKEKYKKGKKASLLKLFGVFPVMFLKEYLIRKMFLSGVRGFVHAMISAMYAFLKEAKLYQAEKTKRR

SEQ ID NO: 3070 - protein, 251 aa, Fluviicola sp.
MKITATIITFNEERNIERCIRSVEGLADEVIVLDSLSTDRTQEICKSLGVRFESRAWEGYSESKNYLNSLVTTDYILSLDADEALDPTLRAEVLKVKTDSKPQIYSVNRLTNYCGKWIKHSGWYPDVKARLFPKEGSYWDGAIVHEELIFPEELKIIQLDGHLEHYSYYSFEDHRARADKYSSLTAQKMHQAGKTASVLKPYLSALGRFVSMYLLKAGFLDGKMGFKIAQISAQSNVFKYKELRRLNRENH

SEQ ID NO: 3071 - protein, 267 aa, Desulfovermiculus halophilus
MTPHPLPLSLAVIVLNEEQNLQRCLQSVSGLVSEIIVVDSGSTDRTVAIAEEFGARVFYNSWPGHVAQKNYALSLCSQPWVLSLDADEALSDQLFASIQSLFAHKEQACAGYWLNRKTFYLGAWIEHAWYPEWRLRLAKRDTAAWQGTNPHDKLVVHGSTSSLSGDILHYSYTDLNDHLKRTIDYGRIGAEAALDQGKRFHCSQLLFSPFGRLVKSLLFKQAWRDGWRGWIIAVSSFLTCFAKYAFMFEHWATREKEASCPRLEEKY

SEQ ID NO: 3072 - protein, 277 aa, Opitutus sp.
MADSPPVSILILTLNEEKKLPACLAAVARFDDIVVLDSGSTDRTAAVARAAGARVFVNPFRDFASQRNHAHETIAFKHPWVLHLDADEIMMPELAAECTTLDPAAPLDGYYIAPRMMFHGNWLRRCTDFPAWQARCVRARGFRFIQTGHGQREAPEMRMGRLAGNYLHDISVDDIAEWEARHQRYARQEASQFLAAPETLGQTLQKLLAGAPLARRRALKRLSYHLPARPLMRLLYQYVLRGGFLDGAGAWRYCLLLARYERIAAAEIKRQRAAGHG

SEQ ID NO: 3073 - protein, 335 aa, Lachnoclostridium pacaense
MADITAIILTRNEEENIKACIDSIQGVVSRIVVVDSYSADKTEEVARSCGAEVYKNEFFNYAKQYKYAVDIAQVKTVWILRIDADERLTEESAEELEHLCNVNTNTDVEGIILRFCNEFMGKSLKHGMHYPWKKLIVYKTGKGDIEDRYMDEHIVLNGTKKIVEAKRDSLHLAYRGLDYLVNKCNWYSTREVMDYYDEKDLRSDNTSIRTWIKMSIYYKLPMGLRSWAFYIYCYYIRLGFLDGREGKIYAVIKAYWYRFLVDAKIYEHEKLKKELKPTGALNDMSNPGNWHGDRKNGNVEDVGIGGGGHKGTFRIAYSRSVLYPFIIREVQCGTC

SEQ ID NO: 3074 - protein, 260 aa, Prosthecobacter fusiformis
MPYPISIAIISKNEQANLRRCLASAAGLAEEIVIVDSGSTDATAEVAAEFGARFVHQDWLGYTDQKNLCNSFCTQPWILALDCDEELSPELQQGIAAFFESGDSAIYDAAWMARCVWFLGRWIRHGDWYPDKKVRLFRREKGQWQGHDSSQVHERLVVQGPHTTLRGDLYHYSFTGMRHYLDKHLSYTEVFADHEKAGGRGWSLVDAVFRPWWRFFRAYFIKAGFLDGFPGLWIAIATAFFTFMRYSRAYEGQVAQKPRD

SEQ ID NO: 3075 - protein, 284 aa, Magnetofaba australis
MSLITAQERPAGLSAIIIGRNEAANLPRCLGALGGVVDEIVYVDTGSTDDSAQIAESSAARVFHRPWDDDFSAAKNHAIAQAKFRWLLSLDCDEELVPHSATNLILKEWRANLDSPGAIVRIENIMGDSAQRVPQNALRLFLNDDRIRFQNPIHEDVSGSIYRHWPQTPLPRLPITILHHGYAAGRNQEKLQRNMEILGKWADAEPDYPFAQYKYGKNLLHVGRAQEAWRYLQRAVTLINNDAQPATYAFLDALVEDYREAAQLLGIKEKVPLRLIEALRLQDR

SEQ ID NO: 3076 - protein, 279 aa, Unknown
  Description of Unknown: Planctomycetaceae bacterium sequence
MSCTHSLTAVILTKNEEGQVTRAIESLRFCRRIIVLDSGSTDSTQLMAEAAGAEFVVHVPEPPFRISQQRNWALAHLEIDTEWVLYLDADEVVPEALAKRLTGLAADANVALDAYELTPRYLFWGKWLRRTQGYPNWHPRLVRHGRADFAGGVWEHFTEGTRVGKIYEPYDHYANSKGLRDWLDRHYRYAAWDAERIIDALESGNPEALGTTRKRWLRRLAARFWPLRPFARFLQMYIFRLGFLEGWTAFNFCLLYFCYEVMTINLIVENRRRRAGKDL

SEQ ID NO: 3077 - protein, 372 aa, Ralstonia pickettii
MSKHAKHHAKPAKGSLALVVIARDEAACIERCLMSAKPHVDRMIVLDTGSTDDTVAIAKACGAQVHHFTWVDDFSAARNAALAAANADWNLVLDADEWIEAGTEELRNACTFGPLLGVVCIRSEYDISGHVEHSNSWIARLLPRGVRYKGRIHEQPVATAANLQRVRLPLVIGHDGYMNAKLDRKRGRNHTLLQLELAAHPDDPYVLYQLGKDFEINQKDPAEAAAHYQRALAMAPKVAPYRHDLCICLLACLSKSKQLDAAITLAGEWMEEWSGSPDYFYMLGHLMFEAAAQDPAQAEKQWLPMAENAFLKCLEIGEQPKLDAAVFGRGSFAAAKYLALTYRALADTLAIKSNQYSDIARQMQERSAAVAA

SEQ ID NO: 3078 - protein, 754 aa, Alicyclobacillus acidocaldarius
MLLSACLIVKNEAHVIERCLKSLEGVADEIIVVDTGSTDDTPRIAAAFGARVYQAPWTGDFGEARNRSLQHAQGDYVLVIDADEFLPQEDGKRLRRAIEAGEADAYTVDLVNYVGSVARFVRAPGVRVVRVFRRGFTYQGTIHEQILPQIAARGGRVQVLDVELHHLGYLAEFVAMKGKPDRNLSILKQVLDQDPENLFHLTNLMAEYARINQPERVIEVGERAYAIAASHLVTEPHLVLRLYRMLAAAYGDIGDSNRLERLASEGEQLFPSIPDLPFIHGVYEMKQGRWHKAIRLFERCLEIGPVRSEIVDTIAGAGSFVAAAKLGELWLLEGDVERARDYFVQSLRANPRQEGVFFFLASLLPLGEPPVWSQLWRAAEHDPVCLAYLAIAGAMWRQDWVWSALNEIDHTPVTSPILAKLRASGVALGKLEPSSFPDEPAAKLEQRWFEALLAINRREGDLARSLLQDQPERLAQLEPWLSGGTPLHIGPLLDELLLVRAHRLLLQSLPQAADRDEVLSRVLASPLRDMLHHVAWRGERGWECDFLATAAFHRRDIATSLEWLERGLAYEPTVRRAVMEADLALAHRNVDHASTVVRQARAWFPSSDILRHIEERLHVTERQARSLDELLEEGTTMHPHRAYQMSVATMPLKVKIVKLHERAVECVDQVMELVKQGDIMGARTYIQYVQDIITFLRSNLDVSTEAGKAANASYGYFYKMLVGWFLQPARVAEEYQEMRQFWQSWADTWAKVQA

SEQ ID NO: 3079 - protein, 254 aa, Unknown
  Description of Unknown: Gammaproteobacteria bacterium sequence
MSENRISAVIITLNEEKRIKECLESLDFVDEIIVVDSGSSDNTVNICLKMGARVVSQEWLGFGAQKQFATEQSVNDWVLCLDADERISPELKSSILDAINNSKYSVYKMPRRNIFLGRWLAHGEGYPDYNIRLFKKDSAKWSNDPVHEHVVTNNETGTLKGDLLHNSEDGIADYLNKQNRYTSLQAELLFTSGKKIGAAKMVISPLVRFIKFYFFKRGFLDGIPGLIHVVIGCVNSFTKYAKTIELQRQQDNDK

SEQ ID NO: 3080 - protein, 341 aa, Butyrivibrio sp.
MVTISLCMIVKNEESCLEKCLKSLEGIVDEMIVVDTGSTDRTKDIAKACGAKVLDFTWTGDFSDARNFAFAQANCDYIYSADADEELDEENRQRFMELKADLSELDIDIVQMYYCNQLQYRTVYNFDRELRPKLFKRVRHFVWEDPIHEQVIVDPVICNSEIEIIHRPKENHAGRDLETFRRTIAGGRRLSKRLHGMYARELFMAGTDEDFLKAKEFFTASALDTTRGLDEIKEASCVLAHIAVIEDDLAALLKYTLKDAITEMSSEMCYELGDYYFGKKDIDEAIVWYYNAAYECSSILDIKKSGSLPRLALAKCYHELGNEEQARDYEREASEVEENTD

SEQ ID NO: 3081 - protein, 250 aa, Pusillimonas ginsengisoli
MTLSVIIITKNESAHILDCLESVAFADEFIVVDSGSTDNTVELARNFGARVEVTPDWPGFGPQKNRALDLATGDWILSIDADERVTPELADEIKEVLANPSMQACEIARLSDFCGRFIRHSGWWPDYVLRLFQRGSARFSDVAVHERVVLNTGAPRRLKYHFLHYPYANLDALITKVNRYSSDAAAMMYARGKRATVFSAIGHGFWTFVRIYLIRRGFLDGRHGLVLAVTAAAGSFFRYAKLSFMSGPKQ

SEQ ID NO: 3082 - protein, 276 aa, Unknown
  Description of Unknown: Candidatus Competibacter denitrificans Run_A_D11 sequence
MANKPLSVFVTTYNNGRTLPACLESVKWADEIIVLDSFSTDDTLVVARRYGALISQQMFIGYGPQKQSALTATTHDWVLLLDADEALSPDLQKELRQVLADGPVADGYEMPRQEQMFWRMYHPGTRMNYYLRLFDKRKGLIDDMPIHAAPKIQGSVTRLSSPLYHYGETNIHTKVEKINAYSSGLVADKVRKHRWGIRLIMIVYPPLFFIRSYLFKRNFLNGWAGLINSVIAAFYVFLKYAKLYEHYQFAKYGKGLLPDDAPPLPGEYQPGTGEET

SEQ ID NO: 3083 - protein, 262 aa, Labrenzia alexandrii
MTQRLPLSAFIIAKNEADRIPAAIKSVIGWVDEVIVIDSGSEDETVAVAESLGARVVFNEWPGYGLQKRFGEDQCRNDWLLNLDADEEITPALAAEIKTKFDDQSYMASDAWRIMIRDTFPHETEPASWAYGYNQIRLYDRRKGRFSASTVHDTVRPQEGATLGDLKGIMAHRSDRSLEFSVGKYNRYSDMQVQDMLDRGRKIPRYRLLTEFPVSFLKGYFVRKYRKYGWWGFILAMNYAHGRFLRVAKAYEAELLRKTGRK

SEQ ID NO: 3084 - protein, 261 aa, Unknown
  Description of Unknown: Chloroflexi bacterium OLB13 sequence
MTRLTAVILTFNEEANIAECLASVVFADARVVFDSGSTDRTAEIAREAGASVIQRPFDNYANQRNAALESVAGSSAWVLFVDADERVTPALAAAVRRAVNQGDAYAGWRIARHNYIFGKLTLGAGWYPDYQTRLLRCGAAHYDPERKVHEVVLLDGPLGTINEPFVHINYTRFDQFVAKQQRYTAYEAGILYEQGVRPKLRNFILQPLRHFRWRFITLKGYRDGLHGLRLSALMAWYELRKYQLLAALWRDHDRRSASDPQ

SEQ ID NO: 3085 - protein, 294 aa, Ochrobactrum sp.
MSVSVLIMTWNEEVNLPACLSSLDWCDDIVILDSFSDDRTVELAKAAGARVFQRPYDTEDRQRMYGLTEIKFKHDWVYTPDADEITPADLRDEMLAIASDPTRPEVFFKARYKNMFMGRWIKHASLYPTWITRLVRPDRVRFERSVHSRASGGPEGALQSHFIHYSFNKGLEAWYDKHNRYSSAEADLSSNRLLERKIDWGGIISTAPERRRRALKSLSYHMPFRPSLRFLYMYLVRRGFLDGKPGYLYCRLLAAYEFMIVIKMEERRRNQSVKLDSAPVRHDLENKEPERHMV

SEQ ID NO: 3086 - protein, 289 aa, Unknown
  Description of Unknown: Acidobacteria bacterium sequence
MISVLIPTKNEVQDLPCCLNSVAWSDDIHVYDSGSTDSTVDLAKSMAARVTVRSYAPGQPAFGGDESAHQNWALQTIPFKYPWVLHLDADERVTPDLAASIRQAVENPGKNVAFRIQRRDFLHGRWLKHVQASPFYLRLFRPEKMRYERLINPVSIPDGPVGRLSGYLDHFPFSKGMRHWLDRHNSYSTLEAQQFIMNRASHSSFSLKQALLAKDLNNRRFHQKELFYRLPARPLIKFLLLYFGKRGFLDGDAGMTYALLQSFYEYMIVLKTRELEGSAATQDAAGMSA

SEQ ID NO: 3087 - protein, 353 aa, Sphaerotilus natans
MRPKPARLYRIALVMIVRNEAAGLKRTLDSVRRHVDRMVVLDTGSSDRTREIARAAGARVADFAWCDDFSAARNAALDLAGADWHLVLDGDEWLSEGTQVLAALRTCKPDFVGALRVDSLHALEGGEPGGEAVASSWISRLLPGTVRYRGRVHEQPQHALPVRRLPVTIGHSGYRPEALARKADRNARLLQREIADRPDDAYLWYQLGKDHDVHGRAAAALDCFARAETLQPCGPEAPGWTHDLSVRRLHALKCAGRHAEGIELASAQMALWSDSPDFFFALGDLMLDWAAREPRRAGELLPMIEGAWTRCLEIGERPELDGAVHGRGGELARHNLELLRSLRAELAPAAQPG

SEQ ID NO: 3088 - protein, 251 aa, Unknown
  Description of Unknown: Gemmatimonadetes bacterium sequence
MASPAPVTVVIPTRNEGAQIAECVGRLAWAAEVIVVDGGSTDGTRELARAAGARVLDGAVVQGPTIAHQRNAGIGAATHEWVFALDADERVGPELSAELAATVAAPAREAYAVRRRNVFLGETVRHAGWGRDWVVRLFRKNRRFVERKVHEALEPVPDVGRLAAPLDHVPYRDLTSYLQKLDRYTAWAAEELAAHGRRPRVTDLIVRPPARFVRMYFLQLGILDGWRGAMLCGLAAASVLVKYARLWERSR

SEQ ID NO: 3089 - protein, 261 aa, Unknown
  Description of Unknown: Vibrio sequence
MSKATIGVLMIVKNESKHLASCLETVKEWVDEIVILDSGSSDDTETIARQFTDKFYTNTDWQGFGKQRQLAQSYLTTDWVLPLDADERVSDELKASILDVLKQNPHKTVYTLNRLSHALGKFIRHSGWYPDTIVRLYRRNEVQYNSALVHESVEVPNDFTRKHLNGDLLHYTFDSLSQYTNKTALYMKSWADQREGKKKVGITSAILHGFFRFFKMYILKRGFLDGRHGLLLAILSANTTFTRYADLWIRDYTKQKSDKQS

SEQ ID NO: 3090 - protein, 256 aa, Polaromonas sp.
MASLSVTVITKNEAHNIEACLRSVAFADEVVVLDSGSSDDTVQKALAMGAIVSVNTDWQGFGQQKNRALALASSDWVLSLDADERVPPQLQAEIRAALGAPSFDAYSFPRLSSYCGQEILHSGWYPDRITRLFRRDSAQFSNDLVHEKILTTGTIGQLQSALQHASFTSLEAVLDKVNRYSSAGAQALLDKGRNASLCKALGHGLWAFVRTYFLRLGFLDGQMGLVLAISNAEGTYYRYLKLWLLRRNRREVLGTP

SEQ ID NO: 3091 - protein, 366 aa, Sphingomonas sp.
MPSEAPHRRRGKVHVVRLALVMIARNEARAIARALDSVRPHVDRMIVLDTGSTDDTVAIAERRGATVHSFAWCDDFAAARNAALDHSDADWNLVLDADEWLEGGFEALSPAALPPATKAPAAFIGCAKLRNEGVAGTVARRFLPRILPRGVRYAGRIHEQPMSPLPLVPGALCIGHDGYAEAQLAAKHGRNLALLQAALAEAREDCYLWYQLGREHLVRGAAEAAVEPLQTAYRLTPPGAAYRHAVVLSNIRALKEAGRLHDALALVDAEQAAWPASPDFYFAVADLYLEWASHAPELAIDELLPVVEGAWLRCLEIGEQPLLDGSVVGCGSYLAAGNLAMFYERLGILDEAERYAALERELLAAA

SEQ ID NO: 3092 - protein, 274 aa, Unknown
  Description of Unknown: Verrucomicrobia bacterium sequence
AFTAVVLTKNEAPNLVRCLATLRWCEEIVVLDSGSTDGTAVQARALGARVCEHVPPPPFKIDEQRNWALDHGEITTPWVVFLDADETIPAELARELEAVGGAADGPFDAYELTPRYLIWGRWLKRTQGFPNWHPRVVRLGHARFAGGVWEHFTAGSRVGRIAVPYDHFANSKGLSDWLARHDRYSTWDAGKIVAFLDSGEDGAFGSTRKLGLRRWAARFWPVRPWARFFQMYFLRLGFLEGRAAFAFCLLYFFYEWMTVVKIVELRRQRKGLPL

SEQ ID NO: 3093 - protein, 279 aa, Unknown
  Description of Unknown: Verrucomicrobia bacterium IMCC26134 sequence
MATKSHLTAVVLTKNEVANLPRCFASLGWCSEILVVDSGSTDGTQAEAERLGARVLVHVQPPPFKISEQRNWALTEGGINTPWVVFLDADETIPENLAHELIRVAGDPDNELDAYELTPRYLFWGTWLKRTQGYPNWHPRVVRCGRTHFEGGVWEHFATGAKVGRVDIPYDHFANSKGLSDWLARHDRYSSWDAEKIVKYLESRDDASFGTKRKLALRRWAARCWPLRPWARFVQTYVFRCGFLEGRAAFTFCLLYFFYELMTVVKVVEIRRKKRGLPL

SEQ ID NO: 3094 - protein, 275 aa, Unknown
  Description of Unknown: Planctomycetes bacterium sequence
MSAKLTVLIPCRNERRNIRACIASVQGLADEILVADSLSTDDTLDIVRSIGGCRIIEREFVGYADFKNWAIPQAAHPWVLIVDADERVTPELAAEIRAILADPPEHLDGYWIGRENYFLGHRIRYCGWNSDAVFRLIRRDVCRYRQVRVHEEIDVDPRRAGHTRANLAHYTYWTFDQFFAKHVKYTKLGAEDSWDRGRRTGFFGLAIRPMLRFLQLYLLRLGFLDGLAGLQVCMLTAFFNTFVKQARLWEMEHALPQPDDDPSVTANVSNTRAAA

SEQ ID NO: 3095 - protein, 257 aa, Unknown
  Description of Unknown: Acidobacteria bacterium sequence
MIRLSVCIITLNEEHNLARALESIRGVADEIVVVDCGSRDCTGEIAREHGARVITNAWTNFAEQKNIAAAAANNDWILSLDADEELSSELRDAMLAWKHKEPEFAVYEFARRAWYVGGWINHSGWYPDRQRRLYRRDAARFLGIVHEALQFPGEPGRLGGDLLHYTIRSFSEHEEKVDRYTTLAAQQMCAAGKQSWRAAMWLATPWNWFNSYVLHLGFLDGSRGWVISRMAARSTWLKFKKLGELVESGRHAGTHSS

SEQ ID NO: 3096 - protein, 294 aa, Unknown
  Description of Unknown: Chloroflexi bacterium sequence
MTRPLPISLLVLTYNEEANIGQTLSSVREWVDEIYVVDSGSTDETCRVAEQYGATVAQHAFESHTRQWDWALHTLPLANEWVLALDADLRITTELRDELTLLFTTNRHKLNSIAGIYLNRRAVFQGRWIRHGAFYPKYLLKLFRKSCVSLSPRDLLDHHFYVVGSTLTLRSDMIEENLKDLDIGFFVDRHRRYARKSAEEEFAQRIDGNDWPIKPDLLGSPDQRVVWLKRRWYRMPLYVRPLMLFLYRYVVRMGFMDGRQGFVFHFIQSLWFRMMVDIYLAEMLSARDRGGELV

SEQ ID NO: 3097 - protein, 256 aa, Unknown
  Description of Unknown: Photobacterium damselae subsp. damselae sequence
MEKKHTLSVILITKNEADRVEICLRSVADIADEIIVLDSGSTDDTVEICRRYTDDITITDWPGFGKQKQRALDKASCDWVLSIDADEALDDEMKQALIQLLSQQSIQETAYRLPWGVTLYGTTLKYGRSARSVLRLFKREGAKYTLDEVHETVIPASGEIGTLKGLLLHYTHRDYGHGLDKAAQYAWLGSQKYHRKGKKSHGLVLALFRAIWTFFHIYIIRRGFLDGSVGFIVAMTYAQVNFNKYVGLWLLENDRS

SEQ ID NO: 3098 - protein, 257 aa, Ramlibacter sp.
MKSLSVILITRNEARNIEACLESVSFAAEAVVVDSGSSDGTAALAQARGARVVVTQDWPGFGPQKNRALELATGEWVLSIDADERVTPELRESILAAIAQPRFDAYEIDRRSSYCGQSMAHSGWSPDRVVRLVRRGTASFSPSQVHERLVPAGPVGRLEGKLLHESMRDFESVIDKMDRYSTAGARMLMERGVRGSMGKSIAHGLWAFLRTYVFRLGFLDGRLGFALAVSNAEGTYYRYMKLWLMQRQAAGNEAGPG

SEQ ID NO: 3099 - protein, 274 aa, Bryocella elongata
MSVLILTRNEEQDLPGCLDSAAFSDDIHVLDSQSTDRTREIAVARGAKVTIRPFDSYAKQRNAGLALSLAHAWVLVLDADERVTPALAAEMQQVVSNVAEDVAGFRMRRRDFLWGTWLRHAQMTPFYVRLLRVGRARYTREINEVVEVEGDIANLTAPLDHHPFSKGISHWVAKHNTYSTMEAELLAARADDSSASLRKALFAKNFHERRVAQKAIFYRLPGRPLIKWAYMMFVRGAVLDGSAGIAYATLASFYEYLIELKAKEIRRRNASLPL

SEQ ID NO: 3100 - protein, 267 aa, Pandoraea thiooxydans
MNNGPQNASAPSRAPATKLPLSVIVTTLNERTNITACLASVEPIAAEMIVVDCGSTDGTVELAREAGATVHVTPDWPGFGPQKNRALALATQPWILSIDADERLSPALAGEIADAVSQARHAGYEIPRLSQFCGHWVRHSGWYPDYVLRLFKRGAGRFSDHLVHERVLVDGTLGRLHEQLLHYSYTTMAQVQEKSARYAKAGAEELFRRGVKVSPLTPWYKSGWAFVRAFVLQRGFMDGWAGFAISRSHAHTTYSKYQQLRALRRQP

SEQ ID NO: 3101 - protein, 292 aa, Unknown
  Description of Unknown: Verrucomicrobia bacterium sequence
MSEQGEARATVSVLIPVKNEAANLRECLASVSFADEILIVDSGSTDGTQGIAAAAGAEVVQFHWNGEFPRKKNWALENVPWRHEWVLIVDADERITPELAGEIQRAIRRTDVDGFYLNRRFWFLGGWINHCGYFPSWNLRLFRHRLGRYERAESGGGGSSGDNEVHEHVILNGRAEHLAAPMEHYAYPDISTFVEKHNRYSTWEARVSETFYRDSSAGTLAARPFGTSLERKRWLKQCFRRAPFRPTLRFLYHYAWRQGFRDGYRGWILCRLLARYEFLCVAKEWESRQLRR

SEQ ID NO: 3102 - protein, 268 aa, Oceanicella sp.
MVHSPAGKAPLSCYIRTLNEERRIADVVRAALRVADEVIVVDSGSTDRTLELAVAEGARIVDQPFLGQGFQKRVGEDAARHDWLLDLDADEVVPPALADEIAALFAQGEPSGPVYALPMIICPPDGPAWEGFSISWRNKLYDRRRLRMPEHRRYDQLELPADVAPQRMANPIHHFAFRDIANLVAKMNGSSTRGAEGSKRKGRAVLALRILFGMPAYMLQHVVMRGRWRGGLYGVAVGTVLAWGRWLRDVKMYELHRREQWHRRNPPK

SEQ ID NO: 3103 - protein, 280 aa, Haliea salexigens
MISLNEAHNMQAVLDNLKGWAQEVFLVDSYSVDDTVDIALANGVHVVQRKFRGFGDQWNFALENLPVQAPWVMKLDPDERLTDKLKQSVGAATARNAATGISFSRRLWFMGKPLPIRQEIVRVWKAGRCRFTDVSVNEHPLVDGDVCHVEGDLEHHDSPDLHHWVDKQNHYSTAEAVARMNLALAAPAKLFGSHLERRMWIKKHFDKFPMRFFAVFLFYYCYKGLFRAGWVGYTWSKLRAHVYWMRYIKYREMLITSRASTSSTSDPSAKGQPDLRVPQY

SEQ ID NO: 3104 - protein, 248 aa, Unknown
  Description of Unknown: Candidatus Methylopumilus turicensis sequence
MKNTLSIVICTKNEALNISDCVISASFADEVLVVDSGSTDDTVDIAKKLGARVLETDWPGYGPQQNKAIDASKGDWIYSIDADERITPELKTEILNVITHEEHKVYDVPRKSFFITKFMNHSGWWPDRTRRLFKRGFARFTTHEIHANLSTSFRVGHLKSHMIHYSYKNCHEVLEKMNRYSSGSANDMLANGKNSSLPKALAHGFWAFFRTYFIKLGFLDGQAGLILAIANAESSYYKHLKLYLLSQQ

SEQ ID NO: 3105 - protein, 257 aa, Legionella massiliensis
MLSVIVIAKNEEVNIRRCLESVKWADEIIVLDSGSSDNTVAIAKEYSDKVYSTDWQGYGVQKQRALALTTGDWVLNLDADEAVDAKLQAVIKEAMASDKADAYRVPICMNFYGYPLRFSSSPQRHVRLFKRVGARFSEDIVHEKIILPVETRISKIRTPIMHHSFKDVSHALYKINRYSSYSAKIKIEKNKRGSFAKTLLGTGWMFFRCYFLQRGFLDGKAGFLFAVFNAQGTFYRGIKQLYHDAQLDKLPDTVKEN

SEQ ID NO: 3106 - protein, 279 aa, Lysobacter sp.
PRLLSAVVTTHNSMATLGVCLDSLAFCDEILVLDSGSADATVDFARERGACVFIEPFRGYAAQKQRAVDLASNDWVLLLDSDEWLEAGASAVLRATLEDMAGDVAGFSLRRREWLFWRWQHPRSRHNRYVRLFDRRRARLSHHAVHETVIAEGRVIALPVLLMHRGDADIAAKIDKANRYSSLQQPDIARRDVRGLQWRMLLYPHVAFLRYYLLRGHWREGWAGFVAARVHAFYAFAKYAKAYGNRQQPDSMACPTAACGASHSAGAARHSGTLDSPHP

SEQ ID NO: 3107 - protein, 253 aa, Unknown
  Description of Unknown: Oxalobacteraceae bacterium OM1 sequence
MKLSVIIITKNEAANIQACLDSVRFANEWIIVDSSSTDGTVEIARAAGAKVIQTSDWPGFGPQKNRALDAAQGEWVLSLDADERITDALREEILAAIAQVEHAAYAIPRLSSFCGHFIRHAGWYPDYIVRLFRRGAARFSDSLVHESIVVQRGTTGRLKAHMLHYSYLDDESVLRKLDHYSTLGARQAFAAGKRGGLGKAVLHGVSAFLRSYVFKRGFLDGGAGLMVAISAAESSYHKYLKLALLTQAGRTRP

SEQ ID NO: 3108 - protein, 263 aa, Rhodoplanes sp.
MPKITAYIICYNEAAKIEAAVSSVLWADEVLVADSNSTDNTVALAEALGARVVQVPFHGFGDLRNRTLEHCTNEWIFSLDSDERCTPEARDEILALVSGEPSHDAYLVPRRSYMMGRWITGSGWYPNYRQPQLFRKSAMRYTLDPVHEGYELKTAKPVGHLTNAIHQFPFRNLDEVIRKMNRYSTLGAAKLTKKRVSMASALGHGLWAFIKHYIFKRGFKDGWAGFVIALGNFEGTFYRYAKRYEETQNWQPPPSEKLTRPPQ

SEQ ID NO: 3109 - protein, 412 aa, Sulfobacillus thermosulfidooxidans
MSDISVALIVRNEERFITQCLESVKPITDDIVVVDTGSEDRTIELAEKEGARVISRPWPRDFARARNWAIEEAKNPWILMLDADEVLLEDDQHMLIEAVKHPTADAYNIRIVSLTDRPEDLTEARVTRVFRNDPRIRWEGRVHEQIIPSIGRAGMTLEPLDVRLMHYGYLKEVMTDRNKLERNLDLLDQSLSETKPNEWKAYLHWQRAQTLVPLERYDDAIKDMRLAMTLAHPTAALQPLFWLTLAKIFTAKRDYHKVHQTVREALKLFPDYTDLVYWEGQVFLDEGLWDKAEQRFKKALAMGVPKNYLQSELGVGTFKALWQLARISRMQGKMTQAEAYYLKTIELKPAFYPAWKEYLALLDGNPAPIIVTRLSMVLPKDTIIRTISSWASLSMNEQAILSYLQDTKNELG

SEQ ID NO: 3110 - protein, 248 aa, Pusillimonas caeni
MTLSVIIITKNEEAHIGACLDSVAFADEIIVVDSGSGDRTCAIAREKGARVVETTDWPGFGPQKNRALDLATQDWVLSVDADERVTPELAQAIAQAIRQPAAQAYQIARLSNFCGRWIRHSGWWPDHVLRLFKRGTARFTDAAVHERVQAQGPVATLDAHFLHYPYADMDALIAKVNRYSTDAARMMHAKGRRSSVPGAVGHAIWTFIRIYLLRRGFLDGREGFILAATASAGSFFRYAKLYFLGRGE

SEQ ID NO: 3111 - protein, 267 aa, Butyrivibrio sp.
MTPDITVIILTKNEEKNIEAAISSAKQISNRIIVIDSGSEDNTTFLAEKNGAEVFFHEWLGHAKQFNWALDNCDINTTWVFRLDADERISKELAQEINIKVKNTEVVGFEMRWRVYFMNKWIKHGGTHKPYFLRLFRFGRGKVEEKLMDEHIIVDGKVEKLEGDLIHYDYKGIDAWLSKHIWYSNLELSMYNSQMNMTGGNVKQKRKRSIYYKLPPFFRARLYFFFRYYIQMGFLDGREGKIFCFMQAYWYRYLVDAKIFEYNLQNK

SEQ ID NO: 3112 - protein, 255 aa, Unknown
  Description of Unknown: Acidobacteria bacterium sequence
MLAVKISAVIITLNEEQNIARAIRSVRWADEVVVVDSGSTDSTRQIASELGARVIEQEWLGFGRQKQFAVDAAANDFIFSLDADEEASEELSAEIRQLLRHDSISDGYRIPRLAVYLGREIRHGGWYPDFQLRLFDRRKGRWSDEVIHESFKLDEGACSGQLHNDILHFTCNDISEHARMIQERYAPLSARSMYEKGKRTSVVKILAAPVFSFFRDYVLRAGFLDGTQGVMIAGFGAYNVFLKNAFLWQMHRATK

SEQ ID NO: 3113 - protein, 280 aa, Streptomyces specialis
MTRLPIVVAIPTKNEAANITTTVRSVIDHFVAVVVVDSDSTDDTRALAKAEGAEVVPYTWDGKYPKKKQWCLDHVRPDIPWMLFIDGDEMPSEELLAELRRIFLDGRPVKPAAFDIPLGYWFGGKRLRHGYTIVKRALLDRTRARFPEPDDLDAPGMGEQEGHYQPLADPVYRLDAPIEHMDLDPVRTWFDRHNRYSDWEAWLEEHPEAREQIRTAKTRQGQLFHRAPLKPLVSFAYAYVYRRGFLDGRAGLDYALAMSFYRWQIGLKAREMRGGWSSPS

SEQ ID NO: 3114 - protein, 268 aa, Unknown
  Description of Unknown: Ignavibacteriales bacterium CG07_land_8_20_14_0_80_59_ 12 sequence
MGDGTGTDRFPLSVTIIAANEEANIAECLESVSWVDEIIVVDSGSNDRTKEVASRCTLHVVSHPWEGYARQKTFGLSLATHEWVLSLDADERVSPELKAEISSLDFSKADGFFIPRRNFFLDRVIRTCGWSPDYQLRLFRKSVTHVTGRKVHERFVVEGRTSRLRGELLHFTHPTVEGTLRKINEYSTLRAAEKSMRKHPSGITLVLHPLWEFLHHYILRRGFVEGVHGLMVSLIHAMTDAQTYMKIWELQNVKRNRQKSPEPPHPSV

SEQ ID NO: 3115 - protein, 259 aa, Tatumella morbirosei
MSTRQRLSVVMITKNEAELLPDCLQSVAWADEIIVLDSGSTDQTADIARQAGARVFYSEQWPGYGLQRQHAQQYASGDMILMIDADERVTPELRAAIEEVLQQSASPDNVYSIARSNWFLGRFMRHSGWYPDRVTRLYPARFRYNSHLVHESLEHSGASVIRLSGDLKHLTCRDLHHFQQKQLAYANAWAAQRFSQGRSCSLYSVYSHTVAAWLKTAILRAGILDGSQGWVLALVNAQYTFNKYAILWALNKTKPPGVQ

SEQ ID NO: 3116 - protein, 269 aa, Candidimonas nitroreducens
MSRAGVQAGRRLSVIIITKNEAAHIAACLESVAFADQVVVLDSGSTDGTPDMARQAGAQVHHTADWPGFGPQKNRALDLADGDWVLSVDADERVPAELAAEIRRVVAAPAHDGYEIARLSDFCGSPIRHSGWWPDYVLRLFRRGAARFSDDAVHERVVLQGAPGRLRGHLRHYPYADLEALVAKINRYSTDAAAMMHRRGKRAGALAAVGHGFWTFVRIYLMRRGFLDGRRGLVLAGAAAAGSFFRYAKLMLLSQDDAAPRAPADKERS

SEQ ID NO: 3117 - protein, 258 aa, Unknown
  Description of Unknown: Bacteroidetes bacterium GWF2_43_11 sequence
MKSDNPEPLKLSAVIITLNEEANIQRCIQSLLIVADEVVVVDSGSTDLTQDLATSMGAKVIFHPFEGHIQQKNFALSVASFPLILSLDADEALSPELATSICEVKHSPAAMCYSMNRMTNYCGKWIRHGGWYPDIKVRLIRSGKACWDGVNPHDKLTPEPNADIRHLKGDLLHYSINSLADHLKQIDYFTTIAARERVKQSKPVGIHHLLLNPAAKFIKDYFLRGGFRDGLTGFAIASFSAWASFLKYMKTAFLYRGL

SEQ ID NO: 3118 - protein, 267 aa, Cohaesibacter sp.
MSKPVTSTDKLPVSVFIITLNEDDRIETAIRSVIQWVDEVIVVDSGSSDRTVELAKACGAKVSHNDWRGYGEQKRHAEDLCKHDWLLNIDADEEITTALRDEIVSLFKPFPDTDICRVEILDIFPHEDKAKKWAYGYWQYRLYNRHKGRFSDSSVHDTVRPLPKARIDTLKAKVNHRSMRSLQVSVAKMNRISDMQVNDMLQRGRHISRWRLLTEFPLAFLKGYVLRRQFIYGFWGMALAYNYAFSRFLRVAKMYETELNQKTRRDQ

SEQ ID NO: 3119 - protein, 255 aa, Williamwhitmania taraxaci
MEVKISAVILTLNEEKNIERCITSVLGVVDDVVVVDSFSTDRTEEICSAMGVRFVKHKFEGYGAQKAWAIQQALYPVILSLDADEALSDDLRASVLEAKHHWDADGYSFNRLTSYCGQWINHCGWYPDIKLRLWDKYKGDWSSAVVHESVEMQEGAVVRHLKGDLLHYTTESIHQHMSVLLQYASMSAMKALKEGKRSSYFKILVSPRAKFVKLYFIKLGFLDGYYGYVIAKTTAFSTYLKYVYMLDIQRREIKN

SEQ ID NO: 3120 - protein, 529 aa, Unknown
  Description of Unknown: Acidobacteria bacterium sequence
MTRLTAIVLTGNCQDSLPGCLESLDFADEILVVDSGSSDRTREIALAHGARVLEHPLERFDEQRNWAQQQADTDWVLFVDSDERVPPELAEEIRTLLTSGTDADAYSMPRKNHFLGRRIRRCGWGSDRVTRLLHRHAVRWEGAVHEKPRVRGKVGVLRTPLTHHSYPSISAYWDKMQLYSRLAAAQDFQRGKRSGFLRMAFQPKLLFLRMYVLRGGWLEGRHGLVLCLLSAFSAFTRALRLWEHQLGASGRSLLPEGPPVEAPHQGGHPLSILVPTHNESANIEGVLDSTGWADEVLVVDSFSDDDTVATARRRADRVLQHEYINSAAQKNWALPQTRYPWAMVVDADERVTPELAREVRQVLASKATHQGYVIRRVNHFHGQRIRHCGWNRDRVLRLFNRERSRYQEQEVHADVEVDGTVSELRHPLLHFTFRNVDQYWPKIRRYTDWGSSQAYRDGQRSSLYQLVARPVGRFIKMYFLRLGMLDGTRGLVICTISFFSVFNKYAKLWEKDLDTSGLHGTVKTGSSSE

SEQ ID NO: 3121 - protein, 255 aa, Mesocricetibacter intestinalis
MPTISVAMIVKNEARDLALCLDTVKDWVNEIIILDSGSSDETESIALSYGAKFYRNTHWQGFGKQRQLAQQYVSGDYVLWLDADERVSPALRESILQAVAQDRADTLYQLPRLSEVFGRKIYHSGWYPDYVTRLYPTKLARYGDELVHEKVHYPAGAEVKKLSGDLLHYTYKDIHHYLVKSAAYAKAWAEQRHAQGKSAGLAEGVFHGLGCFVKMYLLKGGFLDGKQGFLLALLSAHSTFVKYADLWLRTLVQKN

SEQ ID NO: 3122 - protein, 255 aa, Bradyrhizobium sp.
MAAAPTQTRPSRVACTIIAYNEADRIERTILSVVGLVDEIVVVDSGSQDGTVALCEGLGARVIHNPWAGFGPQKRFAEEQASCDWILNLDADEWLSDELRAELADILSRPLPQKRCFRVRILVVYPRRERPAPFAYFHNYVRLYNRATARMRDSLTHDEVAPTDDVVQLKGGVLHRSYRDFAHIVTKTIGYYSLQRQEGIKPSGVGVARLIWEFPFQFFRYYFLRRHIFGGADGFAYAVALSMGRWARIFILKGW

SEQ ID NO: 3123 - protein, 280 aa, Silicimonas algicola
MPDNAVPRIPCTVVIPARNEAAALPEVLSRLSRFAEVVVLDSQSEDATAEVAEAHGARVLQFAWDGRYPKKRNWFLLTHPPATPWVLFLDADEFVDAAFVEALARAIRRDDVVGYWLTYSNSFLGRPLRHGVPQRKLALFRVGAGLYERIEEEAWSGLDMEIHEHPILEGRTAEITVPIEHRDDRGLAQFLRKHIDYAAWEAKRTAALAGDPLAWEALTGRQRFKYRHIGAGWYAMFYFVYTYVVKLGVLDGRAGYHYATYKAWYFRTIRLLLREQSRTK

SEQ ID NO: 3124 - protein, 256 aa, Polaromonas sp.
MASLSVTVITHNEAHNIEACLRSVSFADQVVVLDSGSTDDTVEMARSLRAEVSVSPDWKGFGIQKNRALALATSDWVLSLDADERVTPELQVEILACLKAPAFDVYAFPRLSSYCGQYMRHSGWYPDRVTRLFRRNAARFSDDLVHEKVIFQGQQGQLQSHLLHESFRSFEAVLDKANRYSTAGAQSLLSRGKTASVGKAIGHGLWAFIRTYFLRLGFLDGKMGLVLAISNAEGTYYRYLKLWLLQRDGKGAPGAQ

SEQ ID NO: 3125 - protein, 271 aa, Unknown
  Description of Unknown: Acidobacteria bacterium sequence
MYGTLVRTSMPAISAILITCNEQSDLPEALESLRGIADEIVVVDSGSTDRTCEIAQSLGARVVSRPFTNFGEQKNFAAAQAAHDWLLSLDADERLSGELRGSIAAWKQSEPEYAAYQMNRKPNYLGGWIRHSGWYPEYCVRLYRRDCARFVGALHESVQVNGRVGRLRGELLHYTIRSLREHYAKMEAFTTRAAEDLYARGRRHWRCGMCLAAPWTLLQRFFFQLGFLDGYRGALIAWTSARYVWLKYRKLGVLVRGGKLEARVWPQARDV

SEQ ID NO: 3126 - protein, 250 aa, Pseudorhodoplanes sinuspersici
MPRLSAIVITKNEARNIEACLESVAFCDERIVVDGGSNDNTAALADAKGARVTVAEEWRGFGPQKNLALSLATGDWVLSLDADERVSERLADEIKRAVAAGGADGYEMPRLSTFCGKPMRHSGWYPDYVLRLFRRGHARFSDDLVHERVICDGAVRRLSEPLTHHPVERLEDSLSRMDRYSTARAEMIVSSGRRVSFFTGILRGWWTFIQTYFIRLGFLDGREGFLLAVANAEGTYYRYMKAWLKERGRG

SEQ ID NO: 3127 - protein, 249 aa, Deefgea rivuli
MPRIGVAIITKNAAAHLDECLKSVAWAQQIIVLDSGSTDATLEIAARHGVEIHQTSDWPGFGIQKNRAIALLNTDWVLALDADEVLSETLINSVQSAINSEAAAPVYRLSRLSNYCGRWIKHAGWYPDHLPRLFQRGAAQYSDDLVHERLIYQGDAPLLAGELLHFSFDNLDDVLDKINRYSKAGAQQRQSRGESSHLGKAIYKGLWTFLRTYFLQRGFLDGREGFILAVSNAEGAYYRQLKLMYLNEN

SEQ ID NO: 3128 - protein, 288 aa, Unknown
  Description of Unknown: Gammaproteobacteria bacterium sequence
MVPAYSPRPVDCGVLAMNNNEQTPLAGQQHRPYSISVVMIVKDEVENLQISLPAVADWVDEIIVLDSGSNDESKSVAEKYGAKWFVNTDWQGFGKQKQLAQSYARGDWILALDADEAVSPELKESILSVSKDKPGDKVYGFRRIDYIGRYCIDNPKWILPLKTYWRLYPNHFTYNDNNVHESLDISRASKTLSLQGYLNHHTAFDYSHWLNKRVKYAIIWAEEKHSHHKKTNIFSIIGHSFWAFVKTFIIEGRFLLGGKGFLYSSLFAQYTFNKYVVLYDLNRRGQKE

SEQ ID NO: 3129 - protein, 248 aa, Pusillimonas soli
MSLSVIIITKNEAAHIGACIDSVDFADEIIVVDSGSTDGTREIAQAHGARVTLTSDWPGFGPQKNRALDLARCEWVLSIDADERVTAELAQAVQRAMASPAADAYRIARLSRFGDRWIRHSGWWPDYVIRLFRRGTARFKDVPVHESVLAEGAVSTLDGHFLHYPYADLESFIAKINHYSSVAAGMMHARGKRTTALGAWGHATWTFIRIYVLRRGFLDGREGFILACMAAAGSYFRYTKLLFLNRRG

SEQ ID NO: 3130 - protein, 256 aa, Oceanospirillum multiglobuliferum
MPTIAAVLIVKNEEKNLAACLESVKWVDQIIVVDSGSTDKTAEIAAQYRAEFYSHNDWQGFGIQRQRAESYVKTDWIFVIDADERVTPELKNSLQDCIKAEKCIGSIARLSWCFGRFIRHSGWYPDRVLRLYPTNAASYNSALVHEKLENPNGLPEKKLQGDLLHFTYDNMRHYLIKSAQYAEAWAEGRAKKGKTTTLSNGVLHALGCFVRMYLIKAGFMDGKAGFLLALLSAHSTFVKYADLWLRTKTTTKNEQE

SEQ ID NO: 3131 - protein, 249 aa, Acidaminococcus massiliensis
MGTCTVAILTKNEERHILDALASARPCADQLLVVDSGSTDHTVSLAREAGAAIAFREWDNDFAAQRNFALSQAKGDWILFLDADERLTPELAEKINTIKAGSLDHQYSFRRINIAFGHEFHHGAFSPDRVKRLFPREKVCWVGKVHERPECLLPETKLKEPLEHYTYDTFAQWWNKAGHYTTLWAEEAYGRGKVATAGTAASHALMGMVKAYVLEGGFLEGSMGFVAALQHGIYTAMKYMKLAEICRKK

SEQ ID NO: 3132 - protein, 268 aa, Rickettsia canadensis
MTKISAFIITKNEAARIARAINSVKNIVDEVVVVDSESSDGTVSIAEELGATVVIKPWLGYVGQKSFAESLCIHDWILNIDADEELSKDLQDEIEYIFVSGNQDHYLAYKIKLLIMHRDDRKPRMFAPFNKCIRLYNKKFASFANNVNSTTHDSVVFNKDVDFTNKVYLLNEPAYHYSGISIEQLVTKANFYSSEQAKDLMVQDKKVSNIRIATEMLWWFLKAFFIRRYFVFGFDGFVDSMIFAFARFLRLAKLRDKTKNNYERKFSR

SEQ ID NO: 3133 - protein, 267 aa, Unknown
  Description of Unknown: Candidatus Parcubacteria bacterium sequence
MISVIILTKNEKERIHACIESVKWADEIIVIDSNSSDNTTELAIKNGAKVYTRTFDNYANQKNWAMGKASGEWVLYLDADERVLFGLKEEILSLINSTDCSAFAISRRNIILGQEKKYGPFWPDWVIRLVKKDYFQNWVGEVHEHMEFKGKLGYTNNSFLHLTHRNVEQIILKNLHWSKIDAKLRLEVCHPEMSGWRFLRILFSELFYQGFIRRGFFNGTVGTIDALMQTFSLVTTYVRLWEMQQSKSLDKVYRDVDSKLIKDDFKF

SEQ ID NO: 3134 - protein, 259 aa, Pantoea sp.
MSARQPLSVVLIVKNAADLLPECLASVDWADEIIVLDSGSSDGTPQIAARHGASVFHSKEWHGYGKQRQLAQSYASHPMILMIDADERVTPPLRHAIEEALQKPSATIYSLGRRNLFLGRFMRHSGWYPDRVIRLYPASYHYNDHLVHESLDTRGAPVTPLKGDLLHLTCRDFSAFQWKQFTYAEAWAKQRHHQGKKCTMFAIFSHTLAAFFKTLVLRAGFLDGKQGWLLAVVNAQYTFNKYTALWALNHSSHASKGGL

SEQ ID NO: 3135 - protein, 257 aa, Agarilytica rhodophyticola
MERQKLSCFIIVCNEADRIEPCLQSLAGWVDQLIILDSGSTDGTVEIAQRYTQEVYQTDWPGFGPQRNRALAKCRYDWVLNIDADERMTEELRDEIDKTLSQPHLNANLIQIPWRTFLFGKALRFGRYSSPQGKLFKREGVAFKDRQVHETLLIPNEVALTLKAPLLHFSWRSYQHVQEKHLKYACLLAQQKFDAGKRSSIKMAVIRFFLDFLQQYILRLGFLDGWRGFLMAVILGQYAFHKYAALVALQNKDSDAK

SEQ ID NO: 3136 - protein, 372 aa, Unknown
  Description of Unknown: Oribacterium sp. P6A1 sequence
MIINLVMIVKNEERCLARCLEAASPFVDHIIIADSGSTDRTLEIAEGFGAKIYSFPWENDFAKARNFALGNSERDWNADINLVLDADEYLIQDENCNPKALRDFIDHMYDKQGMRWLGNIRREDSYPNGDEIDRSITEIPRILPAEMRYQGSIHEQVNAKVVHKLSPLYALHDGYMQKGKGERNFKYLEEALKKEPNYPYYNYQMAITLRNLNKKEESLPYFRNFWRYSGKKEIRQSAYWTDGIMRYLYTLYDIDTENSLEEAHDIMSKVQYDFTRNPDFYFYSGLFYMKLVLKNTEKYKDLLPYIEKSYLKCLDLGEVSRPEGVIGTGSFKAAYNLGTWYEVSGNLDKARHYYKMAADEGYEKAAERLKNL

SEQ ID NO: 3137 - protein, 231 aa, Cronobacter sakazakii
MSWADEIVVLDSGSSDDTVAVATAAGAKVFTESDWQGYGIQRQRAQQYASGDYILMIDTDERVTPELAQAIRQVLEQPDPQAVYSIARRNLFLGRFMRHSGWYPDRVTRLYARERYRYNDNQVHESLDAPGARVVTLSGDLLHLTCRDFASFQRKQLNYATAWAQERHQQGKKVSVPGIFGRTLAAFCKTLILRAGVLDGRQGWLLAVVNAQYTFNKYTELWALNRGFTER

SEQ ID NO: 3138 - protein, 257 aa, Comamonas kerstersii
MARLTIGILTMNEERRIAACIDSAAFADQIIVVDSGSTDTTVEIAKAKGAEVYVYADWQGFAVQRNRILRHATGDWVFFLDADEEVTPALAQEIRSIVDANQQGVWEVAWEQIAYGQSLGRMRSSGGIPRLFPREQIVQFEGVVHEGAKLKTPTLPVKLMRNRLPHYSRETIYGSLQKLAQYVQLGAYKRLQAGKRGGVFRGMGSAFANFIRLYIFHRGFLCGRAGFLHSFLVSLECFFRYVALEIDRDYLKDAKKR

SEQ ID NO: 3139 - protein, 670 aa, Quadrisphaera granulorum
MASPSSPEAHLTLVLIDSAGPEALVRCAQQALRTGSEFSLVLVTANTSSVPAAVGRRARVVRSSTTELEAVAAQEASRSALVVLAPTSTAFSRGWTDEVRARAAMHSQAISVYGAYGRSVLVVPAEVTDTHGTRLTWIDAACLRLRGHATGGARRQTLGAVMIVKDEEDVLDECLTALKPFVDEVVVYDTGSSDRTVEIARSHGVKVIEGYWNDHFGDARNRALEHATCDWVLQIDADEVITGDIEALRRQLDTEVHDQVSLTIVSTNYRGGTTGMETQPARFFRRNLYRWTGALHEYPDALPGVTIRGMSPQHSAIRVLHSGYQQERTESRDKTSRNLALATKELMEASADDPARAVKLSNQGRSLMWAGKVDEALRVFEELRSTQGNPTSIVSGGRAAMEGLLGTNRLDEVEPWLKVMADNGESAGNLAFFRARRHLALNEHREALECMEDVKGGRGGTDTWGTPFDTTRIDVIEAAANVALGEPARAAELLVELVRTSPAAVPFDLLVRAVSLAGRPLEDAAVVASHEFIERTIREAAAQHPLLALAWFEALFTTHPEDPRPVVAGNVFAVRAGWRVALVWAMRALELGLSDVNALTTMAGDAAMPLHDRCMASALLAQYFSQAAMFDRFEQLTQEASSSTLDTLVVDLREIGVEVSSIGSESAVGS

SEQ ID NO: 3140 - protein, 254 aa, Unknown
  Description of Unknown: Acidaminococcus sequence
MGTLTAVILTCNEAKNIRGVIRSAKLVADQVLIVDSGSSDETVALAEKLGAQVIYRAWDQDFAAQRNFALTGVSCDWVLYLDADERLTAAAVEKIKAIKAGPLDHQYSLERINIAFGHEFHRGAFGPDRVTRLFPAGQVRWEHKVHERPVCPLPLTALTESLRHFTYDSFQQWWDKAGHYTTIWARDAFEQGRRATAAQAARHALGGMFKVYLLEGGILEGSMGFIATLQHGIYTAMKYMKLVERGSLKKKEKS

SEQ ID NO: 3141 - protein, 248 aa, Halomonas songnenensis
MIVKNEAHHLRECLETLAWADEIVVLDAGSQDDTCAIAREYTENVSVETDWQGFGVQRQRAQALASHEWVLMVDADERVTPELRASILKAIQQPPAVYSASRLSWCFGRFIRHSGWYPDRVLRLYPRTQAVYNAALVHEKLDVPEGLAVKRLSGDLLHYTYRDLRHYLEKSAHYAQAWAEQRAAQGKTATLGSGVTHGIACFLKMYVLKAGFRDGKQGFLLALLSAHSTFNKYADLWIRTRTSPVEKR

SEQ ID NO: 3142 - protein, 259 aa, Pantoea allii
MTSTRQRLSVVMIAKNEAELLPDCLASVHWADEIIVLDSGSTDNTIALAREAGAQVYQATEWQGYGKQRQRAQSFARCDMILMIDADERVTPALRRAIEQVLDAPPGRTVYSLSRSNLFLGRFMRHSGWYPDRVMRLYPHTLRYNDNLVHESLNTEGAPVKVLDGDLQHLTCRDLMAFQRKQLAYAEAWAQERFLRGKACSLFSVFTHTLGAFIKTLLLRAGFLDGKQGWLLAVVNAQYTFNKYAALWALNNASAKGRT

SEQ ID NO: 3143 - protein, 251 aa, Burkholderia paludis
MVITKNEARDIGACLASLRPWVDEIIVFDSGSTDGTQTICREYGAIVHETDWPGFGAQKQRALDQARGTWVLSIDADERVPPELRDEILACIESPGAELYDLPRRSNYCGTWIRHSGWSPDYVRRLFVRGRARFSDDLVHERVIGNDDARCARLATPLLHYTYRDLSEVLGKIDSYSSYGAAQKVARGKSGGLRRAVLHGLWTFIRTYVVKLGFLDGRMGFILAVSNAETSYYRYLKMMLLGDDRGNHPQA

SEQ ID NO: 3144 - protein, 258 aa, Pantoea conspicua
MPTRQRLSVVMIAKNEAELLPDCLASVSWADEIVVLDSGSEDNSVAIATQAGAKVYRNDDWQGYGVQRQRAQQYASGDMILMIDADERVTPELRAAIEQVLIAPPSRTVYSLGRSNLFLGRFMRHSGWYPDRVMRLYPPTLHYNGNLVHESLNAEDAPVVALKGDLQHLTCRDLVAFQRKQLAYAEAWATERHQRGKRCGLFSIFSHTLGAFVKTLLLRAGFLDGKQGWILAVVNAQYTFNKYSALWALNHASAEGRA

SEQ ID NO: 3145 - protein, 267 aa, Unknown
  Description of Unknown: Cytophagales bacterium B6 sequence
MVPVSVVIITKNEAAFIANCIKMACLITDDIIVVDNDSSDSTPQIAADLGCRVYKKNWSGYGANKNKGIAKARHNWILSLDADEVPDHELVEAIHHLKLDNPNVVYDIRFKSYFGRKLIRYGNWGNDHHPRLFNRRLVKWSETEVHETLVLPPAAKIVKVSGYLHHHSVTDTDDFNTKAVHYARLSAAKYFKAGKKATFFKLHFSALFGFVRNYIVRLGFLDGAEGLAIARISYKNTRLKYRYLKQYETKPATGENVYRNDLVVERV

SEQ ID NO: 3146 - protein, 254 aa, Hoeflea sp.
MKPTISAVIITRNEAEMLPGLLESLTFCDEIVVVDSHSDDATRDIAASFDAKVITRDFNGFGDQKEFARAQAGCDWVLSMDADERVPPSLAEEIVSTLADPAFDAYQVPRLSYFLGKPFRHSGWWPDAPLRLFRRDAARFNSKLVHEFAETDRPTGTLSNHMDHFTVRSLEQALAKGQHYSALGAQQLEKTGRRVTLLSPFGHAAGAFVKTYVLKRGFLGGVEGLVNAWIHGQTVFWKYMIVYVNRRAELRSRR

SEQ ID NO: 3147 - protein, 252 aa, Marinomonas alcarazii
MSTVGVLLIVKNEGKMLAKCLSSVASWADQIVVVDSGSDDNTIEIARSFTSDVYVHSDWPGFGKQRQIAQSYINTDWVFAIDADEEVSEALQQSILAAVKLNEPVLYRLDRLSSAFGKRISHSGWSPDWIVRLYPREFASYNDALVHEKVVSDRSLGSKKLSGHLYHDTYSSLAHYSAKTTGYLKAWADDREGKKSSSVSKAISHALSCFIKMYFVKRGFLDGRHGFILAWLAAHSTFYKYIDLWLREYQKK

SEQ ID NO: 3148 - protein, 251 aa, Pusillimonas ginsengisoli
MTLSVIIITKNESDNIGDCLASVSFADEIIVVDSGSTDGTRDIAASLGAKVALTTDWPGFGIQKNRALDLATCDWVLSIDADERVTPELADAIGAAMADPTADAYKIARLSNFGGRWIRHSGWWPDYVLRLFRRGTARFKDVAVHESVLPQGQVAILKGHFLHYPYADLESFIAKINHYSSVAAGMMHARGKKTSALGALGHAIWTFIRHYVVRRGFLDGKEGFILAVMAGAGSFFRYTKLLFLNRRQQSE

SEQ ID NO: 3149 - protein, 260 aa, Sulfuricaulis limicola
MAEPSGTRLPVSAVIITRNAASCIEPCLQSVSFADEILVVDSGSTDATLEIARRHGARVLHQDWLGYGGQKEFATRQAKHDWVLSLDADERVSDELRESIREALAAPNFQACRMARRNRFMGRWLRHGEGYPDWSLRLYHRGHARWSDDPVHEKVETGGKIITLPGDLLHESEQGIADYLEKQNRYTTLQAEAMHRAGRHANPLKLLLSPVFRFIKFYFVRLGFLDGVPGLVHISIGCFNSWCKYAKLIDLRRRENRKPD

SEQ ID NO: 3150 - protein, 257 aa, Aeromonas schubertii
MKPTLAAVLIVKNEAENLRACLATLQGVVDEIVILDSGSQDETAAIAAEFGARFFVNNQWPGFGRQRQLAQSHVQSDWVLWLDADERLTPELAQSIRTVLENPPADTLYTLPRLSWVFGRFIRHSGWYPDRVLRLYPRALTGYNDALVHEKVEVRANMKVVDLSGDLLHYTYRDLEHYLVKSAGYGRAWADQRQARSKKSSLGQGLLHAIGCFMKMYLLKAGFLDGRQGLLLAILSAHSTFIKYADLWIRHQPQRPE

SEQ ID NO: 3151 - protein, 255 aa, Unknown
  Description of Unknown: Proteobacteria bacterium sequence
MSNRLPISCFIIAKNEADRIGRAIDSVREFVDEVIVVLDPSTTDETAEVARRHGAEVVTNAWAGYGPQKRFGEDRCRNTWLLNLDADEAVTPELRAEIVGLFANGEPQADGYKIAIVDLFPGEERPSRFAYRLSPVRLYRRDRGRYADSPVHDRVAFSPDARISRLKGIIHHRSIRSLGDQISKLDRYSTMQAEDFVARGRRLPTVRVYGEFPAAFLKAWIGRRLFLRGTYGFLIAMNYAIFRHMRVAKIYEKMK

SEQ ID NO: 3152 - protein, 275 aa, Mucilaginibacter pineti
MATVSVVIITKNEAEMLNRSLAMLRQISDDIIVIDNDSTDDTLTVAASNGCRIYPKNWDGYGANKNKGIQLAKHDWILSIDADEIPDAELLNTIALLQLDDNKTVYDIPFRSYYGSKLIRFGTWGRDHHIRLFNRIHVKWTEPPVHETLLLPKKSTVKKLTGHLHHYSVSNAKEHEAKTLLYSRLSAIKYLQSGKKAGVVKLYIAPLFHFVKIYVILLGFLDGKEGWNIAKMAFKNTWLKYHYLNKALHQHHPQSTYQHELPVMAYKFNADARVE

SEQ ID NO: 3153 - protein, 290 aa, Oceanicaulis sp.
MNEQTNTQAEPQRDIPVSVIIMTKNEEANMQACLSRLTRFEQVFVVDSDSTDRTCEISKAHGAEIVNFSWNGQYPKKKQWCLENLPFRHDWVLYVDADEHLYPELADEIAALLAAGEPEHAGYFVRFDGFFMGKILRHGHFNLKLVLMRRDKARFIDVEDLDVASMWEVEGHYQPVIEGTVGQLRGRMLHRDFKTLYHYFERHNRYSDWEAKLRLRDALSQPDEAQLPGRRTLKYIFDRLPAKGVALFIFNYFVRLGLLDGWAGFNYAMSRSIYYWQIEMKMTEFTQNKE

SEQ ID NO: 3154 - protein, 261 aa, Microvirgula sp.
MTPFLSVILITKNEAAHIDACLDAVAFADEIIVVDAGSSDDTVARAEAHGATVTVTGDWPGFGPQKNRALDLARGQWVLSIDADERVTPALAAEIRALLAAPAHDAYRIPRLSSYCGRFIRHSGWWPDPVLRLFRNGRARFSDVPLHESVQFDGSPGMLSQPLLHYTYPDLDSAITKMNRYSSDAAAAMFARGKRASLPGAFGHGLWTFIRIYLLRRGFLDGREGLLLAVGAGIGSFYRYAKLSLLTRPRQLPDENSRTRL

SEQ ID NO: 3155 - protein, 265 aa, Tepidimonas taiwanensis
MPLPTRGTRPTLCVGILTLNEERRIKSCIQSAAFADQIIVIDSGSTDRTAALAESLGAEVFHYPDWQGFGVQRTRLLQHCRCDYIFFLDADEEITPELRTELLRFIEQHPKTIGEIVWQQVAFGAPLRHMLARGALPRLFPAAEVVAFEGAVHEGPIMRNPRLPRRRLKSPLLHYSRETIHDSLRKLTQYSMLGAAKRKEAGRRGGIWRGLGSGLAIFARIYIFRLALLDRGPGFLFSVFVALECFFRYVALEYDREHLSNDVKR

SEQ ID NO: 3156 - protein, 293 aa, Unknown
  Description of Unknown: Candidatus Woesebacteria bacterium GW2011_GWB1_41_10 sequence
MSMAKLSVVINARNEEKNLPKAIGSVKDLAGEIVVVDMESEDGTAALAEKLGAKVYSHKNVGYVEPARNFAISKATGDWVLILDADEEIPGHLAGVLKATLEESNPADYYRISRKNIIFGKWVKHTLWWPDYQIRFFKKGFVSWGDEIHSLPITKGKGTDFPAKEGLAITHYNYNFLDQYIERLFRYTKIQAEELLKAGYVFDWKDVVKKPLNEFLRRFFEGKGYKDGVHGFILSLLQSFSEFVVYVRVWEKQGFKEAEIGKREFGRELGGAIKDLKWWIRKEFSWMRFLMSR

SEQ ID NO: 3157 - protein, 272 aa, Unknown
  Description of Unknown: Flavobacterium subsaxonicum WB 4.1-42 = DSM 21790 sequence
MSKIPVTVIIPVKNEELNIVHCLKLISGFDQIMVIDSNSTDNTAKIAAEHGAEVHQFTWDGQFPKKRNWVLRNLPIRNEWVLFLDADEYITDAFVAEIQQAIKNPDYNGYWITFINYFMGRQLKHGDPFKKLPLFRVGKGEYEKIKEDSWSHLDMEVHEHPIIEGKVGQLQSPIIHNDYKGLEHYIAKHNAYSTWEAKRFVALEKEGFGNLTKRQKFKYSLMQSGFLPIIYFIGAYFLKLGFLDGKQGYFFAKYKSYYFLQIQTKINELKKI

SEQ ID NO: 3158 - protein, 269 aa, Thiomonas sp.
MTASPRPTVSAILITRNEAHNLPECLAGLAWCDEIVVLDGGSDDATVAIAREHGARVEIAADWPGFGLQKNRALDLARCDWVLSVDADERVTAELAAEIHAAIARPDTPDAYSLPRLSSYCGQFMRDGGWYPDRVVRLFRRGTARFSQDIVHESVQAGGRIGELQHDLLHISYRSFDDVLDKMNRYSSAGARKAAAKGKTGSLLAALAHSRWAFFRAYVLRLGFLDGRLGFVLACSMAHETWYRYIKLWQLQRTETPFAPEASSNASQG

SEQ ID NO: 3159 - protein, 270 aa, Comamonas sp.
MTDSPLGGAPASRKLTLTIGILTLNEEDNIEACLRSASFADQVVVVDSGSVDRTTAIACGLGAQVFRYEDWQGFALQRNRLLSHAKGDYVFFLDADETISPAFREELQAIVQGGEEAIWMVRWRMVAFGKELRYLRSTAKVERLFWRGLLREYTGVVHEEAQLSRANVTRHLMRTPLLHHSRSTVHTSLEKLTQYAMLGAAKRAEEGVRGGILRGMASSIAMFVRLYFFHFGILCGGAGFLYCVFVALESFFRYVALAYDRPYLSGDVRR

SEQ ID NO: 3160 - protein, 250 aa, Halomonas sulfidaeris
MPINVSVVIITRNAASTLRRTLDAVQCYDEVVIYDNGSSDDTIQIAASYSNVTLQKGDFLGFGPTKRHAVSLAKYDWILSLDADEAPSAELIESITSWVNSASPSDLGEILRENWMMGQPVHYSGWGNDWLIRLFNRRSHNFNNAMVHEAISVSSISRVQRLSGTIKHTAVTDLSQFLEKINRYSNIRAESGELKRYSVLVIFLKAVFAFLRTYFLQQGWRDGWRGLVIAVSNANGVFWKYMKNSLKAKH

SEQ ID NO: 3161 - protein, 303 aa, Natrinema versiforme
MKYVYDHLLDHVKTTLSNREASNQPTRHRSPEDLETLPVSVCLTTKNNADTIRDCLESVVRWTDEIVVVDSDSQDGTVEICEEYGANVYQHEFESFAQIKTQAMEHADNDWVFVLDADEEVPPELRDEIIDAFGTVGVVAFYMEKQEHMMGARTNQYHYKRPYLARKDILYFEHEYIWERLSVQQPYRERTKTLSNRIDHYRFERASEIESKIMQYSALEAVQAVESGNRNGFLSFLLRGIAVGLDRLIISGAALDGYRGFFVAFLEFYQMIAAYVKVQDIHRLQEEHPEQWKDIWIEEECRR

SEQ ID NO: 3162 - protein, 822 aa, Selenomonas bovis
MARPRAAGHRTPGRAWNVWRKAGETRRSMEDANRIAYITCVSDEEMYAACRQALARQQLPEGMEAEFVPIRGAQSMCAGYQLGQERSRAKYKLYLHQDCILQRADAVKRMLSVFAHYPKAGLVGLAGARKLPEYGMWWLGEELYYYLAEQTGDTIQLHAAGTTEGAEALEVAAVDGVLMLTAVDIPWRSDIFTGWHFYDISMCMEMRWRGYEVYVPNQEQMRPWALHRTRNRRLPDVYFAWRQTFLDHYGQKDPEIAMFSVNHDASLHPRLSVCYIVRDGARELSLSLARLQGEADEIIVVDTGSSDATAEVARSFGARVYAYAWDDDFAAARNLALEKATGDWILILDADEHLPAVHGSLHHSVVRAAAGGAEALTVTLVNVDLDAGGRETPPEPLLRLWRSRPGRRYTGRVHEAIGDHGAPLAPLGEAREIVLRHTGYSEARAKEKMARNLVLLQRQIEERGERDTDWRYLADCCYGLEEYELALHYARLAIEKGARTLAGPARMYEVAIASLAKLDRPTSERLALARQAAAACPAEASFAREAESAAAQCEAEAWYAAQAERDDASLSAAAEAWSAAAEQPETRRSFLAAWAGETGRVRLCMALDGARRGAASRLVEEMTVGEALSAAPIVRQASQSICDLFLSLYLLSGTREGQRQLLAEEWPERLPASFTRLIYALCLLGHEDRAAGCPSLTAADFAAWSLGLGMIARAAASAGLTRYARLALDFAPDWACVTRAADALLARQDWQDALLLLSAVPEDAAAESACGHFWYATGRALYHLGQSGAAECFARAEAAGCTERALSSYQAWSEEAEHGTEA

SEQ ID NO: 3163 - protein, 265 aa, Unknown
  Description of Unknown: Betaproteobacteria bacterium sequence
MYTESPEVSHKVSRPLSRQTLSAVIITKNAANQLAACLESVSFADEIVVVDSDSSDGTAELAALRGARVLRKEWLGFGAQKQFAVEAARHDWVLCLDADERVSEHLRASILAQLAAPATQAYAMPRRNRFMGRWLRHGEGYPDWSLRLFDRRHARWSDDPVHEKVLTGAPVARLEGDLLHDSAETLEAYLDKQNRYTSMQAVALFKAGKRAGVAQLLLSPVLRFAKFYFLRLGFLDGAAGLVHIAIGCCNSFHKYAKLMALQRGG

SEQ ID NO: 3164 - protein, 280 aa, Leptospira biflexa
MTSIPLSCAIITLNEADNLSRTLKAISFIDDIVVVDSGSTDETVTIAKSFGVKVYNRPFENYADQKNFAISKTKHDWVLAIDADEVVSPNLKTEILDLFSKNQLETKGYLIPRLTFYLGKWIRFSGYYPNYQIRLFHKSEGQFSGGLVHERVKLSSKPHKLKNPLFHYSYKNISDHLKFIDRYSSLFAEEEYRKGKRSSVLWAFVKGCFKGFYMYWIRLGILDGKQGFVLALLGFYYNFLKYLKLYEKSNSVPSFFVMVDSIHDVKGKKSTKKNSDQIHV

SEQ ID NO: 3165 - protein, 346 aa, Unknown
  Description of Unknown: Chlorobi bacterium NICIL-2 sequence
MDSQIPTVGVAMIARDCAETIARALCSVRTIARQIVVLDTGSHDRTPTVAARLGAEVYFHPWRNDFSDARNLALDYLRTDWVLVLDSDEELDGESFRAHCPNLADPMIGGVELTIVSALEGGITTAEHRYTRLFRRHRDIRFEGAIHEQIAASIQRAGFEIARSQVRILHYGYQTVQPEKIERNIALLHAELERQPDSPWLRYHLGLAYFAAGKFDSAAALLAPLCTCPELSAEQRELARLRAAQCALAQDRLLEAEQLLEMPCNDSHHEGLRRFIVAGVLAARRKFASALEALEHPSTCASGLVNQLQRERFCEHLRALGATQRLQARTLFPLGQSHAEWQTLFR

SEQ ID NO: 3166 - protein, 283 aa, Streptomyces pathocidini
MRKLPVVVAIPTKNEAENIARTVASVIGHFEAVVVVDSDSTDDTCAIAKSQGAEVVPYAWDGRYPKKKQWCLDHVHTGTPWLLFLDGDETPSPALLAELRRIFSQPVSAAAFDIPLGYWFAGRRLRHGHTIVKRALMDRTRCRFPVLGDLAAPGMGEQEGHYQPLADGPVVRLRSPIEHEDLDPVRTWFDRHNRYADWEAWLEHHPQVREEIRLAKTRQGRLFHKAPLKPLLSFAYAYVYRRGFLDGRAGLDYALAMTFYRWQIALKARELSRLTSSPTGRSR

SEQ ID NO: 3167 - protein, 265 aa, Unknown
  Description of Unknown: Deltaproteobacteria bacterium HGW-Deltaproteobacteria-2 sequence
MKLFSEEKYLEKIPLSIAIITKNEEENIRSCLQSISFADQIVVVDSGSTDRTLELAAEFGCEIYPEGWHGFGRQKQLAIEKCRLPWILVLDADERIPSETADIIKQIVIDPDVEEAGFSFPRKNYFQGRWIKHAGWWPDRIIRLFRKEKGRMTSAQVHEAVEVIGIVGELNVPIEHYTESSLSKIIQKIDKYSTLGAQEAFKGGKHSSVFSAFMRALFTFNQDYFLRLGILDGRQGLTLAVTDAVNKFFKYAKLSELVKINRGGR

SEQ ID NO: 3168 - protein, 529 aa, Unknown
  Description of Unknown: Cardiobacterium valvarum F0432 sequence
MYRLSVVMITQNEADNLRRCLPLVATVADEIIILDSGSSDDSAAVAAQYGTQWYENRNWQGYGIQRQRAQALASGDWILALDADEAPDAVLLAALADIKKEAPASTIYGIRRLDNLFGQPIDHPRWRNKAHWRLYPCHYHYNANPVHESVELAGATTAILPGYLHHHTATSPYHWLQKRLAYAETWAADAAARGKKSSAPGAVVRGLWALLKQYLADGRFLRGRIGWVYACLFAQYTYNKYALLCDHNRRPQSYSADYQPHTVNIHNLPKSTPPATPHPHPLSVVLITQNESRHLPACLASIQGLADEILILDSGSTDDTARIAAHFDAKWHENRDWQGFGIQRQRAQALATGDYILMLDADEQPDATLRTAIAQVLTYPPEAGTVHAVRRTNIFCGTRVHGWYHDRITRLYPRAHYQYHSYEVHESLDSRDATVITLGGCLLHHTNDNLAHFLEKNLRYSREWAEEHRARRVPNLWTLPLKSLVAFLREYLVRGAVCGGGYGLFLAVSTACYHYNKYLMLAYRDKGQP

SEQ ID NO: 3169 - protein, 330 aa, Congregibacter litoralis
MRLSLCMIVKDEAFFIEECLAAAAPHVDEIVVVDTGSTDGTRDIAARYADTLLDFEWIENFSAARNAGLAAATGDWILVLDADERIAAEDYPRLREAMATTAFDGFYLTTRNYTSNTTRSDFILATPDDSMSRGYAGYALHPIMKLFRARDDIRYEGGVHEIVDGSIVDSRRGTLDAIIHHYGEANPERPKKDRALRYLSMMENEPYFKEDGRLLSMAGSAAMYFAEDYAKANRYLRRAAELGYEPSRSLEGAAEAAYRHGNYGEAQDLYRRLYDDGQRTTSLCLNLANLAVRSGDKPRAASLLEECLALGGMGPQTDETIRRNIEFLKN

SEQ ID NO: 3170 - protein, 266 aa, Mucilaginibacter sp.
MVPVSVVIITKNEATLIEDCIKMACLITDDIVVIDNDSTDGTPLIASSYGCRVFRKSWSGYGSNKNKGIAEARYNWILSIDADEVPDTELIKALHDLNLDKPNIIYDIKFRSYFGKKLIRFGNWGNDHHLRLFNRSLVKWGETEVHETLLLPPDAEIKSVAGYIHHHSVTNIDDFKRKAVHYAQLSAAKYFKAGKKASFIKLHFSPAFGFLRNYIIRLGFLDGKEGLAIARGIYKNTHLKYLYLKQYKEQPQKQGTYRNELAIEQV

SEQ ID NO: 3171 - protein, 252 aa, Paraburkholderia phenazinium
MKETTLGVALITKNAASRLAECLAAVAFADAIVVIDGGSTDGTVEIARAHGARVLQEPDWPGFGPQKNRALDALDTGWILSIDADEIVTPELAAAISAAIAAPSAEVYAVDRLSSFCGQWVRHSGWYPDWIPRLFRRGAARFSDDLVHERLVFNTPAQRLTGKLMHYSYEDFETVLRKLDTYSTAGAQQRHAAGKSGSFGKALARGAWAFVRTYVLRRGFLDGRAGFMIAMFNAETVYYRFLKLARLGARER

SEQ ID NO: 3172 - protein, 440 aa, Unknown
  Description of Unknown: Calditrichaeota bacterium sequence
MSKPSLSVCMIVKNEERFLADCLASVKDVADQIVVLDTGSTDGSADIARRFGAEVYKYEWRDDFADARNASIKYARGDWIFWLDADERLLAESRTALREALTTEKKPVVYEIQINNHTLDDANAYLSTAYRLFRNGQGIAFYGRIHEQVGFTKKQGEVRPAHIVLEHLGYALDSQTDAAKKERNQRLLERMVAEEPDNAYAHFTLGQHYNLMKRYTDGVRHLEKAREIGGLGKPLTASLYTILSETYHKLGASEQAERMARESIHLESCQVGAWFMLYQLARARQDWDEALTYLDTMAEHNRTIREKGRTLPNDVLFEDLKIDITRAEIYASAGLYGRGFEIVAGYINRGNKDNRLWRRALDFALQAERWDDAEQLATALFRQNQSDLSLLDTLGKIYIKQQRFHEATQVFEALTAQQPAHTDYRRILDHLRTLNPQPMH

SEQ ID NO: 3173 - protein, 259 aa, Unknown
  Description of Unknown: Betaproteobacteria bacterium sequence
MSSAPPPAATAPLSAVLITLNAAHSLPSCLQSLAFADEIVVVDSGSSDGTVALAEHYGARVVHQEWLGFGRQKQFAVSQARHDWVFCIDADEQVTPALAAAIGAALQGPRHHAYRVARCNRFMGRYLRHGEGYPDWNLRLFHRGHARWSDDAVHEHVLTGESVGDLAGDLLHDSAETLDSYLAKQNRYTTLAAEAAHRAGKRAGSGRLLLSPLFRFIKFYLVRRGFLDGLPGLVHTLIGCTNSFAKYAKMIDLQRRSGR

SEQ ID NO: 3174 - protein, 258 aa, Pantoea dispersa
MSQRQRLSVVMIAKNEADLLPEALASVSWADEIILLDSGSSDATIEVARAHGAQVYQADGWAGFGKQRQRAQAFASGDMILMLDADERVTPELRRAIEQVLTQPPSDKVYSLGRSNLFLGRFMRHSGWYPDRVLRLYPRHLRYNDNLVHESLETQGTPVVALPGDLQHLTCRDLIAFQRKQMNYAEAWAQERFQRGKRCSILSVFSHTAGAFIKTLLLRAGFLDGKQGWILAVVNAQYTFNKYSALWALHHTSTQGRV

SEQ ID NO: 3175 - protein, 414 aa, Unknown
  Description of Unknown: Micrococcales bacterium sequence
MARSLLSAALIVKNESAMLAGCLDSLNALRPLLSDVVVYDTGSTDGTQDIAAAHGARVHQGSWTGDFAAARNAAIGLTRSRWVLIIDADERVSADVAQLRALLRRANETAEGMTVQMSLINDAGARESTFPSVRLLDPRKAKYVGAVHEQVAPRRGKRGLRAIHTDASVISVDHVGYRAAHMPAKLARNAALADAEITKGLAAGRDLGELIQPLVDRARSLAPSDPEAAIADYEQLAAMADATSGYRLWGLEKYTELLIELGRHERAAEIIELLASAEQASDTATAWLRVQLLLATGRFERALDLLRTLNAVESTTTRMTVNNANLTFARLRAAINVGEHEEALACCLSLIVDHGRSAGLAPELIALWHDRPVQPLVQILQSAQHRTVLELATQLQGVREPGPTVAQQLAGQAA

SEQ ID NO: 3176 - protein, 269 aa, Steroidobacter sp.
MLPVTLIVIAKNEAPVIGRCLDSVPFAADKVVVDSGSMDGTADIAAAHGARVVHQQWLGFGPQRNFATGVAKHDWILVLDADEQLSPALAAELERRLPSIMESSLAGAHFRRATRFMGKAMRWYRPMSGERIARLYHRERARWSDKRVHESLQFKGAVTSFRERLLHDHNPTLVHRHIKMLRYTELRAQDWHERGRKVRMWLCPLVFITTFLKDYWLRLAFLDGWRGYIVAQTAASYAVYKRLRYYELDVDPSSAALASELLRKHGLEP

SEQ ID NO: 3177 - protein, 252 aa, Acidihalobacter prosperus
MAREPFSAVIITHNEAARIGACLDCLDFADEILIVDSGSTDGTLAIAEGRGIRVVHHDWAGFGPQKRFAVDQALHDWVLCVDADERVSEALRASIEGALTEPKAMVCRIARRNRFMGRWLRHGEGYPDYVIRLFHRDHAEWSEDAVHETVLTDDPVITLAGDLLHESEYGVAEYAAKQARYAHLQAERVRAAGGGSSWVRAVVSPGLRFVKFYVIRLGFLDGLPGLAHILLGCFASFLKHLDLVAGRRRGTD

SEQ ID NO: 3178 - protein, 258 aa, Unknown
  Description of Unknown: Candidatus Woesearchaeota archaeon CG10_big_fil_rev_8_21_14_0 _10_44_13 sequence
MQKINEGKSISAVIVTKNEEENIKDCLESIKWVDEIVIVDDFSTDKTRGIAIDYGARVYQKKWRGYSRTKNYAVSLARGPWILLIDADEVLSKGLKEEILHELGNDNNEVYRILIAEFLMGRDINGNSGEGMIRLFRKGSGRFMGEVHEKFSIDRIKVKKMRTLRNPLFHDRKRTIERLISKIDKYSSIEAEGLYKKGFRPGIIKILFSPPIYFFRSYIIERRFLKGKPGLVYSTLMSYYVFLNLAKTKEMDMKNEKG

SEQ ID NO: 3179 - protein, 263 aa, Methylomonas methanica
MLTVAILTYNEAGNLPRCLAAIPDRYPILIVDSGSSDATLTIAREHGCRIYSNPWPGFAEQRNFAMNQCDVETPWLLFVDADECYPADFYQQFDSGVLPLEDIDVLMVPSILYLREKRLNHAPGYPIYHPRLVRRETVRFVRNHTGHGEAVIDSCRIAYGELPYLHYFYHGEIIEWMHKHVDKAAQEVQLKPTAGAVMTTRGRLSVLLGRSWLRVLARFLYHYLFRAGFLDGRAGLEFALMFTWYEATIYLQAKAARQARRKV

SEQ ID NO: 3180 - protein, 255 aa, Desulfomicrobium apsheronum
MAKPEVTGLILTLNGARHLDACLTSLDFCDRILVVDSGSTDATADIAAAHGAQVLVNPWPGPKKQFELAFEHIATPWVVSLDQDEILSDELRASVIQALQDPSDMSAFLCPRTSYYFDRFLRHSGWYPDLLPRVFKLADTGVHVSGPHYGFETKGKTRRLAGDIIHYPYENLKQHVEKINYYTQIAAEEMHAKGKRAGVATAIGHGLARFMKIYFFRRGFLDGKAGFVLAVNSFFYAFQKYIRLAELGAKKTQSS

SEQ ID NO: 3181 - protein, 281 aa, Unknown
  Description of Unknown: Chitinophagaceae bacterium sequence
MIRWKDKQVSWYWLLLLSLGSRNYHHPMYNQLSVVIICRNEAAIIGKTIAAARTCTDDIVVVDSGSTDGTQAIVTSLGARLIETGWEGYGPNKNKGVAAAKHDWILSIDADEIPDETLQQELQQLSFTDLSVVYNIRFRVFLGQQMIRFGEWSNDRHIRLYNRRHGGWNNAAVHEGLVFPAETKTVTLKGYIHHYTSRNIADFATKTVNYAMLNAQKYHQQGKGAGWLKCRLAPGFSFVKNYIFRLGFLDGEAGYTVAKMNAWYTWLKYARLRELNRENRG

SEQ ID NO: 3182 - protein, 264 aa, Unknown
  Description of Unknown: Comamonadaceae bacterium CD01 sequence
MTMTQDARPTLTVVVLTLNEEHCIEQCLKSAAFADQLLVIDSGSTDATVALVQGQGAEVQVYADWRGFGVQRTRALQHVRGDYIFFLDADEVMTPAFAQELKAVVATEEKAVWKIRWRIVAFGQELRYFRATTEVERLFRRDQLQEYTGVVHEEAVLREKNVPRHSICEPLLHHTRPSVRAGLEKMTQYAILGAAKRIELNKKGGVIRGLAAGMVMFVRFYFFRLGFLCGGAGFLYCFFVALEAFFRYAALQFDREALTDEIRR

SEQ ID NO: 3183 - protein, 246 aa, Unknown
  Description of Unknown: Epsilonproteobacteria bacterium sequence
MKITANIITLNEENNIRDAIKSVQEVCDEVLVIDSLSNDKTCDIAESMGAKVVKQEYLGDGKQKAFGAPIAKYDWILSIDADERLDANAIEAIKNLDLDKSSYDAFSFARKTYVGKNFIKLWYPDRVTRLYNRTKCEYTTAGGHAKVDTDNVKALRADMLHYSYEDYAHMIKTTHKFITRGAKISYKEGKRASKFDPFTHGVGALFKALILKGGAFHGINGWNVAVISAFSSYMKYALMLEMQENE

SEQ ID NO: 3184 - protein, 252 aa, Unknown
  Description of Unknown: Planctomycetes bacterium sequence
MATVCVVVTTKNAAATLPRCLSSASFCDEIVVVDSGSDDGTVDVARSFGAKVFVRHYKNAADQKNWALQHVHSDWVLVLDSDEWLSDEAAGAVRRVVAANRPYAYRIRRVSRFLGREVRHAWRHDYPLRLFPRGSGRWDNRRVHADFLCSLPVRRLETPLYHDVAETLSAYLPRWLRHIEMAAEDLAERGGCSLLKGLLSAGWRLLRQYVLQCGWLDGRAGLYVALLSAGSVLLRHMLARDIRAAGSSAPSN

SEQ ID NO: 3185 - protein, 255 aa, Rahnella sp.
MADKKRLSVVLIARNEADLLPECLESVTWADEIILLDSGSEDATLDVARQFGAKVFTNVQWPGFGKQRQLAQSYATGDYILMIDADERVSPELRQSVENVMNNPQENTVYSLGRSNLFLGKFMRHSGWYPDRVNRLYPSSFHYNDDLVHESLNTGNSAVVPLQGDLLHLTCRDFFAFQRKQLSYAEAWASQRHQQGRRCRFFSVISHTLGAFIKTWILRAGFLDGKQGLILAGVNAQYTFNKYAALWALSHQLQK

SEQ ID NO: 3186 - protein, 273 aa, Dyadobacter sp.
MIPVSIVIITKNEALLIGECLKSAALITDDIVVIDSGSTDGTLEIARQYGCRIYQENWEGYGANKNKGVALAHYDWILSIDGDEIADRRLIRSLHNLDFDDPRIVYDIKFRSYFGKKPIRFGEWGRNHHVRLFNRSQIKWAKAKVHETLLLPKGTIRKKTEGRLHHFSVQNIFECHNKAIYYARLSAAQYAKNGNKASFLKLYLSPSFVFVKNYILRLGFLDGWEGLVIAKMMFKNTRLKYYYLKQYEQGKFVRDENLPHHQHLFLNIDPFEK

SEQ ID NO: 3187 - protein, 258 aa, Unknown
  Description of Unknown: Comamonadaceae bacterium sequence
MALSVIIITRNEADNIAACLASVAFADEVVLLDSGSTDATVELARSLGAQVHVSDDWPGFGPQKNRALQLARHDWVLSIDADERVSDALALEIRQAISRGGQGAYEIPRLTQFCGRWIRHCGWTPDHVLRLFRRDSARFSADLVHERVLLTHATATALKTPLLHYSYPTPGHYWRKLEHYSRAWAQQRHAQGQRTSMLRACLAGVVAFIRSYFFQLGVLDGAMGFAVCAMQAQGAFGKYFVLYCLNRADESKIPLPPA

SEQ ID NO: 3188 - protein, 253 aa, Thiohalophilus thiocyanatoxydans
MSITATIITLNEEENIRDCILSVQKVCDEVIVVDSLSQDKTVEIAESTGATVYRQAYLGDGPQKAFAVPGAKNDWILSIDADERLEQDTIEAIQNLDLVNSHYDGYSLKRRNFVGEHWIKAAGFYPDRVVRLYHRERAGYLPRKAHSRVEGENIARLDAHIEHFTYRDYTHWVERINQLSSRDAWAKHQKGVKVTRFTPALHATGALIRKLIFKGGIFQGQDGITVAVTTAFHAYMKYMKLIELKELSSRNKL

SEQ ID NO: 3189 - protein, 266 aa, Hydrogenophaga sp.
MAETRTPLPTLCIGILTLNEAHRIAQCIQSASFADQVLVIDSGSSDRTREIAEELGAQVHAYTAWQGFAEQRNRLLTHVQTDYVFFLDADEVIPEGLQKEIRAAVDTGDNAVWKIYWDQVAFGRTLHLMAKTEGGVWRLFRSDQLLRYEGVVHEHAVLRDPLTPVKTFQTRLLHHSRETVYGGLLKMAQYAQLGAVRRVQMGRRGGVWRGLASALSNFVRLYVFRRGFLCGAEGFLFCLLVAMECFFRYVIIKYDRPVPGPTMVKR

SEQ ID NO: 3190 - protein, 325 aa, Niveispirillum lacus
MGSAIPVSVIVMTRNEVANIARCLAPLSAFAQVLVVDSDSHDGTATIAAARGAEVVNFHWNGAYPKKKQWCLSHPSLRHDWVLFVDADECITPQLVAEIDDLMRSGPSHNAYWVNSRPVWLGRLLRHGTPYRKIALLHRRRSRFPICPDLHVSRMWEVEGHYQPMVEGQTGRLSATLIHADAKPLADWFDRHNRYSDWEAALANDGGASALLAGERGLRRVAKQVLARLPGRPLLAFLHAYLWHLGFLDGKAGLHHALSRAFYYWSIDLKRDWLAARMTASQTETTGTLLSDTRDHTAFVLSSGSPASVFTNSNVRRRTDSSGIR

SEQ ID NO: 3191 - protein, 247 aa, Unknown
  Description of Unknown: Acidobacteria bacterium sequence
MLSVVMITRDAAHLLKRTLSAVSFADAIIVVDSGSTDGTRELAEELGAKVYLQEEWQGYGHQKSYALSKAEGDWVLLLDADEVVDDTLAAGIQGAVQSKGSVAGYSMRRVNYYCGARLRFGNGRPSYVERLFQREKGRVSDHRVHERVLVDGVVERLEGELHHYTTESLSHRVLKGDTYATTAAEELHRQGEHAGVLKLLFIFPLSVFRDLILKAGILDGRSGIIMAMTGAFYSFSKYAKLWELRKK

SEQ ID NO: 3192 - protein, 258 aa, Polynucleobacter meluiroseus
MPTLSVILITRNEQANLGDCLASLEGIAQQIVVVDTASNDGTLEIAKNYGALISQPADWPGFGPQKNRALDLATGDWILSLDADERLTPALRSEILTAMHHSAGVDCFAIPRLSWFCGRFMRHSGWTPDYVERLFRRGTARFSDDLVHERLIPNGQVAKLTNSLLHYSFMNAAQVTAKMERYSTDSAKQAFLKGKKASILAPITHGTWAFIRTYILRAGFLDGPQGLSLAFANAQGSYYRYTKLRKLNQTAELESAQT

SEQ ID NO: 3193 - protein, 264 aa, Tepidicella xavieri
MPMTDGHRPTLCIGVLTLNEERRIEGCLRSAAFADQIVVVDSGSTDRTRDIAQSMGAEVYVYDQWEGFATQRNRLLAHVKTDYVFFLDADEEITPALQAEIEAAIKFPMPKVWETYWQEVAFGKPIFNLMGKKSLARLFPKSYLLRFEGVVHEHAVLLNDALPRQTFKSALLHYSRETVHDSLRKLTQYSMLGAAKRAEKGKTGGVLRGLASALPMFFRLYVLRGSFLSGGPGFLYAFFISLECFFRYAALRYDKNRLSNTVRR

SEQ ID NO: 3194 - protein, 256 aa, Raoultella ornithinolytica
MSTRLSVVMIAKNAADLLADCLASVAWADEIVLLDSGSSDNTVELARRLGATVYINSDWQGYGIQRQRAQDYATGDYVLMIDTDERVTPELACSLRRVLEAPQKGAIYSIARRNYFLGRFMRHSGWYPDRVMRLYERSRFRYNNNLVHESLDAKGAQVIELSGDLLHLTCRDFSGFQQKQLAYASAWARERHQKGKKTSLASIFGHTLGAFVKTLLLRGGVLDGKQGWLLAVVNAQYTFNKYTELWALSRGYSEKV

SEQ ID NO: 3195 - protein, 258 aa, Unknown
  Description of Unknown: Bradyrhizobiaceae bacterium sequence
MSESQEVRSRARLSAIIITKDEAANIGACLESLAFCDERVVVDSGSTDGTLMIAREKGARVNFHAWQGFGAQKNHALSLARGDWVLSIDADERVTPELAAAIQAAIGKEGMDGYTIQRRSSFCGRMMRQSGWSRDRVLRLFRRGKARFSDDLVHERVVCEGPVGRIDAPLLHHPVRRLEDAIRRMDSYSTLGAQQIIASGRPVSFLTGIVRGGFAFLRVYVLQLGFLDGAAGFLLAVANMEGTYYRYMKAWLERQKLG

SEQ ID NO: 3196 - protein, 260 aa, Limnohabitans sp.
MTHAHPTLSAIVITRNEAHNLHDCLQSMRGLVDEIIVVDSQSTDATVAIAQQHGAKVAQPADWPGFGPQKNRALNLATCDWVLSIDADERVTPALAAEIKQVLQAEASDVAYKLPRLSSYCGKFIHHAGWQPDYVLRLFKRGTARFSDDLVHERVVSEQKVDALQNHLLHYSYLNFSQVLSKVDAYSSASAKQAYARGKRSSVAGALGHGAWAFFRTYVIRRGFLDGGHGLALSISNAETSYYKYLKIWQMQQAEEAAAK

SEQ ID NO: 3197 - protein, 257 aa, Comamonas badia
MPTLTVAVLALNEARCIARCLRSAAFADQLLVVDGGSTDATVDIARSLGAEVHAYPDWQGFAVQRNRLIAHASGDYLFFLDADETMTPAFAAELQAIVAGGARAVYSIRWRLVAFGRELRRFRADTRVERLFRRDQLREYVGVVHEQAVLRETEVPRRLMRERLLHEARPTVRISLEKLTQYALLGAAKRAGGSARGGVLRGLAAGSWMFARMYLWRGGFLCGGAGFLYCWFLALEAFFRYAALYYDRDDLTAEVAR

SEQ ID NO: 3198 - protein, 260 aa, Limnohabitans sp.
MTQTRSTLSAIVITRNEAHNLDDCLQSMHGLVDEIIVVDSQSTDATVAIAQQHGAKVAQPADWPGFGPQKNRALDMATCDWVFSIDADERVTPELAAEMKHVLQTGRTTAAYKLPRLSSYCGKFIHHAGWQPDYVLRLFKRGTAKFSDDLVHERVVTEQFVVALQNHLLHYSYLNFSQVLSKVDAYSTASAKQAYARGKRSSVAGALGHGAWAFFRTYVVRRGFMDGAHGLALSISNAETSYYKYLKLWQMQQAEESAAN

SEQ ID NO: 3199 - protein, 273 aa, Rhodopirellula maiorica
MPVISAIVICRNEADNILRCIQSLDWCDEVIVVDDNSTDGTADIARNAGAKVINHPFESFASQRNWAMCQPVVQGEWILHFDADETSSPSFASAVNDAIRTASNDCVAFALCRKTMFHGAWLKYSDGFPVWIMRLVRRNTVLFEDSGHGEVPIPKIAGTLPKIDEPFIHDAFSKGLSNWVERHNKYSSYEAGHERQSEQPLMFRQIISTDRAIRRRALRGLSRRLPARPVMRFLYQYVLKFGFLDGRPGLQFCLLMAIYEWFIVLKKNELESA

SEQ ID NO: 3200 - protein, 255 aa, Unknown
  Description of Unknown: Betaproteobacteria bacterium sequence
MNAAPRAPLSAVLITRNAAAVLAPCLESLAFADEIVVVDSGSSDGTAEIARRYGARLVQKEWLGFGQQKQYAVDQAQHDWVLCLDADETVSPQLAASIQAALAAPVSPVYRMPRRNRFLGRWLSHGEGYPDWSPRLFNRMNARWSDDLVHEKVLYAVTPGTLQGDLLHDSADDLTAYLERQNRYTTLAARQAYELGRSAGFFHILMSPVVRFFKFYVFRLGFLDGMPGLMHISIGCMNSYLKYAKLIELRKADEK

SEQ ID NO: 3201 - protein, 758 aa, Unknown
  Description of Unknown: Actinobacteria bacterium sequence
MPGRTTRDRCTSTIPFSTVSQVPQTGADGTYVSRASVSVIVTASGSPEDFRACLAGLRNALGPRDEVVCVLPAGRADLSSELRGTPPVATVEDTSGDQGTRWSAGLAQTTHPVVVLLDGDAVGAGPWLDRLAEAFDDPDVVAAGPRCHRSSGPQWVDLPDEAAHSTADFRAYARHWSREHRRKITIVDRLGPVCVAVRRDALLQAGGPGPELPYQALRTTGRLVVVHDALFAHIGGDRCVLRTPAAISGEAPLLSVSMIVKDEEEVLAECLAAVRPFADEIVVYDTGSTDRTVAIAREHGARVIEGYWDDHFGDARNRSLAHCRGEWILMVDADEVASGDPEALRAYLAGTSERAVLVPLASLEGRGYTGQGALTPRLFRRADARYHGRLHEQVVDAVTGDNLIGPATSDLELAHSGYTRDRFVAKDKGARNVHLAKLAEDERTNDPRAAQNLARSLMFAGRAREAIDVCTAALAEDHGPLYRQTLLYVVVSAALALDDVDTARAAVEDLRSVSGSPVLADFVETQVRYAAGDHAGALRIIEAFPERGTDDRLMVFSRAQLAVFEILGLCELGRHRDAADRLRGYLGRGELPLDVPQTARVLEAGGTGVAELADLVPERSLRRLLIAVAEAPPELADDVLEALWRRRDGDRRILAVAARIGGQLRLIRAMEWSARLRQHGLAERCTLRALAADPQRSSRDRALAAAIAVELFADQDVLPALADALADVPDEEGPAVLDELRVFAPGIAAAIEPAPVQR

SEQ ID NO: 3202 - protein, 265 aa, Unknown
  Description of Unknown: filamentous cyanobacterium CCP2 sequence
CIHSVQWADEVLVLDSGSTDRTREIATSLGATVYEQEWLGYSAQRHKAITLAKHDWIFFLDCDEIVTPALAHSIQQVMAGSPDPQDGYSVDRQGDFYGVLLPNSSPHHRKLNFVRLFNRQYSGYDTSVKVHEEVQVAGKAILLEGVLIHWRAYMMDEYIASANRYATLEAEMLDEQGVRSNALKLLLRPIFRFLWCYVRHAEFRLGMRGLIHSCLMATSEYIRYAKLWELQNAKRVLHPPATIYSPSISSSRTSHSLYPAAGERT

SEQ ID NO: 3203 - protein, 416 aa, Austwickia chelonae
MAVPLLAAALIVKDEAQNLPECLAALNALRPLITEICVYDTGSTDGTQEIARAAGATLSQGYWDGDFARARNEAIGMTNAKWVLIVDADERVSADQAAVRRSLRAALTAANGRVDALRVPCTNVEENGSDGVLWGSDRLFRRSRAHYVGAVHEQVMRLDGKPVVFDELSPRQILIRHHGYLDEKLLSDKLQRNLQIAEDEVAALPPGAPAENLIRAYIDRARSRVGAGDTEGGLADLEVVRATPSPSKYRLHGLQQYAGWLIDLERVDQAAEIIAELAEAPIHQSHTQWLTARILFLRGRHAEALTLLRAIDKLVGATGTVDVPRPLVEARLKAAAITGEIDEAAACAVRLIADLGVVESYPRLLMTLWGDRELSVLAQILVDSDRGYLSSALPAFEELGDRGQELAGLIRKKLAP

SEQ ID NO: 3204 - protein, 253 aa, Gilvimarinus agarilyticus
MRLSAVLIVKNEADKLADCLASLDFADEIVVLDSGSDDATVAIAERYGARVTVNTDWQGFGVQRQRAQALARGDWVLMIDADERVTPELRASIEAALAGPSAIYYLNRLSWCFGRYMRHTAMYPDWIPRLYPRTLAGFDDTRVHERLCNRDNLPEHRLAGDLLHLVYDNVRHLVNKSALYAEQWAIARAEAGRTCSLWSAFGHGFSCFVRMYLLRRGFLDGGQGFLIAVVMSHSTFVKYADLWVRSRSQPHSP

SEQ ID NO: 3205 - protein, 288 aa, Unknown
  Description of Unknown: Betaproteobacteria bacterium HGW-Betaproteobacteria-11 sequence
MSPPAVPPLPAPPPLSAVLITRDAVGMLPACLESLAFCAEIVVVDSGSEDGTPELARALGARVIESHWRGFGAQKQFAVEQARHDWVLCVDADERVSPGLRESIRALFAVAAPQSGNVCPRRGIPGMQSPGTQGTSAPGFCAYRFPRCNRFMGRYLRHGEGYPDWSLRLFDRRHARWSSDAVHEKVLCTDPMGVLEGDLLHDSAESLETYLAKQNRYSTLAAEAALAAGKRAHAGHLLFSPLLRFLKFYVFRLGLLDGVEGLVHILIGCTASFAKYAKMLDLQRNRSS

SEQ ID NO: 3206 - protein, 255 aa, Unknown
  Description of Unknown: Candidatus Melainabacteria bacterium sequence
MATLSVVIVAKNEERIIGRTLDAVRDIADEILVVDSGSEDKTIEISTSKGARVVHQDWLGYAGQKNFALSLAKSDWLLSLDADEVLTPESVAEIKAIVSGETTGKCDGYKIPRILYIGEHPVRHGGFYPDAQLRLIQNGKGKFRDRMVHERIFVDGPVAVLRHPMLHYSYRNVDEFTKAMDKYARLSAEEFKQDGSKKWRANPLNELLHPMWTFFARYVLRLGFLDGKLGLEMNLIYSNYVRNKIRYLRESEGAF

SEQ ID NO: 3207 - protein, 261 aa, Paraburkholderia sp.
MQETTLGVAIITKNAAARLAECLRSVAFADQIVVIDGGSVDGTADIARAHGAQVIEQTDWPGFGPQKNRAVNALNTAWILSLDADEIVSPELAASIRAALAAPAADVYAVDRLSSFCGHWIHHSGWYPDWIPRLFKRGAARFSDDLVHERLVFDTPAQRLTGKLMHYSYEDFESVLRKLDAYSSAGALQRHAAGQRGSFGKALGRGAWAFVRTYLLRRGFLDGRAGFMIAMFNAETVYYRFLKLARLGEASRSKPGSQQRP

SEQ ID NO: 3208 - protein, 249 aa, Pseudolabrys sp.
MPRLSVIVIAKNEAANIGACLDSVALADERIVVVDGGGTDGTAAIAAAKGVRVVEHAFAGFGAQKNFALSLANGDWVFSIDADERVTPALAAEIAKAMNEPKADGYEMPRLSSFCGRQMRHSGWYPDYVLRLFRRGRARFSDDRVHERVICDGPVARLANDLLHTPVLRLEDALSRMDRYSTAGAAMTVARGKRVSFSSGITHGLWSFFRTYILRGGFLDGREGFLLAVANAEGTYYRYMKAWLAGRNR

SEQ ID NO: 3209 - protein, 252 aa, Dyella sp.
MAREPLSVVVITYNNADTLDACLREVDWADEIVVLDSGSTDSTVAIARMHGAKVEVHPFDDYGPQKQRAYDLARNDWVLNLDADEMLSPGTRAIIERALEDPSHAGFRLPRRERMFWTVQHRWSHRNGHLRLFNRKRGGMNDVEVHAAVEVRGPVKTLWGADFVNKGDGDIDTRVEKINRYSTGMVAYKLRRGQRFAGLRMVIYPPLFFLRQFVLKRYFLSGWAGFIASVLGAFYVFLKYAKLYETRRVNRS

SEQ ID NO: 3210 - protein, 259 aa, Halomonas sp.
MSLAAVLIVKNEEAHLQACLETLSWADEIVVVDAGSMDGTRDIARAFTDKVVVEDDWQGFGVQRQRAEALVESDWVLMIDADERVTPELRGSIEAAVALNQPAIYTLPRLSWCFGAFIRHSGWYPDRVARLYPRQRAGYNASLVHEKLENPERLVVKPLQGDLLHFTYRDLRHYLEKSAHYAQAWAEQRAARGKRGSLAAGIGHGIGCFLRMYLFKAGFLDGRQGLLLALLSAHSTFAKYADLWVRTRTSPPPDDISAH

SEQ ID NO: 3211 - protein, 274 aa, Unknown
  Description of Unknown: Holophagae bacterium sequence
MDVAPIPKAPLSAVLITRDAERQLERALAPLAFCSEILILDSGSRDRTRAIAAAHGAVWHEHDFEGYGPAKRRAVALASCDWVLSLDADEVLDEQAITALAGIDWAAADPRTCWSLRRRPFVGSREIRHGDWAPDWVVRVFNRRHHTVSADLVHESVTPTGPLRRLDGSLLHFTAADLAAVFRPDYYRLKAVVYRQRGRRAGAPVLALRAAVAFVRSYLVRAGFLDGRAGVVVAVAAAANAVTGLALAASETASVPGSADVDRRPAPEGGRDPR

SEQ ID NO: 3212 - protein, 253 aa, Polynucleobacter sinensis
MPTLSVILITRNEEANLADCLASLEGIAQQIVVVDTNSTDRTLEIAKMHGALVSQPADWPGFGPQKNRALDLATGDWVLSLDADERLTPALKSEILTAIHHSAHVNCFAIPRLSWYCGRFIRHSGWSPDYVDRLFKRGTARFSDDLVHERLLPDGQVAKLENPMLHYSFMDFSQVLQKIDRYSTASAEQAYAKGKRSSPLKAILHGAWAFIRTYFIRAGFLDGQQGLALAISNAEGSYYRYMKIWLIQNQVEK

SEQ ID NO: 3213 - protein, 391 aa, Unknown
  Description of Unknown: Deltaproteobacteria bacterium sequence
MQTLSLCMIVKNEAGNLERSLAPLIPFVDEAVVVDTGSDDGTPELAASLGARVHQFAWGHDFSAARNFSLEKAAGDWIIWLDGDNRVPEEDGALLKSLVQRPQDAILWATEVLEPGGGRLLQKRFFPRRPEIRFRYRVHEQLVHPPDLAQVITPVRIFHWGYETRELRQAKARRNLTYLLAELQERPEDFYLRYHLTRHHFYAGELEEAWGQLQMVLATPWLENQNPEIARHARLLAALLLDRADDLSGALRQFREVVERYPDYGLAWYHLGQTCFRRNDFDTAALALARFLELGCGHFFLDQPEEKLTLTALLTRAQALRRLERFPEAGEVLKDAQRRYHQEPGVWLETAALARACEDERAARRALGACLNLRPGFRRARMLLAEMDGRV

SEQ ID NO: 3214 - protein, 403 aa, Reyranella sp.
MRRRARTHCRGSVRITATLIARDEEHFLPGCLQSIRPLVDEIVVVDTGSRDATRAIARAHGARLHDFAWRDDFSAARNFALDQAGGDWILYIDADERLRPLDRATVERELSTPEWWAATLRFHPQTGYTAYRELRLFRRHPEIRFQGAMHETIVPSLNRLAGDRGEAIGTSTLTIDHLGYDGGSVRKHARDLGLLRRQIAATPDRTYLWWHLGSIERERGDPAAAERAWRQGVEAARRSPIRLAEKTMCFAELARQCGIDGRNGEALALIAEARTLQGDNYLLDCLEARSLAATGRCEEALAIFESLASIDADMLVDDFAYDRALFGAGALAEGGLCLFRLERYADSAHWFGRAVAREPGNLAFRARFQLARARAQQSKQKHHRLGSGHADTALGEAPSPETG

SEQ ID NO: 3215 - protein, 254 aa, Halomonas anticariensis
MKPITGIVITLNEENDIACCIRSLFLVCDEVIVVDSLSQDNTVDIARTEGARVIEQAYLGDGPQKAFGVPYAKNDWILALDADERLDDDAVELIKSLDLSDAGLAYGFRRKNFVGHHWIRAAGFYPDAVVRLYNRTQAGYLPKKAHSAVQAPQTLQTSAHIRHFTYQDLSHWIQRIDQLSSRDAWAMKERGIPPSTWRPTLHALSATIRKLVLKGGLLQGRDGMTVAMTTAFHAYMKYAKLNELYENEHTRQER

SEQ ID NO: 3216 - protein, 249 aa, Acidaminococcus fermentans
MGTCTVAILTKNEEKHILAALDSARPCADQLLVVDSGSTDHTVSLAREAGAEIAFREWDEDFAAQRNFALSQAKGDWVLYLDADERLTPALVEKINAIKKGNQDHQYSFKRINIAFGHEFHHGAFSPDRVKRLFPREKVCWVGKVHERPECPLPVTELGESLHHYTYDSFAQWWNKAGHYTSLWAEEARERGKKATARTAAGHALLGMVKAYVLEGGFLEGSMGFIAALQHGIYTAMKYMKLAELCSRK

SEQ ID NO: 3217 - protein, 255 aa, Campylobacter jejuni
MADKKRLSVVLIARNEADLLPECLESVAWADEIILLDSGSEDATQDVARRYGAKVFQNTVWPGFGKQRQLAQSHATGDYILMIDADERVSPELRQSIENVLHTPRDNTVYSLGRSNFFLGRFMRHSGWYPDRVNRLYPAAFRYNDDLVHESLKTENASVIPLQGDLLHLTCRDLFVFQRKQLSYAQAWAEQRHRQGRRCSFFSIISHTLGAFSKTWILRAGFLDGKQGLILAGVNAQYTFNKYAALWALSHQLQK

SEQ ID NO: 3218 - protein, 249 aa, Halomonas subglaciescola
MLAELSAVIITRNAAATLARTLDALEDVDEVVVYDNGSTDGTLELAARYPNVALHQGEFHGFGPTKRHAVSLARHDWIVSLDADEAPDARWLESLAGWLPTADSRQVVEVHRENWMLGKPVRHAGWGNDWLVRVFHRREHNFSEAMVHESVTLGQATQIARLDGCLTHLAVTELAQFLDKINRYSEIRARSDKLRVYPVALIVLKAAFAFFRTYLLQRGFLDGWRGLVIAVSNANGVFWKYMKRRVRDL

SEQ ID NO: 3219 - protein, 261 aa, Unknown
  Description of Unknown: unclassified Limnohabitans sequence
MKTNAPTLCIGILTMNEERRITQCIESAKFADQIVVVDSGSKDNTVAMAQTLGAQVHTHADWQGFAEQRNRLLQYATCDYIFFLDADEVITPELQAEIQAAVSSGRKAAWKILWNQVAYGKSLTRMKSTGGVMRLFQSANLLRFEGVVHEHAVLADPTTPVITCKGRLLHYSRETVYGSLQKLAQYAQLGAAKRAKAGKRGGVLRGFASAFANFIQLYFFRRGFLCGAEGFLFCFFIALECFFRYAMLHYDKDTLEKIVTR

SEQ ID NO: 3220 - protein, 255 aa, Desulfocarbo indianensis
MALLSVALICQDEAANLPAWLEAVKPFADEIVAVDSGSQDATLRILEQAGALVRARAWTGYADQRNHAASLCRGDWLLFLDADERPDAELAAALNALKTGPPPKERAFELNYKVFFFGRFLRHGGFFPERHLRLFRAGAARWERREVHERLSAEGPLGRLPGYVHHHSYATVGQYLRRMERYSAEAARQMAAAGRRAGPLTAVGHGAWAFLGRYVLRLGFLDGWAGYLAARLEALYTFTKYARLMELNRAPRDVS

SEQ ID NO: 3221 - protein, 251 aa, Bibersteinia trehalosi
MPSLSVAMIVKNESQDLAACLETVKDWVDEIVILDSGSTDSTKQIALEYGAKFYENLDWQGFGKQRQLAQQYVTSDYVLWLDADERVTPELKQSILRAVQENKADSVYQLARLSEIFGRQIRHSGWYPDYVVRLYPTKLAKYGDELVHEKVHYPAGTKVIKLSGDLLHFTYKDIHHYLVKSASYAKAWAMQRASQGKKASIGQGISHALSCFFKMYILKAGFLDGKQGLLLAILSAHSTFVKYADLWDRTR

SEQ ID NO: 3222 - protein, 247 aa, Stenotrophomonas acidaminiphila
MTSPLPLSAVIITRNEADRLGRCLASVRDVCSEILVLDCGSDDGTVALAQSYGARVEHQDWLGFAEQKNEAIRRATQPWLLLMDADEWLADALRRLFASGAVERADVWKLKRCNWFLGRMLSGFERTERLVRPDHRYLPMRVHEKPDLSGKRVQDCDIVIEHNTARTLDAHRAKNARYARLWAEQRHADGKRCSALSPWTHATAYWLKMYLLRAAWRDGRQGWWFHASHAQAVLDKYRHLHALGRTP

SEQ ID NO: 3223 - protein, 252 aa, Unknown
  Description of Unknown: Betaproteobacteria bacterium sequence
MPQPLSVVLIAQNAAAQLPQCLASAAFADEIVLVDSGSSDGTAELASRCGARVLHKEWLGFGRQKQYAVEQARHDWVLCLDADERVSAQLAAGIRQALEAPAAPVYRMARRNRFLGRWLRHGEGYPDWSVRLFDRRQARWSDDAVHEKVLFAVTPATLAGDLLHESAEDLGRYFEKQNRYSALAARQLHERGRSAGIAELLLSPLVRFVKFYLLRLGFLDGVPGLVHIAIGCAASFLKYAKLIELQRARPAP

SEQ ID NO: 3224 - protein, 257 aa, Unknown
  Description of Unknown: Halomonadaceae bacterium T82-2 sequence
MQPITGIVITLNEADNIVDCLRSLKRVCDELIVVDSLSEDNTVALAEAEGATVIAQAYLGDGPQKAHGVPFARHDWILALDADERLDDDAVALIERLALDDPNTAYAFRRKNYVGKHWIRAAGFYPDAVTRLYNRTTAGYLPKKAHSSVRAPRVETTRAHLHHFTYTDLSHWIRRIDALSSRDAWAMKERGVAPSAVRPALHAGIAALRKFLLKGGILQGSDGMLVTLTTAFRTYMKYAKLNELHENEKAPSSGDAP

SEQ ID NO: 3225 - protein, 242 aa, Unknown
  Description of Unknown: Deltaproteobacteria bacterium sequence
MTWCDEIVVVDGGSTDGTLGIARRFASRILVNPWPGYRAQKQAALDASRGEWVLNVDADERVTPDLATEIRAALAEVPPEVVGFAIPRLVCYLGRWWYRGGWYPRPIVRLVRRTATRWGGVDPHERAEVKGRVARLRWPLLHYTYRDITDHLRSLNKLTSVAAGQPKLPQRIGASRLVAEPAWRFVRSYLVHRGFVDGVPGLFVAMTGAFYVFLRWAKVWERRRDEEQAGEVPPLDRSQAGF

SEQ ID NO: 3226 - protein, 258 aa, Trabulsiella guamensis
MTMRLSVVMIAKNAADLLAECIASVRWADEIILLDSGSTDNTVELAQSLGVKVYSNTDWQGYGPQRQRAQSYATGDYVLMIDTDERVTPELEQSLRQVLASPQPGAVYSMARQNYFLGRFMRHSGWYPDRVIRLYERERFQYNDNLVHESLDCHDALVIELNGDLRHLTCRDFASFQQKQLAYATAWAQERHQKGKRVTLAGIFGHTLGAFVKTLLIRGGVLDGAQGWLLAVVNAQYTFNKYTGLWALNRGYSASEKA

SEQ ID NO: 3227 - protein, 272 aa, Noviherbaspirillum sp.
MNQPLPGQPEKNAASPKLTIGILTLNEEKRIANCIASAKFADQIIVVDSGSKDRTCEIAAALGAEVHAYPQWQGFAVQRNRVLQHAKGDYIFFLDADEEIPPALQQEIAAVVAAGKDEIWEVQWNQVAFGRPLTLMKSTGGIQRMFRTGSIREFTGLVHEHADMHGDSRAVHLFRARLLHYSRESIYSSLNKLAQYVQLGAAKRAQAGKKGGVLRGMASALAIFLKLYVFRRGFLCGAAGFLFCFFIALECFFRHTAIKYDAGRLEQAAMRG

SEQ ID NO: 3228 - protein, 289 aa, Brackiella oedipodis
MTTSHSSLSQTTDHAKPASLAIVMIVKNEEQSLRDCLHSVADLADQIVIVDSGSTDATAAIAREFKADFHSHTDWPGYGKQRQIAQQYVHCDWVFWLDADERMTPQLRQSIERVLKQSSSYQQTVFSVARLSWAFGRFIKHCGWYPGYVERFYPHALTTYDDALVHESVIVPAHAQVQTLDGDLLHYTYRNLQDYLTKSANYAQAWAQQKYQAGKRTSLLAACGHSFGRFFRTYIFKKGFLDGSAGFLLTLFACQSVFNKYAALYLKQKEKHASQHSTTSTTSTSHENS

SEQ ID NO: 3229 - protein, 334 aa, Unknown
  Description of Unknown: Sphingomonas sequence
MPAPTIAATLIVRDEARCIARCLASVAPFVDRIVVVDTGSVDDTVAIATGCGAEVHHLGWPDDFAAARNHALGLADADWHLVIDADEWIVSGGEALRDWCAGGERLGRACVLSDDGEGATTTRSWITRVLPRGVRFEGRVHEQVASALPRVRTGLHIGHDGYRAAQIARKRDRNHRLLLAELAGRPGDAYLLYQIAKDADMRGDGAASAEGYAQAVAVTPPDAGWRHELVTCAIPALAKAGRLGDAMALAEAEMPRWAESPDFFFVLGDLLLDHAIADPARAVDQWLPLASGAWERAIAIGERPDLEGSVAGRGSHLAQHNLDVVRGQLAMLGG

SEQ ID NO: 3230 - protein, 265 aa, Kyrpidia spormannii
MRSVKNWADEIVVVDMYSEDRTTEIAKQYGAKVFYHDRIGFVEPARNYAISRTQGDWILVLDADEVVPLSLSQMLCQIVEDDRADVVKIPRLNYLLGAPMYFCGWGPGQDRHMRFFKRNMLIMSEDIHKPPQPTSDARVYEIEYTEPGLALIHFNYIDATQFIEKLNRYTTIEAVQAYDRGQRPSTITIIWTMIKEFLIRYVLLQGFRDGWRGWYLSLFMMFYRAATFTKLTEFQRYGGRERVIRDYQNLAEQIVREHEREVTQT

SEQ ID NO: 3231 - protein, 273 aa, Marinimicrobium sp.
MSAPQDYEQSNARQRISAVLIVRNEAQKIADCLATLDWADEVVVLDSGSEDNTCAIAREHGARVSVRTDWQGFGEQRRRAEALATGDWIFMIDADERVTPALRDSILAAVARGIPAIYRANRLCWCFGRYIRHSDMHPDWVARLYPKGQAEFPTQRVHEKLHNPKGLSEYRLEGKLLHWVYDSVAHQKRKAAHYAEEWAAERAAKGESTSLSSAYLHAIFCFVRMYFLRLGLLDGRQGFLLAVLMSQATFAKYAELWTRSRAQAPEDNHADHV

SEQ ID NO: 3232 - protein, 265 aa, Unknown
  Description of Unknown: Deltaproteobacteria bacterium HGW- Deltaproteobacteria-21 sequence
MGREEGGLSVAIVSKNEEERLPGCLDSVGFADEVVVVDSESSDHTVDVARNFGARVLIEKWRGYSGQKQYAVDCCRNPWVLILDADERIPLETAEIIMKALAGADPSISAFSFRRKNLLHGRWVKRCGWWPDRVLRLVDRRRGRFDGRPVHEQWVTDGKIDRLNGCIEHISFRNYSELVDKMERYSCLASEELFLRNVKASGFTPVSHGLWMFFRTYVLELGLLEGFDGLVISLMNAGGSFLKYAKLREKWIYSGKGQGSGIRYK

SEQ ID NO: 3233 - protein, 257 aa, Unknown
  Description of Unknown: Acidobacteria bacterium sequence
MNRLSACLITLNEEHNLPRTLASLLGIADEIIIVDSGSTDGTEAVAREHGAAFHFRKWTNYSDQKNYAASLTRTDWILSLDADEELSSALQTSIVDWKKRSAQFNVYEVARRTWYLGAWIKHSGWYPDFKKRLYRKGIAQFAGSLHETLQFSGPCGRLAGDLLHYTIRDFGEHEANVERYSALAAQQMFAAGKRHWRGAWWLATPWSFFQNFILRGGFLDGHRGALISRMAARTVRLKYEKLGKLIAAQKDAVRAER

SEQ ID NO: 3234 - protein, 258 aa, Erwinia teleogrylli
MTMRLSVVLIVRDAADLLPDCLASVAWADELVVLDSGSQDATLAIAREAGAQVYVREDWQGYGVQRQRAQQYASGDYILMIDADERVTPELADAIRSVLTAPAAGAVYSIARRNLFLGRFMRHSGWYPDRVIRLYPREQYRYNDNQVHESLDYASADVKPLPGDLLHLTCRDFASFQRKQLNYATAWAHERHLQGKKTSLWGIFSHTAGAFIKTLLLRGGVLDGAQGWLLAVVNAQYTFNKYAELWALNHGYTQKRPL

SEQ ID NO: 3235 - protein, 252 aa, Crenobacter cavernae
MGVSISAVLITKNAAHSLKACLESCRFADEVILVDSGSSDDTLAIANAYGAKVIHQDWLGFGPQKQFAVSQARNDWVLCLDADEWLSDALIKEIKDLPDNPQTSAYRFPRCNKFMGRFLRHGEGYPDMSLRLFDRRRARWSDHQVHEYVIADGPVGTLAGDLMHESGEDVSVYLAKQNRYTDLQAEALFAAGKQVGAMKLIASPLLRFFKFYIVRQGFRDGLPGLVHIAIGCFNSFVKYAKLLERQRLEKKA

SEQ ID NO: 3236 - protein, 256 aa, Limnohabitans sp.
MTLRAPTLSVIVITRNEAHNLDDCLMSLKGWVDEIVVVDSHSTDETVAIALRHGAKVAQPDGWPGFGPQKNRALDMATSDWVLSIDADERVTPALAVEIRGVLTSGADAVAYEIPRLSWYCGKFIHHAGWRPDHVLRLFPRLQAQFSQDLVHERVVTTLPCKQLQNDLLHYSYRDFSQVLAKVDAYSTASAKQALARGKRATVGSAVGHGAWAFFRTYVLRAGFLDGGHGLALAISNAETSYYKYLKIWAQAQSAE

SEQ ID NO: 3237 - protein, 255 aa, Chitinimonas koreensis
MQKLSLVLITRNAAGQLAACLDSARGLADEIVLLDSGSDDGTLALAERYGARIASQPFLGFGPQKRAAVALAQYDWVLCLDADERLTPELAASIRAALADPQHAAYRFARRNRFFGRYLGHGEAYPDWCLRLFDRRRAGWSADAVHEKVEVREGGTGSLAGDLLHDSAESLASYLTKQNRYTDLQAEALFAAGRRAGIGKMALSPLTRFIRFYFVRRGFLDGAGGFAHILIGSFFAFVKYAKLAERWQRHDSERT

SEQ ID NO: 3238 - protein, 376 aa, Thermicanus aegyptius
MFFLSDSVRLSLCMIVKNEADCIARCLESAGPLVDEIIVVDTGSTDGTDAICRSLGAKVFSFRWNDDFSEARNYSLSLAQGEWILWLDADEEIEASPDELRELTASEAYDLYSFRLNNYYGARADRNQVITIAHPRLFRNRIGFRFHQRIHETLNVEEVLPGPDQKERIGSAPITIWHYGYLDDYVKKKGKAERNLSLLKEEVAKNENDPWLHYHLAAEYYRAQKFNLSFQHVNRSIILFILANQTPPSLLYKLKYSILLSMRSFEGAYPAIEKAIALYPDYVDLIFYKAVILLHLDKPLEAIGALDRCLEIGEQNLKHLTQKGLGSFQAWYCKGLCYEKLNDLETAERCYRNALALTPNHSEAEAALVRLKRDSN

SEQ ID NO: 3239 - protein, 347 aa, Unknown
  Description of Unknown: Saprospiraceae bacterium sequence
MSVFSTDIQKLKPSLTRHFCLLITGVAQMAKVELMIQPQKNTHLILRTLLSGVAVLALRHGVKLQIAGEPGPIHPKFSKLAAVKTTQKLTAVIITHNVAGTIGDCLAALQEVAGEILVLDSFSDDGTVEICRQYGAALVPQEWLGYSATKNLGNSLARYDWILSIDADEVLSDELVNSLKNLMPEDGVVYALDRLTNYCGKWIRHSGWYPDWKVRLFNRNDVQWQGDFVHETLAIPAGFEVARLAGKMYHYSYKDSGDHLRRIEKYARLSAQEQFERGKKATFAGLWLSPIARFVRTYFIKKGFLDGKEGWVISCRNACLVRRRYEILKEMWDGKAPRVKHPLFLAP

SEQ ID NO: 3240 - protein, 265 aa, Mucilaginibacter gotjawali
MVPVSIVIITKNEAATIAACIEKCRLISDDIVVVDNDSIDGTPEIAGTYGCRIFKKTWDGYGANKNKGIALAKYDWILSIDADEMPDVELAISLHQLNFSDPCTVYDIKFRSYFGKKAIRYGSWGRDHHIRLFNRTLVKWSETVVHETLVMPQTIAIKKTVGYIHHYSVKDAAEYDIKGKFYAKLSAKKYFNNGKKANLVKLYISPAFGFIKNYICYLGFLDGKEGWEIAKATLRNTRRKYVYLSQLENLDQKRQAVKDRYAVEY

SEQ ID NO: 3241 - protein, 398 aa, Jatrophihabitans sp.
MGNLGCELSACLIVRNERGRLADCLSSLHPLVDEIIVYDTGSNDGTVELARSLGARVIEGYWDDDFARARNAALVAATGRWILSIDADDRFTGDPAALRPLLAAENVDGYRVQIDNLSGTDGADSYTSFPLRLFRRDRASWRGQIHERVCHADGSELKLGIATARGLRHIGYADADEARGKAARNAVLGLRELQQLHDAGCADPAELARVLLDLGRSLMACEQRQGAVDAFVGVRDLPLRGPEFVQATDFMARLALGANQPDDAANLVQQLRAAGADAEYCNWLEAQVLAQQGDAVSAYRMLAGVSSLVDPAGRVYNQGQVVEMRALAAALAGRNDDAVADLVEAMSRYGRVAGRGKLLLEWWGDRPLAPLWEQISQYGTTYLDGIQRELSACEVAPV

SEQ ID NO: 3242 - protein, 269 aa, Mucilaginibacter mallensis
MTVSVVIITKNEAATIGRCVAAAKRITNDVIVMDNGSTDETTDIALNHDCRVYQEKWYGYGTNKNHGAALARHNWILSLDADEIPDDELITAIQNLQPETDNVIYDIRFRAYFGGKSVRFGTWGRDHRIRLFNRNYTCWSEPLVHENLIKPAGGVIKKLPGLVHHYSGKSPEQYRAKTMHYARLNARNYLREGKKTTTVKLYLAPLFHFLKDYIFLLGILDGKRGWLIANTVAQYTRAKYQYLKQETEQKEKNYYTGENLLVEYQNHSH

SEQ ID NO: 3243 - protein, 258 aa, Pantoea sp.
MTSRQRLSVVIISKNEADLLPDCLASVSWADEIVVLDSGSEDNTVEVARQAGALVWQSTHWQGFGKQRQLAQSYASNDMILMIDADERVTPPLRQAIEQVLSSPVSNTVYSLGRSNLFLGRFMRHSGWYPDRVMRLYPRQLSYNDNLVHESLETQGAPVVALKGDLQHLTCRDLVAFQRKQLNYAAAWAQERHQRGKRCGIVSIFTHTLGAFCKTLILRAGFLDGKQGWILAVVNAQYTFNKYSTLWALNRPSAKGSV

SEQ ID NO: 3244 - protein, 246 aa, Unknown
  Description of Unknown: bacterium CG_4_9_14_3_um_filter_65_15 sequence
MKVSAAIITREAAVDLDRCLASLDFVDEIVVLDQHSADDTAAVCARHGARLHQTEWFGFGPTKQKAVSLCRNDWVLSIDSDEEVDAGLREAIAGLPEAPGFAAYRVNRLSRFLGKWIRHCGWYPDPVVRLFDRRHAEFNERPVHEEVVVSGSCGRLEGHLLHYAYSDMEQYLAKLNRYTTLAAEQMHADGRRSGLAEAVARSVTGFWRMYLLQAGILDGAHGLVLCTASSFSILTKYVKLWRLGRS

SEQ ID NO: 3245 - protein, 271 aa, Bacillus sp.
MQTLPLTLAVITHNEADTIARCLDSVPFAAEKLVVDSGSDDATVAIAQAHGARVVVQDWLGFGAQRNFAASQCEHDWILVLDADEYLTPELAAELRRQLPELMVSTTPAAYLRRSTIYMGAPMRWYRPAVGERLARLYHRGRARWTDARVHESLRFEGNAPTLDAAFNHTNNPTLAHKQLKVLRYAELKCRDWLDKRKPVRMWQAPLVFALAFLKDYLLRLAFLDGWRGFMIAQTAASYALYKRMRYYEMVNHRESVARAASLLHKHGIDR

SEQ ID NO: 3246 - protein, 341 aa, Unknown
  Description of Unknown: Frankia symbiont of Coriaria arborea sequence
MIRTRGTTRSLAPPYGTTIPSAPPPRSVPVTAIILARDECHDIARAVRSVGWCRQVVVVDSGSTDGTQQIARAQGATVWEEPWRGFAGQREWAMRNPGVQHDWVYFLDADEWIPTDLANEIAARVGRENCVAYIHRRRFFFLGRWIAHCGWYSNSWQARLLDRRFSSFATTDQFSERASVKGTMLRLACDLVDEDSKGLTCWLHKHVTYAELEAGRRAALVPPFRRLKQVLAGGSEESTRPLPRTIARDIVFPLVPFKALAIFVYMYLFRSGWRDGWQGLAFCIHRAWYEKMIYLLGRPEALPGGSGGNLAPAPDSIDIPPVPPATDTANDGGFHALRCSS

SEQ ID NO: 3247 - protein, 262 aa, Unknown
  Description of Unknown: Rhodocyclaceae bacterium sequence
MPATRQPLSVAIITLNAANQLEACLQSARFADEIVVVDSGSTDGTQALAERCGARVLQQDWLGFGPQKQFAIEAARHDWVLCLDADERVTPALQAAIESALEISQTSASTSAAPHAFRFPRCNRFLGRYLKHGEGYPDWSLRLFDRRHARWSDDAVHEKVLCDGPIGTLAGDLLHDSAESLSSYLTKQNRYTSLAADMALLAGKRSSLGRVALSPLVRFIKFYFIRQGFRDGLPGFVHIAIGCFNSMIKYAKMLERQNAAPR

SEQ ID NO: 3248 - protein, 263 aa, Burkholderia multivorans
MSERTAAPTLSAIVITKNEARDIGACLASLRPWVDEIVVFDSGSTDGTQAICREHGAVVYETDWPGFGAQKQRALDHAHGKWVLSIDADERVPPKLRDEILACIASPRAELYDIPRRSNYCGTWIHHSGWSPDYVRRLFMRGRAHFSDDLVHERVIGDRDARCARLVTPLLHYTYRDFSEVLGKIDSYSSFSATQKVARGKSGGLRQAVLHGLWTFIRTYVVKLGFLDGRMGFILAVSNAETSYYRYLKMMLISDGHNHHPHA

SEQ ID NO: 3249 - protein, 282 aa, Herminiimonas arsenicoxydans
MTMLNFTPAKTEQNRQPSHTDEAVSEPTLTIAILTKNEAHRIASCLHSAAFADQIIVVDSGSTDSTREIALAEGAEVFNYPDWQGFAVQRNRLLQHARCDYIFFLDADERITPELQDELLAAVRSGKRAVWKVQWRMVAFQHELKYFRSDAKIERLFRRDMVREFTGVVHEQALLEIEPTPRVLLKGRLLHHSRETVRGSLEKLTQYSMLGAAKRAENGKRGGVLRGLLSGSSMFLRLYIGQRGILCGGPGFLYCFVVGLEGFFRYAALAYDHDSLRTDIPR

SEQ ID NO: 3250 - protein, 256 aa, Gayadomonas joobiniege
MTQRPPISCFVIACNEADRIEACLQSLAGWVDQLIVLDSGSQDSTVEIAQRYADHVYQTDWPGYGPQRNRALGYCKHDWVLNIDADERLSQGAKDEIDALLAKPDLDINFVKIPWHTYLFGGLVKRGRYASPQGKLFYKVDAQFKNSQVHETLQLPNEKVAVLKSPVFHYSWRSYQHAQEKHLKYAALLAEEKYAKGKRSSLSFAVLRFFTDFIQQYFFRAGFLDGKRGFFMAMILAQYGFHKYAALAALTMAEKK

SEQ ID NO: 3251 - protein, 237 aa, Unknown
  Description of Unknown: Chitinophagaceae bacterium sequence
MIARTPISIVIITRNEAANIADCLRSARFLSDDIVLVDSGSTDGTPRLAALCGARVFHNNWEGYGAARNKGAAAARHDWILSLDADERLDFDLIEQLKNQEPLRGCVYRFRRRNHWEEKPIRFGTLGFERIARLYHRSDAHWNDFAVHERLVGKFQVCNWPGTLLHFGIAYPAHYEKKKEHYAWLSAITYARQGRTARSYNRLGAPLFDALKSYLLLGGFLDGIAGWKIALITARYT

SEQ ID NO: 3252 - protein, 256 aa, Lysobacter oculi
MTSREPLSAVVTTFDNAATLDRCLASLAFCDEIVVLDSDSTDATRDIAAAHGARIFIEPFMGYGPQKQSAIDKATHDWVLLLDADEVMSDAGRLAIERELRAPRADGYRLPRQEWLFWRWPHPATRGNRQLRLFRRSMGAMNAVPVHAAPETRGRRLDLDAPFRHHGEAEIAVRVDKVNRYSSGLVEHVRGKQRRFIGLRLLVQPTLAFLKLYVGKRYFLNGWAGFFAAKTQSFYVFLKYAKLFEAGRKRGAQPFE

SEQ ID NO: 3253 - protein, 263 aa, Ferruginibacter sp.
MKPLSAVIITLNEEHNIGRCIDSLWYVADEIIVLDSFSSDNTVAIAKERGAIVKQEMFAGYKEQKNRALKLASYDYVLSLDADEVLSPELMEAILNAKKDFKFEAYCMNRYNHYCGRFIRHGLWYPDKKIRLFDKRIAYWGGINPHDKIILPENCKAQFLKGDILHYTFNSLEEHLERNERMSSIAAKSLVDLGKKKHWSKIILSPLWSFVNGYFFRLGFLDGYYGFIIAIQNAHLSFLKYQKLQRLKRENKKSLVTALNPIH

SEQ ID NO: 3254 - protein, 253 aa, Yersinia ruckeri
MSARKRLSVVMITKNEASLLPDCLDSVSWADEIIILDSGSEDGTLDLARQYGAQVYSNHQWQGFGKQRQLAQQYATGDYILMIDADERVTPQLKTSIETVLIEADDNTVYSCARRNLFLGRFMRHSGWYPDRVTRLYAHHLYQYNDNLVHESLNTGVAKIIPLKGDLLHLTCRDFFAFQRKQLSYAEAWATQRHQQGKSCSYFSILSHTLGAFCKTWLFRAGFLDGKQGLLLAVVNAQYTFNKYAALWALNQK

SEQ ID NO: 3255 - protein, 372 aa, Unknown
  Description of Unknown: Oribacterium sp. C9 sequence
MIINLVMIVKNEERCLERCLTSAAPFVDNIIIADSGSTDRTLEIAEKFGAKVYSFPWENDFAKARNFALGESEREWNADINLVLDADEYLVNDENSNPEALREFIDMMYDKQGMRWLGIIKREDSYPNGDEIDRSITEIDRILPAGMRYRGSIHEQVAAKVVNRLSPLYVLHDGYMRKGKGERNYQYLAEALEKEPNDPYYNYQMAITLRNLKKEEESLPYFRTFWRFSGRKEIRQAPYWTDGIMRYLYTLYDMDTEESLEEAHDIMSKVQYDFTRNPDFYFYSGLFYMKLVLKNTEKYKDLLPYIEKSYLKCLELGEISRPEGVIGTGSFKAAYNLGTWYEVSGNKEKARYYYGISAEQGYEKAAERIRLL

SEQ ID NO: 3256 - protein, 278 aa, Unknown
  Description of Unknown: Actinobacteria bacterium sequence
MKNRQRIPVSAIVLTKNEQEAIGACIRSLHSFDEVFVVDSRSTDDTRQIAAGLGATVVDFSWDGKYPKKKEWSLRNLPFRNDWVLFVDADERPSEALVSSLHQLLPAGSAQRHAAYDLPVFYRFMGRPLKHGHHVVKRALVRHADAEFPPIDDLDVTTMWEVEGHYQPAVHGSVGSLRGGLIHDDPDRLFDYFSRHNRYSDWEAAVATDPDLRRQVNALRTSQGSLFARLPAKPIAFFVYSYLARAGFLDGRAGFDYAVALATYYWQIDLKVREARAR

SEQ ID NO: 3257 - protein, 278 aa, Skermanella stibiiresistens
MPVSVIVMTRDEAANIGACLASVSRFAEIFVVDSGSRDGTAAIAKSMGARVIDFHWDGKYPKKKQWCLDALPFSHDWVLYLDADERVTGALAGEIAGLMAAGPEASGYHIPGRPVFAGRPLRFGAWNSKIALLDRRRASFPPVPDLDVASMWEVEGHYQPRLAGTAGRLRHPVIHHDAKPPYAWFERHNRYSDWEAALMMDGRLESIAVREKGARRLLKRIFVRLPARPLVVFLHSYVLRLGFLDGLDGLDHAIARAFYYWQIAVKVRARRRGPVPYP

SEQ ID NO: 3258 - protein, 258 aa, Pantoea rodasii
MSQRQRLSVVMIAKNEAELLPEALASVSWADEIVLLDSGSQDATADVARALGAQVYQAEGWDGFGKQRQRAQAFASGDMILMLDADERVTPELRRAIEHVLEQPAANTVYSLGRSNLFLGRFMRHSGWYPDRVLRLYPRALNYNDNLVHESLDTQGAPVVALTGDLQHLTCRDLIAFQRKQMNYAEAWAVERFQRGKRCGLFSIFSHTLGAFLKTLLLRAGFLDGKQGWILAVVNAQYTFNKYSALWALHHTSTQGRV

SEQ ID NO: 3259 - protein, 256 aa, Thioalkalivibrio paradoxus
MTPLPITATVITLNEEAMIAGCIRSLRPVCDEIIVVDSLSADRTREIAAAEGARVIEQAYLGDGPQKAHGVPFARNDWILSLDADERLEDDAVALIRGLPLDDPRTAYALRRRNFVGNHWIRAAGFYPDSVVRLYHRGTSGYLPRKHHSRVEAPRVRRLKGHIRHFTYEDLSHWIRRIDELSALDAWAMKDRGVRPSGWRPAVHALVALLRKLVFKGGVFQGADGMTVAVTTAFNAYMKYAKLNELYEREQGGPRE

SEQ ID NO: 3260 - protein, 256 aa, Polaromonas sp.
MTTLSVLIITKNEALNIEACLRSVAFVDRVIVMDCGSTDNTVDIARNLGAEVSINTDWQGFGMQKNRALALASSDWVLSIDADERLSKELQAEIQQVLEHPVADAYCFPRLSSYCGQYIRHSGWYPDPVTRLFRRGAARFSDDIIHERLLVKGQVSTLRNRLLHESFPDFETVLDKVNRYSSAGAQRLLSKGKSSSFPKALGHGLWAFIRTYFLQRGFLDGWMGLALAISNAEGTYYRYLKLWLLLLDQKASPPSS

SEQ ID NO: 3261 - protein, 276 aa, Unknown
  Description of Unknown: Chitinophagaceae bacterium sequence
MMQNRVPISIVIITRNEAANIADCLRSARRLSDDIVVVDSGSTDGTARLAALCGARVLHNKWEGYGAARNKGAAATRYDWILALDADERLDFDLLEQLKEDAPKRGRVYRFRRRNHWEERRIRFGTLGFERIARLYHRHDAQWNDFAVHERLTGSFQLCKWPGTILHFGIAYPDQYLRKREHYAWLSAITYARQGRKARLYHLLGAPLFDALKSYLFLGGFLDGIVGWKIARITAWYTARKYTLLRSGQHETHPAPTAGESACTVASLQQLSSAAS

SEQ ID NO: 3262 - protein, 247 aa, Pandoraea sp.
MPLTVTILTRNERHNIAECIASVRALASQIVVLDNASTDGTADIARDAGAEVHVTPDWPGFGPQKNRALSFATQPWVLSLDADERITPELAADIAAAIASNRHAGYRMPRLSQFLGHWVRHCGWYPDYVLRLFRRDAGRFSDNLVHERVIVEGEIGTLPNHLLHFSYTEVRQVEDKVQRYAKAGAKEMALRGKKVSALKPWINGGWAFVRTFVLRRGFLDGATGAAIARMNARSAFLKYALLRRGES

SEQ ID NO: 3263 - protein, 247 aa, Pandoraea pulmonicola
MPLTVTILTRNERHNIAECIASVRAVASQIVVVDNASTDGTADLARAAGAEVHVTPDWPGFGPQKNRALSHATQPWVLSLDADERVTPELAADIASAIARGAHAGYRMPRLSQFLGHWVRHCGWYPDYVVRLFRREAGRFSDNLVHERVIVDGELGTLAHHLLHYSYTEARQVEDKVQRYARAGAKEMAQRGKRVSPLKPWINGGWAFVRTYLLRRGFLDGGTGAAIARMNARSAFLKYALLRRGDV

SEQ ID NO: 3264 - protein, 288 aa, Rugosibacter sp.
MKTPVSAVLVTKNAAHTLPACLASVAFCDEILVVDSGSTDDTAAIALKYGARVIHSHWRGFGPQKQFAVGEAAHDWVLCIDADERVSDHLRQSLQAVLNDKTIATPAVSPTPARCLPCTTFRSPPGTFYAYRFARCNRFMGHYLRHGEGYPDWSLRFFNRHHAQWSADVVHEKVCATGAVGTLAGDLLHDSAESLANYLDKQNHYSTLAANAARAQGKRAHAAHLLLSPLVRFIKFYFFRRGFLDGLPGLTHILIGCGTSFVKYAKMAALQRQPPDLTHPTRPPGTHS

SEQ ID NO: 3265 - protein, 257 aa, Mangrovibacter sp.
MAYRLSVVMIARNAADTLEECLKSVDWADEVILLDSGSTDDTMAIASAHGAGVYSSPDWQGFGTQRQRAQSYATGDYILMIDTDERVTPELKSAIQSVLSTPPGNTVYAINRRNLFLGRFMRHSGWYPDRVTRLYAREKYQYNSNQVHESLDAPGAPQTRLQGDFIHLTCRDLSVFQAKQLQYATAWAHERHQQGKQTSVISIFTHTIGAFVKTLLLRGGVLDGKQGWILAVVNAQYTFNKYAELWALNHGYTEKQP

SEQ ID NO: 3266 - protein, 254 aa, Motiliproteus coralliicola
MNRITGIIITLNEEDNIAECIKGISSFCDDIIVVDSLSKDKTVQIAEEMGARVYLQKYLGDGPQRIYGAQFAKNDWILSIDADERPEADMLEAIANLKLDDPSTAYAFRRKSYVGNHWIKAAGFYPDYVTRLYNRTTSHYLDRKSHSKVIAPKTTKLDSHIYHLTYESYAHWLQRLDWFTTRDAWALYERGVKPSNIKPVTSCIGAFIRKMIIKGGIFQGLDGMTVTLTSMMRAYMKYIKLNELHEEKAANQRD

SEQ ID NO: 3267 - protein, 256 aa, Erwinia gerundensis
MHPRQPLSVVMIAKNESALLADALISVSWADEIVVLDAGSSDNTPEIARQHGAKVFTAGPWQGYGKQRQQAQQHASHEMILMIDADERVTPELRAAIEQALMQPQPDVIYSIARRNLFLGRFMRHSGWYPDRVLRLYPRAWRYNDNQVHESLETAGARVVPLQGDLLHLTCRDFSTFQRKQLAYAEAWAQQRHQQGKSCSIYSVFSHTTGAFLKTLLLRAGFLDGKQGWLLAMVNAQYTFNKYAALWALNQANQRK

SEQ ID NO: 3268 - protein, 400 aa, Unknown
  Description of Unknown: Candidatus Brocadia sinica sequence
MTQLSACLIVKNEALFLSHCIESIRSFVDEIIVVDTGSDDDTVEIACRHGAQVYHFAWIDDFSTARNESLCHAKGDWILYIDADETVDAINAAKIRQVITRKDITAVTVRQCIPQQSGNIANAFYSEYCRLFRRHPAIRFEGKIHEQILPSIERLGGKVLCTDIVIHHWAYAASEEKKQRRAERNLRYLLTELDRNQDDPFLYFNLGMTYRELGRRYAAIHSFHYALNKDDGCIKRELLGQTHLNLAKLYLESGDKTSAAHHAQMVATFDPANPLPDYMLATLAIEKGRYKKAIFHLEKALRIAKGETGVFSNVELNLAQIYLELGSCRCAAGDFVNAEHDFVRSMNLGPAVALPCLLLGNCRFLRGDLAGASEMFKRALSLNPLLEGARHGLSLCHPHE

SEQ ID NO: 3269 - protein, 307 aa, Pleomorphomonas sp.
MAEAAARLPVTVVVIAFDEAIHIARCLDRLVPYVERVVVVDSFSRDDTAAIARAHGAEVLQHAFTTHAAQVNWAIEAAAATTPWTMRVDADEYFEDGALAALGAMLAAQPGEVTGVTLRRKFVFRGRWIRHGRYYPVVLLRCWRTGAAVCEQRFMDEHMVLVSGRTAAFEGGDLVDHNLNDLDHWTAKHNRYATLAMADAVVREYGLAADDDRVAATGGAARRNRALKHGVYGRAPLYLRAVLLYVYRYVFRLGFVDGKVGFLFHTLHGLWLHLLIDAKIDEAREIIRRDGLDAFRERLAERHGIRL

SEQ ID NO: 3270 - protein, 300 aa, Niveispirillum irakense
MDTATGPIPVSVIVMTRNEAANIAACLASLTAFDQVVVVDSASQDGTDSIACAMGAELVPFLWNGHYPKKKQWSLQWPGLRHPWVLLVDADERVPPALAAEIRDLMRHPREEGAFFLSSRPVWLGRTLRHGSPYRKIALMHRARAHFPVCDDLHVATMWEVEGHYQPVVQGPVGRLRHPFLHDDGKPPFAWLERHNRYSDWEAMLGMGHAARLAGERGSRRWAKHLLRMLPFRPALVFLHSYILCLGFLDGRAGLHHAAARAFYYWQIGFKRDWLAAQGQASQARYRIDNSAMAEQTERA

SEQ ID NO: 3271 - protein, 284 aa, Unknown
  Description of Unknown: Microbacterium sp. 1294 sequence
MTSLLPVSVLVQTKNEAVGIGACLASLKQFDEVIVVDSASTDGTADVAAGMGVEVINFVWNGHYPKKKQWQLDNVATRNEWILFLDADETPSQLLVAELEKLFSAGPGSRTAAVDIDLDYVFAGRMLKHGHRVTKRALVRRDRVAFVPVDDLAVPGMGELEGHYQPVVEGSTVRAKGRILHNDLDPVSSWFQRHNRYSDWEAHLRFNATLSTSVRRNRTLKGRVFDAMPAKPLVFFLYGYVVRAGFLDGRAGFDYAFALAAYYWQIGLKYRELLRANRSMAGVR

SEQ ID NO: 3272 - protein, 257 aa, Halomonas saccharevitans
MTPITGIIITLDEAQNITDCIASLRPVCDEIIVVDSGSRDDTVAIAESLGASVIHQPYLGDGPQKAFAVPRARHDWILALDADERLDDDAVAAIRSLPLDDPSKAYRFNRRNFAGHHWIKAAGFYPDPVTRLYNRTTSGYLPKKAHSSVQAPAVVDTHSHIRHFTYRDLSHWITRIDQLSSRDAWAMKERGKGPSRWRPTLHAASAMLRKLILKGGLFQGADGMTVAITTAFHAYMKYAKLNELHENERAATPSDHA

SEQ ID NO: 3273 - protein, 247 aa, Unknown
  Description of Unknown: Gallionellaceae bacterium sequence
MPRLSVILITKNEAENIRACLESVSWADEIIVVDSGSSDGTAGIAREFTSHVYQHDWPGFGAQKNRALSYATGDWVFSIDADERVTPELKAELMEAMGQARADGFYCPRLSQFCGRFIRHCGWYPDYVLRLFKRTQGKFSDSLVHESLLLQGSSARLTRPLLHYSYRTSDDVRRKVEQYSAAAAQQMFNRGKNATPLDAPLRAAWAFFRTYCLWLGVLDGWAGFAVARMNAATTYLKYQRLRAMRQT

SEQ ID NO: 3274 - protein, 257 aa, Unknown
  Description of Unknown: Syntrophobacterales bacterium CG23_combo_of_CG06-09_8_20_14_ all_48_27 sequence
MNSKIPLSVAIITKDEADNLPDCLRSIAFAEQIVVVDSHSSDATVQIASDFGCDVFIEDWRGFGPQKQSAIAHCRHRWVLILDADERIPPETAMKIRDIVLNPSKTIVGYSFPRKNFFHGRWIRHAGWWPDRVTRLFQKDLGRVTPAMVHESVEVKGTVVALDVPIEHFTESRLSRILLKIDNYSTLGAREAFAMGKRMSVWSAVLRAFLTFSQDYFLRLGILDGAQGLTLAVTDAVNKFFKYAKLNELNRQEKSGD

SEQ ID NO: 3275 - protein, 312 aa, Rhodoblastus sphagnicola
MGPITEPPPRETALSITAIILTFDEEIHLERCLKSLSSLVERIVVVDSFSTDGTVGVARALGAEVAQRAFTHQADQLQWALDTLDIRTNWVLRLDADEYLEPALIAEIRARLPSLPSTVAGVRLRRKLIFRDKWIRFGGYYPTVLLRLWRNGQAHVPQLRMDEHIVLNGGEAIVFSKDFCDHNLRDITWWTEKHNRYATRKMADFIAMERGLGKANGTGADADASRAWKRFLQYAVFRRMPLYLRAVLLFGYRYVLRLGFLDGRPGFVWHALQGFWYTMLIDAKVEEARLFIAARGLDAFRAHVADRHGIVL

SEQ ID NO: 3276 - protein, 258 aa, Klebsiella pneumoniae
MSNRLSVVMIAKNAADLLPDCLGSVSWADEIIVLDSGSTDNTVELARRLGAQVYTHTDWRGYGIQRQRAQDYATGDWVLMIDTDERVTPELRQAILKVLDAPQRGAIYSISRRNYFLGRFMRHSGWYPDRVLRLYERARYRYNDNLVHESLDSLGAEVIPLTGDLLHLTCRDFAGFQQKQLAYAAAWALERHQKGKKTSMAGIFSHTLGAFLKTLLLRGGVLDGKQGWLLAMVNAQYTFTKYTELWALSHGYSEKESS

SEQ ID NO: 3277 - protein, 281 aa, Pokkaliibacter plantistimulans
MVTVAGGKSVKRRSREPLSAVIIAFNEASRIQSCLDSLEFCDEVLVLDSGSNDGTQSLCRRFGAKVVHQDWLGYGPQKRKAVELARHDWVLCLDADEQVTPELRASIEAAMQQPVLAGFRMPRCNLFMGRWLRHGEGYPDYSLRLFDRRQLQWTADEVHEKVDWVDASHGHERRVGKLKGDLLHESAESLEQYLLKQNRYTSLQADNLIARGKRISSSKLVGSPILRFLKFYLVRQGFRDGVPGLVHIAIGCFNSFIKYAKVRAYRKPDRIAAENDLDEKF

SEQ ID NO: 3278 - protein, 257 aa, Serratia marcescens
MSSRKSLSVVMIAKNEAGLLPDCLRSVEWADEIIVLDSGSEDDSVAVAEGLGAKVFTHTDWQGFGKQRQLAQSYASHDYVLMIDADERVTPELRQSIERVLNAPDDGAVYSCARRNLFLGRFMRHSGWYPDRVNRLYANQCYRYNDDLVHESLNIGGAKVIPLSGDMLHLTCRDFFAFQRKQLRYAEEWATQRHRAGKRCGYLSILTHTLGAFVKTWLLRAGFLDGKQGLLLAVVNAQYTFNKYAALWALGRNYSEK

SEQ ID NO: 3279 - protein, 289 aa, Hyphomicrobium facile
MDKLPISCFIIAKNEADRIARTIRSVRPWVDEIVVVDSESTDDTVRVAASEGCRVITQRWLGFGGQKRFAEDQCRNDWVLNLDADEVVTSALRREIISLFAHVAPRFVAYGMPIELVYPNTSRPRRWARDHWYVRLYDRRIVRFRDSIVHDLVVTDGHPVGILRAPAYHYSFRSYEDLKRKLAERMQLSAKHANSTPAKILARMAIEFPVNFFKYYIGRRHFMGGRNGLRYSWVQADYRLLKIFHMWRDRSSKSRAEPNSIADGQESVEGQADPNAAAVSPAAEMPLYG

SEQ ID NO: 3280 - protein, 264 aa, Raoultella terrigena
MSIRLSVVMIAKNAADLLPDCLASVGWADEIVLLDSGSSDGTVELARSLGAQVYINTDWQGYGVQRQRAQDYATGDYVLMIDTDERVTPELADSLRQALADSLRQALAAPKEGAIYSIARRNYFLGRFMRHSGWYPDRVMRLYPRLGYRYNNNLVHESLDAKGAQIIELTGDLLHLTCRDFSGFQQKQLAYATAWAQERHQKGKKTSLLSIFGHTLGAFVKTLLLRGGVLDGKQGWLLAVVNAQYTFNKYTELWALSRGYSERV

SEQ ID NO: 3281 - protein, 258 aa, Edwardsiella tarda
MSPRLSVVLICKNAAELLPDCLASIDWADEIVVLDAGSSDETQAIARAAGAKVYENRDWQGFGIQRQRAQDYANGDYILMLDSDERVSAELRDAIQQVLAQPASERVYSIARRNLFLGRFMRHSGWYPDRVIRLYPRQHYRYNANQVHESLDCNGAQIHPLPGDLLHLTCRDFASFQQKQLHYATTWAHERYAQGKITSLWGIFSHTLGALLKTLLLRGGVLDGKQGWLLAMVNAQYTFNKYTELWALQHGYTEKRLP

SEQ ID NO: 3282 - protein, 259 aa, Erwinia sp.
MTEPLRLSVVLIAKDEAELLPECLESISWADEIILLEANSGDATKEIARRHGAKVFSAGEWQGYGIQRQRAQQHAGGDMILMIDADERVTPELRSAIEQVLNSPLQRDVVWSIARRNLFLGRFMRHSGWYPDRVIRLYPSHYQYNDNQVHESLETLNASIRPLQGDLLHLTCRDFTRFQWKQFAYAEAWARQRYHQGKHCSFCAIFSHTLAAFFKTFVLRAGFLDGKQGWLLAVVNAQYTFNKYTALWALNQTAKKGPL

SEQ ID NO: 3283 - protein, 250 aa, Propionivibrio dicarboxylicus
MIPFSVVIISKNEAATIVPCLESVAALADEIVVLDSGSTDGTQAVCAAHGARVIETDWPGFGVQKQRAVDAARNDWVLCLDADERLSPELAASLRQALAVPQFQAFRFARANRFLGRYLRHGEGYPDWSLRLFDRRVARWSADAVHEKVLCETAVGTLAGDLLHDSAETLESYLTKQNRYTSLAAGMADPDGRPVSAGRLIASPLLRFIKFYVVRGGFLDGLPGLVHIAIGCFNSFVKYAKIRERQLRRG

SEQ ID NO: 3284 - protein, 253 aa, Luteimonas sp.
MNSPAPRAALSAVVTTFDNAATLERCLASLAFCDEIVVLDSDSTDATREIAQRHGARVDVEPFKGYGPQKQSAIDRARHDWVLLLDADEHLSEAGRAAIERELRAPRADGYRLPRQEWLFWRWPHPLTRPNWQLRLFRRSRGRMNAVPVHAAPEIDGEPVDLNAPFLHYGEPRLQDRVDKVNRYSSGLLERKRRPALLGMRLLLYPPFAFAKLYFGKRYFLNGWAGYFAAKTQAFYAFLKYAKILESQRKGDL

SEQ ID NO: 3285 - protein, 256 aa, Dechloromonas denitrificans
MPATRQPLSIAIITLNAASQLAACLDSVRFADDIVVIDSGSTDGTQALAASYGARVIEQDWLGFGPQKQLAVEAARHDWVLCLDADERVSPALQASIKNALNNPSTAAFRFPRCNRFLGRYLKHGEGYPDWSLRLFDRRQARWSTDAVHEKVVTEAPVGTLTGDLLHDSAESLATYLTKQNRYTTLAAEMALQAGKRTSFARIALSPLVRFIKFYIIRQGFRDGLPGLIHIAIGCFNSMMKYSKMLERRNTDAALR

SEQ ID NO: 3286 - protein, 253 aa, Gilvimarinus polysaccharolyticus
MRLSAVLIVKDEAAKLADCLASLQFVDEIVVLDSGSCDRTTEIAHEYGARVESNSDWQGFGVQRQRAQALATGDWVLMIDADERVTPELRASIELAICNSPTIYYVNRLSWCFGRFMRHTAMYPDWIPRLYPRTQAGFDDTRVHERLSNPQSLPQQRLSGDLLHFVYDDVRHLVNKSALYAEQWAIARAEAGKRCSLLSAVTHGLSCFIRMYILRRGFLDGGQGFLIAVVMSHSTFVKYADLWVRTRPNTNSP

SEQ ID NO: 3287 - protein, 262 aa, Unknown
  Description of Unknown: Desulfobacteraceae bacterium sequence
MSSEKKRTLAVALIVKDEAAHLNDCLETVKDLADEIVILDSGSTDATLEIARNYTDKVYSSNHWPGYGPQRRIAQTYVTADYLFWLDADERVSPELAQSIRSVLVSPEDRTVYTISRLTWLFGRYIRHGGWYPDRVIRMYPTDLTRFDDALVHEKVEVDNTIAVKPLKGDAIHYTYDDLHQYLVKSARYAKAWAEQRHRQGKTTSITQGLLHGTAHFIQMYILRAGFLDGKQGFLLAVLSAYASFSKYADLWTRPRIARSTD

SEQ ID NO: 3288 - protein, 276 aa, Streptomyces guanduensis
MTKLPLVVAIPTKNEAENIARTVASVIDHVQAVVVVDSHSTDDTCKIAASRGAEVVEYTWDGKYPKKKQWCLDHVRPEIPWVLFLDGDETPSAELLGELHTVFAAGPPSVAAFDIPLGYWFAGRRLRHGHTIVKRALMDRTRCRFPEVGDLDAPGMGEQEGHYQPLAPSAARLRAPIEHEDLDPVRTWFERHNRYSDWEAWLELNPAVKEEIRQAKTRQGRIFHKAPFKPALSFAYAYVYRRGFLDGRAGLDYALAMSFYRWQIALKARELRRGRG

SEQ ID NO: 3289 - protein, 256 aa, Ralstonia pseudosolanacearum
MPGKLTATILTRNEAHNIGDCLDSLAQLADEVIVLDSGSTDATRDIARARGAQVIEDNGPWPGFGPQKNRALDRATGAWVLSIDADERVPPELAQEIRAAMARADADAYAIPRLSQFCGAWVHHSGWRPDYVIRLFRRGKARFSESLVHESLQVTGSVARLRTSLLHYSYTSMDQVHRKSVQYAEAGARDLAQRGKHVGALSPALHGAWAFVRTLVLRRGFLDGGTGLAIARMNATVSYRKYRRARELASGANHRP

SEQ ID NO: 3290 - protein, 302 aa, Hansschlegelia sp.
MIPVSVVIPTRNEAANLGYCLEALRRFDQVIVVDSGSIDATETIARQHNAEIIPFAWNRQYPKKKEWSLLHPAVRHNWVLMLDADEIVSDKLVEEIASTIARGPRFAAYFILGRFVFLGEPLRFGHCNCKIMLVDRRRTRFPRPDDLDIPGGWEVEGHYQPIIDGPIGRMRASLLHWDRKPAAAYFGRHDLYADWEARLAKRGTLTKLASTESLARRLMKTAFRKTPARWLVAFLHSYVLKLGFLDGAAGFHFAMARAFYYWQIALRGRTLAADARMAEEAKGESAVAVRGTAASPAAVGRS

SEQ ID NO: 3291 - protein, 283 aa, Unknown
  Description of Unknown: Microgenomates group bacterium GW2011_GWC1_38_12 sequence
MPRALSSVKDFADETVVVDMHSDDKTQDIAKKFGAKVFEHDRTGYVEPARNYAISKTTGDWILVLDADEEIAKFLADKLRQISTDSDSADYYRLPRKNIIFGKWIKHSRWWPDLNIRFFKKGKVSWNEIIHSVPTTRGKGLDLEPKVENSIIHYHYETVEQYIERLNRYTGEHAKNLIKDGYKFDWSDLLRKPVNEFLSRYFQGEGYKDGLHGFALAELQAFSEFVMYLKTWQLEKFIGNHIEIEEVVNEMKEAENDLHYWESDALLKEVGGLKHRIKRKLKL

SEQ ID NO: 3292 - protein, 262 aa, Paraburkholderia unamae
MKNTTLGVAIITKNAALRLAQCLDAVAFADDIVVIDGGSTDGTADIARAHGARVIEETAWPGFGPQKNLALDALATDWVLSIDADEVVSPELAASIRAAIAAPQADVYAVDRLSSFCGTWIRHSGWYPDWIPRLFKRGRARFSDDLVHERLVFDASAQRLTGKLLHYSYEDFDAVLRKLDAYSGAGARQRAASGKSGSFGKAVVRGAWAFVRTYVLRAGFLDGRAGFQIAVFNAETVYYRFLKLALLNGKDEGSARRPVGDQ

SEQ ID NO: 3293 - protein, 202 aa, Ewingella americana
MADKKRLSVVLIARNEADLLPECLESVAWADEIILLDSGSEDATQDVARRYGAKVFQNTVWPGFGKQRQLAQSHATGDYILMIDADERVSPELRQSIENVLHTPRDNTVYSLGRSNFFLGRFMRHSGWYPDRVNRLYPAAFRYNDDLVHESLKTENASVIPLQGDLLHLTCRDLFVFQRKQLSYAQAHFVLRCVSLRHPSGA

SEQ ID NO: 3294 - protein, 309 aa, Unknown
  Description of Unknown: bacterium DOLZORAL124_64_63 sequence
MLSLIAIAKNEAAGMADFLIHHTPLCDEIIVVDTGSDDGTARIAEAHGAKVFTFAWCDDFAVARNFSLSMATCAWVMYLDIDERIDPSDFPRLRQAIKGRPTCYQLPQWNYYNDPRHMEWQPTPGRYPEAELDHRGFFQAEQYRLFPNGHGLRWEGRVHEDMSAAVAASGLPRRMLDVPIHHYGYVQSDERNRSRNTFYGRLVRRNVDDRPEDPKALLELGYILIQEGQSREAIPVLEKAVAMGAKGPVLCRVSSMLATLYQADGQPDEAIDILYRCMLENPSWLFGWRDLITMLMDGGHWEQASLGLQ

SEQ ID NO: 3295 - protein, 253 aa, Polynucleobacter sphagniphilus
MPTLSVILITRNEEANLGDCLASLEGIAQQIVVVDTNSSDRTLEIAKNHAAVISSPPDWPGFGPQKNRALDLASGDWVLSLDADERLTPALRAEIQRAIAHSAHVDCFAIPRLSWYCGRFIRHSGWSPDYVKRLFKRGTARFSDDLVHERLIPSGQVARLENPMLHFSFMNYSQVLQKIDRYSTASAQQAFLRGKRSSPLKAILHGAWAFFRTYFFRAGFLDGYQGLTLAISNAEGSYYRYIKIWLLQNNQEL

SEQ ID NO: 3296 - protein, 250 aa, Pseudoxanthomonas sp.
MNAPLPLSGVVISKNEADRIGRCLRSMQGVCAEIVVLDCGSEDGTVALATSLGARVEHQDWLGFGAQKNAAIALATQPWLLLLDADEWLADGAADVLRALFAEGRVEQADAWRLRRENWFLGRKLHGHECMARLVRPSHRFLPMRVHEKPDLAGRRVADCTATIEHDTARSLVAHRTKNDRYAQLWAEQRHADGRHCPPWSPWTHAAAYWLKMYLLRAAWRDGRQGWQFHASHARAVVRKYRTLHRLGRA

SEQ ID NO: 3297 - protein, 255 aa, Unknown
  Description of Unknown: Betaproteobacteria bacterium CG2_30_68_42 sequence
MPSSHTPVSAVLITRDAAAQLPAALASVAFCDEILVVDSGSTDATTALARERGARVLVQPWLGYGPQKQWAVSAAAHDWVLCIDADERVSERLRGAILAALARPRFPAYRFARRNRFMGRALGHGEGYPDWSLRLFDRRSFRWSDDAVHEKVTGEGEVGRLEGDLLHESAESLEDYFARQNRYSSLAAQAAHARGVRAGAARILLSPLARFLRFYFLRLGFLDGLPGLVHILIGCQASFAKYAKIAALQRKDGDG

SEQ ID NO: 3298 - protein, 727 aa, Dactylosporangium aurantiacum
MTHIPVSVIVAAGGTPDDFHACLQSLRPTLGVRDEVVCVLPPDRPDLRAELRGETWLRVLEPAAGSGVAERWTAGVDATRHPVVVLVDGDVILSAHWLDPVLEPFHDPAVVATGPSCQHTFGPQQVQLPDEAMTSPAAFKTHARQWRQEHRDEFTDVDRLGPVCVAIRRDALAIAGGPTTDLPWDALAAQGRITIAHAALVAHVASPACGLRTDLADAPDAPLLSASLIVKDEADVLGPSLDAIRDLVDEIVVYDTGSTDDTVAIARAHGARVVEGFWNDHFGDARNRSLEHCRGRWVLWIDADEVFTGDRRTVREAVERADGRAFLALIENREGHEGGGGSSAIYYPRLFRRAQARLYGRLHEQVLDRITGQGFMGPHLPELVLDHSGYTRLRRVVKSKTERNLRLAQLAVDDVNGMTAVGNLARSQISSGHVEEAIATSRRGLAEAKERSHRVLFLKILADAYLALGRIPEAAGVIEDLRAIATNPATVGEHEVKLRFVEGDYERALEIIDELPESGVNDLLYGVGRDRFAGLRIDALSRLDRHTEAAFHLRETLRKGQVPVPVARMAQILGAAGGSLAEVAELLPRSGVRGLLFGIAEAPPEAADELLEALWRRYPGEPTVLTVAARVGRLVPLIRAMEWSARLRQHGFPERCTLLALSGDARRTPRERTLAAAIALEMFHDEAALPLLGEALAAVPDEQSAPVLEEMRILAPRVSDSIELADA

SEQ ID NO: 3299 - protein, 265 aa, Hydrogenophaga intermedia
MTTEAEKRPTLCIGILAVNEARRIAACIASARFADQIVVIDSGSTDGTREVAAEAGAEVHLRADWEGFAVQRNRLLPHVRCDYVFFLDADEIIPPELAQEIQAAVRSGDDAVWEVQWNQVAYGRPLTLMKSTGGIRRLFRMDILSHFDGVVHEGGVLKRPEVPIRRFRHRLLHYSRETVYGSLLKLAQYVQLGAAKRAEKGRRGGVLRGMASATAIFIRLYIIRRGVLCGPEGFLFCFFIALECFFRYAALRYDKLEQGAALARR

SEQ ID NO: 3300 - protein, 264 aa, Lutibaculum baratangense
MGPRLPVSCFIIAKNERDRIGAVIAAVRDLVDEVLVVDSGSTDGTQDLASSLGARVVHNDWHGYGPQKRFAEEACRNDWLLNLDADEVPDETLLRSIAALFAAGGPDAKFHAFKIALVYPGEDRPRRFADGPSPVRLYDRRAGRYSDSPVHDRVVLPKGARVGRLHGEAAHFSYRSFGALVEKLNGYSDLQARTLKRGGRTRLLVRLPFEMPLAFVKYYLARRHILGGWRGFVFASINAFYRFLRLAKMLETSDRGSGGREVGD

SEQ ID NO: 3301 - protein, 317 aa, Indioceanicola profundi
MDRIPVTAIVLTRNEAENLPACLDSLARFAEVVVVDSDSTDGTAAVARDHGARVVRFVWNRAYPKKKQWSLDELDLLHDWVMFVDADERVTPALADELAALFAAGPMSLAYFVRARPVVMGRVLRFGAGFRKIALLNRRRCRYPVCDDLGVATMWEVEGHYQPTVDGQIGSLRQPMLHDDRKPLYQWFERHNRYSDWEVWLDGQERRLPVYRAETRARRLAKRVFARLPCRPLLVFLAVYIARLGVLDGGPGLHYALSRAFYYWQVDYKRRWTDAERKAGRDPDLAYSSSDSSSVASPASALISSNARRRTFSSGMR

SEQ ID NO: 3302 - protein, 526 aa, Kineococcus rhizosphaerae
MVGDRIVSVFISACYIVKDEERVLAASLDAVAPFVDEIVVYDTGSSDGTLEIARSRGAVVVEGHWDDDFGAARNRALEHCRGEWVFSVDADEVVQGDPRAFRTLLRRSAVADVVRVQVANAVWDSVDDDPLTVQMVRVFRRRTCHWTGALHEQVVRRGGERLSGTVSPLVLLHSGYTVQTMAEKGKTDRNLALARRELDRALEDGHHDVTVHRVNFARSALSSRHFQEALDALEPLDGQYAVQPPPADWLPLAASASYCAIQAAASLGRFETARSWIERLQSWGERPGALTRVRASVAMAEGDFRGALDLLRDVTEVTDLRGGRVTEVSLLLDTANCHAALGEYDQAADAMLEHLRRGAGDMPAPQMLAIVHGAHLPVEEFAAAVPPALVVPLLGQLSTLPFAEVSDVLEALLATAPSPAPVLAAAASMWPSMSLPEALPWSLRLREAGHPESCPLLAIAGSAEREPVDRLAAAAVLHEVGDERALSFVEHVLEGWEEATWPLVEQAVGMYSPRLRDLLAASVVEA

SEQ ID NO: 3303 - protein, 290 aa, Streptomyces sp.
MEKLPIVVVIPTKDEAENITGTVRSVIGHFAHVVVVDSDSADGTRALAEAEGAEVVPYTWDGAYPKKKQWCLEHVHPETDWVLFLDGDESPSPALLAEIRHIFSPPPGRTVRPAAFDVPLGYWFAGRRLRHGYTVVKRVLLDRTRCRFPEPDDLKAPGMGEQEGHYQPLADPVVRLAGPLEHRDLDPVRTWFERHNRYSDWEAWLEQHPQVREQIRRAKTRQGQLFHRAPLKPLVSFAYAYLYRRGFLDGRAGLDHALALSFYRWQIGLKARESAPSRDSRDGASGRGGH

SEQ ID NO: 3304 - protein, 250 aa, Pandoraea sp.
MPLTVTILTRNERHNIADCIASVQSLASQIVVLDNASTDDTTDIARAAGAEVHVTNDWPGFGPQKNRALSLATQPWVLSLDADERVTPELAAEIAAAIASSDRGGYTGFRMPRLSQFLGHWVRHCGWYPDYVLRLFRREAGRFSDNLVHERVIVDGEIGTLAHHLLHYSYTEVRQVEDKVQRYARAGATEMALRGKRVSPLKPWINGGWAFVRTYLLRRGFLDGATGAAIARMNARSAFLKYALLRRADA

SEQ ID NO: 3305 - protein, 257 aa, Polynucleobacter difficilis
MPTLSVILITRNEETNLRDCLASLGGLAQQVVVVDTASTDGTIAIAQEFGATIAQPVDWPGFGPQKNRALDLATGDWVLSLDADERLTPALQAEIAGVLEKPGNSTCFAIPRLSWYCGRFIRHSGWNPDYVDRLFQRGSARFSNDLVHERLIPSGAVVKLKNHMLHYSFMNYSQVLQKIDRYSSASAEQAFAKGKRSSPLAAIGHGAWSFFRTYFIRLGFLDGPQGFSLALANAQGSYYRYMKICELAKASQVEQKP

SEQ ID NO: 3306 - protein, 259 aa, Unknown
  Description of Unknown: Betaproteobacteria bacterium sequence
MNAAPRAPLSAVLITRNAAAVLEPCLASLAFADEIVVVDSGSSDGTAEIARRHGVRVVQREWLGFGRQKQFAVEQAKHDWVLCLDADETVSPQLAASILAALARPVSPVYRMPRRNRFLGRWLAHGEGYPDWSPRLFNRMNARWSDDLVHEKVLYAVTPGTLQGDLMHDSSDDLTAYLDRQNRYTTLAARQAYELGRGAGFFHLLLSPVVRFFKFYVFRLGFLDGMPGLLHISIGCINSYLKYAKLIELHGRDRRDRLE

SEQ ID NO: 3307 - protein, 224 aa, Unknown
  Description of Unknown: Phycisphaerae bacterium sequence
MVNKIYVVDSGSTDGTLAVCEKHGAEVVHKPWRGFAKQKEFAISLAQTEDWILLLDSDESLEPSLQEGLRLAISNAAPATRAIEINRKMWYVGGWINHVGFPDWVVRCGRQGALKMIHKPVHERLEADGPTVRAKGICRHDSWDGICDALERGAKYARLSAEVRKPKKFPLLYSFCSAFAIVFKHGVLRRGFLDGWRGAVALVMYAIGRFANTMAAFERGKRGD

SEQ ID NO: 3308 - protein, 262 aa, Macromonas sp.
MLSPNRPSLCIGVLTLNEAHQIERCLKSAQFADQVIVVDSGSTDGTPELASRMGAQVQHYLDWQGFGPQRTRLLQHVQADYVFFLDADEVISPALRDELLDAVSKNANVVGKIRWNTFAFGKELRYFVNRSSLERFFKVDNLERYEGAVHEHAVLKKADAPRFVFRAKLDHHTRQTVKGSLEKLTQYAMLGASKRAQRGKRGGVLRGLLSSTVVFFRLYVLRLGFTGGGAGFLLCWFVALEFFFRYAALHYDRDTLSGCIKR

SEQ ID NO: 3309 - protein, 256 aa, Chania multitudinisentens
MSHRKSLSVVIIAKNEAGLLTECLQSVDWADEIIVLDSGSIDGSAALAESLGAKTFIHTDWQGFGKQRQKAQSYATQDYVLMLDADERVTPELRQSIEHVLITADDSVIYSLGRLNLFLGRFMRHSGWYPDRVNRLYANQRYRYNDDLVHESLNTQGAKVVALQGDLLHLTCRDFFAFQRKQLHYAEQWATQRYQAGKKCGYLSILTHTLGAFCKTWLLRAGFLDGKQGLLLAVVNAQYTFNKYAALWALGRNTTQ

SEQ ID NO: 3310 - protein, 251 aa, Unknown
  Description of Unknown: Burkholderiaceae bacterium sequence
MTTLSVIIITRNEAGNIGDCLDSVSFADEIIVLDSGSTDATRDIARAKGAKVSVADDWPGFGPQKNRALALATQDWVLSIDADERVTPELAQAIVRVLQNPGARAYKIARLSNFCGRWIKHSGWWPDHVLRLFQRGTARFTDAPVHESVRADGAVAILDGHFLHYPYADMDTMIAKINRYSSDAARMMHARGKATSVLGVLGHTFWTFVRLYIIRRGFLDGKEGFILAMTAAAGSFFRYSKLLFLTRNKQI

SEQ ID NO: 3311 - protein, 251 aa, Amantichitinum ursilacus
MPTLGVALITKNAAAHLAPCLQAVAWADRIVVLDSGSTDATLEIARAHGAEVHINAQWPGFGPQKNRVLALLDTDWILAIDADEVVSPQLAASVQQRVANTTTAGDVYSLSRLSNYCGRWMKHSGWYPDHVARLFRRGSAHYSDDLIHERLVYSGPAPALAGELLHYSFDNLDQVLDKVNRYSAAGAEQRLQRGQRASLGKAVFKGFWTFVRTYFFKAGFLDGREGFILAVSNAEGAYYRYLKLMYLQERP

SEQ ID NO: 3312 - protein, 263 aa, Unknown
  Description of Unknown: Photobacterium jeanii sequence
MSTTNRATLSVVLIAKNAATTLHACLESVQWADEIILLDSGSDDNTTEIASQFGAKVYSNLDWQGYGKQRQIAQQYATCDYTFMIDTDEAVTLELKASIEAVLTQSIKNNVIYSCARRNWFLGRYMYHCGWYPDRVMRLYQTQERSYNDNLVHEAVDTTGATVVNLDGDLLHQTCTNFADFQQKQLTYARNWAQDRFQQGKKVGFGSAFSHAIGAFLKTYLLRKGVLDGAHGLLLSIIIAQYTFNKYIALWSLQQSVTNKSES

SEQ ID NO: 3313 - protein, 247 aa, Klebsiella pneumoniae
MSNRLSVVMIAKNAADLLPDCLGSVSWADEVIVLDSGSTDNTVELARRLGAQVYTHTDWRGYGIQRQRAQDYATGDWVLMIDTDERVTPELRQAILKVLDAPQRGAIYSIARRNYFLGRFMRHSGWYPDRVLRLYERARYRYNDNLVHESLDSLGAEVIPLTGDLLHLTCRDFAGFQQNSWRMPPRGRLSVTRKARRPRWQGFSAIRWARSSRRCYCAVGCWTVNRDGYWRWSTRSIRLRNIPSCGR

SEQ ID NO: 3314 - protein, 262 aa, Chitiniphilus eburneus
MTSPTLGVALITRNAARRLPECLRALAFADRIAVLDSGSDDDTVAIARAHGAQVETSPDWPGFGIQKNRAVALLDTDWVLLIDADEVVTPELAASIRAVLAQPVHEVYALNRLSSFCGHWMRHAGWFPDWIPRLFRCGVARFSDDLVHERLIFDGAVGRLDGLLMHYSYEDHADVLRKLDAYSTAGAQQRFAQGQRGGLGKAVLRGGWAFMRTYFIKRGFLDGAAGFQVAMFNAETVYYRFLKLGGMKRSRESTETTPATLR

SEQ ID NO: 3315 - protein, 256 aa, Unknown
  Description of Unknown: Rhodocyclales bacterium GT-UBC sequence
MPATRQPLSVAIITLNAASQLEACLHSARFADEIIVVDSGSTDGTQALAESHGARVIQQDWLGFGPQKQFAVDQARHDWVLCLDADERVSPALQTAIEAALAEPTHGAYRFPRCNRFLGRYLKHGEGYPDWSLRLFDRRQARWSDDAVHEKVVTNGPVGSLSGDLLHDSAESLASYLTKQNRYTTLAAEMALAAGKRPSFARIALSPLVRFIKFYLIRQGFRDGLPGLIHIAIGCFNSMMKYSKMLELRNSDAAVR

SEQ ID NO: 3316 - protein, 256 aa, Enterobacter hormaechei
MSTRLSVVMIAKNAADLLPDCLASVAWADEIVILDSGSTDNTADVARAAGAKVFTDTDWQGYGIHRQRAQGYATGDYVLMIDTDERVTPELRQAIQTVLAAPQPGAVYSIARRNYFLGRFMRHSGWYPDRVMRLYARERYQYNDNLVHESLACDGAQVIPLTGDLLHLTCRDFASFQRKQLNYATAWAQERHTRGKKATLTGIFTHTLGAFLKTLLLRGGVLDGKQGWLLAVVNAQYTFNKYTELWALNRGYSEKT

SEQ ID NO: 3317 - protein, 532 aa, Moraxella canis
MNAAKPYRLSVVMIVKNEAHNLALSLPSVAEFADEIIILDSGSTDNSRDIAESFGAKWFVNTDWQGFGKQRQLAQSHATGEWILALDADEVVTPTLKNSILQAIKNPPTNTVYGIKRLDFVFGHQIDNALWGVKAHWRLYPKHFGYDNNLVHESVVLTGANTAKLDGFLEHHTAPTPKFWLEKRLDYAKAWADDRHTQGKTGKFYKVVLNPLWAFVKQYVIDGRFLQGRYGLIYSLMFSQYTFNKYACLYDLSHNQAEQAFLNSVAMTKNLQPIDLSQKKSTLSLVMICKNESKHLKACLDTVHDIVDEIIILDSGSTDNTRQIAESFGAKWYVNTDWQGFGKQRQLAQSHATGDYVLVLDADERLDQTLRESIAKVLSLPVQTDKVFSVARVNTFCGVEVQPRRWYTDKLARLYARKFEYSDLNVHESLDQQGVPSQVLDGYLPHITNDDLHHFLVKNIRYSHDWAQEKHAKGKQVSLFGIMGRSLVSFLREYVLRADFSGGAYGYILAAASMGYTLDKYIMLWQMNQEKS

SEQ ID NO: 3318 - protein, 277 aa, Azospirillum lipoferum
MIPVSVVVMTRNEAANLPLCLPRLDRFAERFVVDSGSTDGTPAIAADRGAKVVPFQWDGRYPKKKQWCLDHLPFAGDWVLFVDADERPTPALVGEIAALMAEGPDRAGYWIDGRPVLHGRPLRFGCWNRKLALFDRRRARFPEISDLDVAAMWEVEGHYQPVVAGPTGRLRHPMDHADEKPLSAWFDRHNRYSDWEAALRGDGRMERLIDNEAGRRRLMKRLLHRVPCRPLLVFLHAYVARLGLLDGRAGFDHALARAFYYWQVAVKTRAAVVRRAP

SEQ ID NO: 3319 - protein, 278 aa, Pseudonocardia endophytica
MTRVPITAIILTKNEARVIERTIHSLLCLDQVVVVDSASEDGTPAIARGAGADVVDFLWDGQYPKKKQWALEHSDIRNRWVLFVDADEIFTRSLLDEMGQQILCRSSSADSPGAYSVEYAYRFDGRILHHGHRVRKVVLLDKDRCHFPVVDDLNVANMWEVEGHYQPVIDGEVGALSGEVVHDDVDPLYSYFARHNRYSDWEAHLRVNKSAQRQVRASKTLQGRIFDRLPLKPLLFFVYSYVLRAGFRDGIPGLNYALSLAFYYWQINVKTREARRAG

SEQ ID NO: 3320 - protein, 253 aa, Unknown
  Description of Unknown: Burkholderiales bacterium GJ-E10 sequence
MPPISAVLITRNAASQLEACLDAVSFCDEVLVVDSGSTDETVTIAQRHGARVIQTHWRGFGPQKQFAVEQAGNDWVLCIDADERVSKRLQGAIRAALAAPAFSAYAFPRCNRFLGRYLRHGEGYPDWSLRLFDRRHARWSDDAVHEKVVADGAVGRLHGDLVHDSAETLEHYLEKQNRYTTLAAQAAHARGKQAGAAQLLLSPTLRFFKFYVLRLGFLDGVPGLIHILIGCGSSFLKYAKLRALQDRTSAPRQ

SEQ ID NO: 3321 - protein, 270 aa, Verminephrobacter eiseniae
MSEAGAAPPPTLTVAVLTHNEAHRIEACLRSAAFADQLLVVDSGSEDDTVAMARALGAEVHSAPDWQGFAVQRNRLLAHARGDYVFFLDADEVMTPDFARELQAIVRSGAQAVWSIRWRIVAFGHELRRFRAQSYIERLFVRALLEEYTGVVHEQARLYPLPGGAAVPRRRIEARLLHYSRTTVRGSLEKLTQYAMLGAAKRAGQGRRGGVLRGLASGLWMFLRLYLVRLGFLCGGAGFLYCLFVALEAFFRHAALYYDRDSLTGRVIRR

SEQ ID NO: 3322 - protein, 250 aa, Unknown
  Description of Unknown: Bacteroidetes bacterium sequence
MHPFSVVIIARNEAHDIGRTLEPLRALTDDIVVVDSGSTDGTQDIARSMGARVIETEWLGYARTKNLGNDAARHDWVLSLDADEVVSPELARSLQAWQPRPDTAWAVDRLANFCGRWVWHSGWYPDWKVRLFNRHEVRWVGEYVHEHLDLPAHYRVERLHGKLWHYSYRSEADYLAKMEQYTRLSAEERFRRGQRPVWWRKHLGPAFRIFRTLVLKQGWRDGRLGWKLARLDARMVRRRYELLEEMWRMA

SEQ ID NO: 3323 - protein, 306 aa, Neorhizobium sp.
MSSVAVLILTHNEEKHIGRALRAVAPFASEVFVVDAFSSDKTVDIASAHGANVLSNPWTNYSKQFQWGLDNAPIKADWVMRLDADEVIEPELAEEIATKLPKLGQDVAGVNLKRKHIFLGRWIRHGGRYPLILTRIWRRGQGRIEDRWMDEHIMIWGGRTVLFDAPFSDNNLNDIGFFTEKHNKYATREAVDVLNQRYGLFLQDVVLKTEASSFQASAKRFLKERVYNRVPFPISTLCYFLYRYIFQLGFLDRREGLIYHFLQGYWYRFLVGVKVLELDRAIRQFPTAEEKCIELARLTKLDIVSD

SEQ ID NO: 3324 - protein, 260 aa, Halomonas sp.
MSIAAVLIVKNEQDHLRACLETLAWVDEIVVVDAGSTDGTRAIARDFTDKVAVEDDWQGFGRQRRRAEALVESDWILMVDADERVTPALRESIQAALSEGAPAIYTLPRLSWCFGAFIRHSGWYPDRVARLYPRGRAGYNEALVHEKLENPEGLAVRPLEGDLLHYTYRDLRHYLEKSAHYAQAWAEQREARGKRGSLAAGIGHGIGCFLRMYLLKAGFLDGRQGLLLALLSAHSTFAKYADLWIRTRTSPPPEDGARDR

SEQ ID NO: 3325 - protein, 257 aa, Gibbsiella quercinecans
MRQRKTLSVVMIAKNEAGLLAECLGSVAWADEIIVLDSGSTDGTATLAAELGAQVFSHTDWQGFGKQRQRAQSHANCDYVLMIDADERVTPELRQAIEQVLTAPDDNAVYSLGRRNLFLGRFMRHSGWYPDRVNRLYARQRYRYNDDLVHESLNTNGAKAIALHGDLLHLTCRDFFAFQRKQLHYAQEWATQRHQAGKRCGYLSILTHTLGAFCKTWLLRAGFLDGKQGLLLAVVNAQYTFNKYAALWALNRHYSEK

SEQ ID NO: 3326 - protein, 517 aa, Blastopirellula marina
MDRPMSMEANPRKLTVAMIVRDAAETLAATLDSILGIADEVVLVDTGSQDDTIAVAQSHGVTAIERKWEDSFSAARNFALTHVTGDWVLWLDAGEKLDVEEAQSLRQFVNDEADPSLAYVMIVKVPQTAGGIGSEQIGKIRLLPNNGKIRFEGRVRETPLVSLAECEMQLAALPFPIRRDLIEHDPQRKSRKAVRDIQLVNLEIHEIGPSARLLICMAEAMQALGDHKNALTFYQQAGQLAELNSTESLESYYGILTAFDEQENGLENQIQTCLAALETYPLDAQLLCAMGGYLQSQGHLELAIRSFETAYKYGQINPETWHIEDIDQIAVSCFALATQLAGQPEQAEEILNQALVEHPGSIRLRRQLIDMHVKYARRTEAMNQVQLLPESFPNREAYRSAVRGAAAAAQKNWVAARPYLETAFRNGCREPLCLRWLSISLLALGLQEEAIEILQVWRTLDATSLEPQQLLGSIEQANANLTVPGQSRTIRVDSSETSSKKSHAAAEAATLRDTNRI

SEQ ID NO: 3327 - protein, 483 aa, Sulfobacillus benefaciens
MKKSPRFTHIRKHLEAGRFQEAISLIRRTLTAHRADPEAWVYLAQALEKTSFKDYAGLAYERAWILDPRAEWISRTPSYPPRVSVADAPSWLQELLNVPLLSLSAAIIARNEAQSLKRCLEAVQPAVDEIVVVDTGSEDQTPSIAQDLGARVYSCPWTDNFSAARNFAMEKVRTDWVFWIDADEIFDPDDIHVPRVVAGLLDNCNPPVILRVVLINNTGSETHYNFDVSRLFPTRFGLRFRGRIHEQIGPPDGDLYAAAYNHPLVRIRLHHDGYHPDLIPRKLERNIRILRLAIHDNPDDVASWGFLGRELYLQGNLMEAVDVLYQAERMASNVAMYGRLPEIQAYLADALIQLGRLDEAITVSRRAVESNPQFPPGWYNYGKAQLMMAWQFSESARRALIAAREQAPLYEGIITYDPQIPRWKSLVALADVAKLQGDWMAAVRLYQQARNEQAPDQAVHVPLQHIRDQLSQLQNILGQDEKD

SEQ ID NO: 3328 - protein, 280 aa, Unknown
  Description of Unknown: Chitinophagaceae bacterium sequence
MPAATPISVVVITRNEAANIVDCLRSARLLSDDIVVVDTGSTDATTRLAALCRAQVHNLSWQGYGAARNLGAAMARHDWILALDADERLDENLIIQLKNQILKRGRVYRFRRRNHWEERPIRFGTLGFERIARLYHRGDARWNGYAVHERLTGAFRVQDFPGSIQHFGIADPDFYYRKKEHYALLSALTYARQGKKAGWLKRFVAPLFDAGKSYLLLGGFLDGAIGARLALTTFRYTARKYALLHRQRERLLELQPGQGVPEEAACTIAELRPLPSSAAS

SEQ ID NO: 3329 - protein, 254 aa, Unknown
  Description of Unknown: Metallibacterium scheffleri sequence
MSRPAISACVITLNEADRIEACLAALAFCDDIVLVDSGSSDATRELAARHGARVFTRAFDGYRAQKDFAVQQARHDWILCVDADERVSAELRASIEAARDAGFVGAHGYRCARATRYFGEFLRHGNAYPDRVLRLFDRRHGGFRGVREIHEHVEVDGAVALLRGDLLHEAYRSLDDQLARYQRYARMMAEHLHAQGRRARLRNIVLNPAWRFLRGYVLRGGFRDGWRGLFYAYVEAGYVRQKFLRLWLLQHGAG

SEQ ID NO: 3330 - protein, 251 aa, Unknown
  Description of Unknown: candidate division Zixibacteria bacterium sequence
MGTISAVIITQNEESNIKRCLDSIAWVDEIIVVDSQSADNTPKIAAEFGAKVYDIEWCGFGPAKGFAVERATCDWILSIDADEELTEELAAEIKGVAESSDSLYGYEIPRMTNFLGKWIKHSRWYPDYVLRLFRRESGRFTDSLIHEKVIVEGDVGRLKNQLLHYSYPDIDTYFVKFEKYTSLKARELYKDGKRFNIGGFVVKPLAAFCRHYITGLGFMDGFEGFLIALFSAFGVVTRCVKLRSLEKADRQ

SEQ ID NO: 3331 - protein, 258 aa, Erwinia sp.
MPTRQPLSVVLIAKDAAELLPECLTSVSWADEIILLDSGSSDGTKEIAERHGARVFHSTEWHGYGKQRQLAQSYASHAMILMIDTDERVTPELRRSIERVLEQPASETVYSIARRNLFLGRFMRHSGWYPDRVTRLYPRSYRYNDNQVHESLDTAQAQVRPLQGDLLHLTCRDFSAFQWKQFAYAEAWAKQRHQQGKRCGIVAIFGHTAGAFLKTLVLRAGFLDGKQGWLLAVVNAQYTFNKYTALWALNHASRNGRL

SEQ ID NO: 3332 - protein, 249 aa, Unknown
  Description of Unknown: Alphaproteobacteria bacterium sequence
MPHLSAIIITKNEAANIGDCLDSLAFCDERIVVDAASSDGTMMIAKQKGARVAAHSWKGFGPQKNYALSLAQGDWVLSIDADERVSPELAQAIRAAIDNPKADGYEIPRRSSFCGRMMRHSGWFPDRVLRLFRRQKSRFTDDAVHERVVCDGPVARLNEPLLHYPVARLEDAIRRIDQYSTLGAEQLAISDRKISAFSGVAHGIGTFLRVYLLKLGFLDGAAGFMLAVANAEGAYYRYMKAWLARQRRE

SEQ ID NO: 3333 - protein, 265 aa, Pandoraea pnomenusa
MTETSLSAAPLSAAAAQRLPLTVTILTRNERHNIAECIASVQSFASQIVVVDNASTDGTADIARAAGAEVYVTPDWPGFGPQKNRALSYATQPWVLSLDADERVTPELATEIAAALGDTSRAGYRMPRLSQFLGHWVRHCGWYPDHVLRLFRREAGRFSDNLVHERVIVDGAIGTLSHHLLHYSYTEARQVEDKIQRYARAGAKEMALRGKRVSPLKPWINGGWAFVRTYFLRRGFLDGATGAAIARMNARSAFLKYDLLRRGES

SEQ ID NO: 3334 - protein, 256 aa, Unknown
  Description of Unknown: unclassified Lelliottia sequence
MSTRLSVVMIAKNAADLLPDCLASVAWADEIVLLDSGSEDNTTEIARAAGAKVFVDTDWQGYGIQRQRAQSFATSDYVLMIDTDERVTPELQQSLLSVLAAPQPGAVYSIARQNYFLGRFMRHSGWYPDRVMRLYERERYQYNSNQVHESLECASAKVIPLAGDLRHLTCRDFASFQRKQLSYATAWAQERHQRGKKASIAGIFAHTLGAFLKTLILRAGVLDGKQGWLLAVVNAQYTFNKYTELWALNRGYSEKV

SEQ ID NO: 3335 - protein, 259 aa, Zobellella maritima
MSARPTLAAVLIVKNEAENLADCLATLDWVDEIVVLDSGSTDGTRQVAETAGARFFVNDDWPGFGRQRQLAQSHVQSDWVLWVDADERVTPELRTSIEAVLARPTTNTVYAAARLSWVFGRFIRHCGWYPDRVLRLYPKALTGYNDALVHEKVELGAGIKTARLKGDLLHYTYRDLEHYLVKSAGYAAAWSRQRAERGKRGSLSQGLLHGIGCFLKMYVLKAGFLDGKQGLLLCLLSAHSTFVKYADLWIKTNTERPNP

SEQ ID NO: 3336 - protein, 278 aa, Unknown
  Description of Unknown: Candidatus Dadabacteria bacterium sequence
MRQEQPAPDVGRREAADHGTAQAGCTRLPVTAAILAHNEADRLPATLQALNQHVERIIVLDSDSDDGTAEVAMALGAEVHNHRWEGYVAARRRLLELVDAPWCLMVDADEVVPPAFWDALARTGFPDTEASAYAVRRQTIYLGKRLRYAWQPDWKTVLVRTERARIEGGAVHEYLTTPDPVVRLPVAIDHYSYRGLGDHLRKMIAYARLGAAQLEQEGRRCHWWDLTLRPAWHVVRHLLVKQAWRDGLPGWIAATSSGVAVWMRYAFLLERRLELRKG

SEQ ID NO: 3337 - protein, 260 aa, Unknown
  Description of Unknown: Yersiniaceae bacterium 2016Iso4 sequence
MSRRKRLSVVLIAKNEADLLPDCLRSVAWADEIVLLDSGSDDATADIARQAGAAVYQSQGWHGFGKQRQQAQHYATGDYILMIDADERVTETLRHAIEQVLQSPDEGAVYSLGRRNLFLGRFMRHSGWYPDRVVRLYDAQKYRYNDHLVHESLDTQGARIVALPGDLLHLTCRDLPAFQQKQLGYARDWAKQRYQQGKGCSFFSILSHTAGAFCKTWLLRAGFLDGKQGFLLAVVNAQYTFNKYATLWALRHTQPTSEPS

SEQ ID NO: 3338 - protein, 254 aa, Unknown
  Description of Unknown: Betaproteobacteria bacterium sequence
MAAPTRAPLSAVLITRNAAAVLDACLESLQFADDILIVDSNSSDGTLEIARRHGARVVQKEWLGFGRQKQFAVDQAKHDWVLCLDADERVSPALAASIAQALAAPVSPVYRMPRRNRFLGRWLAHGEGYPDWSPRLFNRLNARWSDDLVHEKVLYAVTPGTLSGDLLHDSADDLAAYLDRQNRYTTLAARQAYELGRSSGVLRLLFSPVVRFFKFYILRLGFLDGVPGLLHISIGCINSYMKYAKLLELRKAEK

SEQ ID NO: 3339 - protein, 252 aa, Paracandidimonas soli
MHTISAVLIVKNEAANLDECLATLDWADEIVILDSGSTDATLDVAARHGAKVFSSEDWPGFGVQRQRAQRHASCDWILMIDADERVTPELRDSIRACVADGPAIGMLNRLSWCFGRYIRHSGWYPDRIARLYPRQQAAYNDALVHEKLEYPSSLPVKRLQGDLLHYTYRDLRHYLEKSAQYAQAWAQSKEAKGRKGSLAAGLLHGVGCFLRMYVLRLGMLDGRQGLLLALLSAHSTFAKYADLWVRTRTRSS

SEQ ID NO: 3340 - protein, 272 aa, Hyphomicrobium sp.
MTKYNSMRRAPVSCFIISKNEADRIGRTIRSVRPWVDEVVVVDSESTDDTVSVALAEGARVITQRWLGFGGQKRFAEEQCRNDWVFNVDADEVVTPALEREILDVFAGGDPKFVAYGMPLQMVYPSASKPRLFARDHWYVRLYDRRFVRFRQSNIHDAVVTDDHPVGQLRAPMHHYSMRSFPDMKRKLNDRTWLLVENSDVTTTGSVSLRLFTELPMNFFKYYIVRRHCMGGFTGLRYASIQAWYRFLKIYRIWGEAGHKTRRMPAPEAPAA

SEQ ID NO: 3341 - protein, 224 aa, Raoultella terrigena
MSTRLSVVMIAKNAADLLPDCLASVSWADEIVLLDSGSSDGTVELARSLGAQVYINTDWQGYGVQRQRAQDYATGDYVLMIDTDERVTPELAQSLRQALAAPKEGAIYSIARRNYFLGRFMRHSGWYPDRVMRLYPRLGYRYNNNLVHESLDAKGAQIIELTGDLLHLTCRDFSGFQQKQLAYATAWAQETPSEGEKNLADEYLRPYAGGICENAAAARRRAGW

SEQ ID NO: 3342 - protein, 253 aa, Sulfurisoma sediminicola
MPPSRQPLSAVLITRDAAASIAECLASVSFCDEILVVDSGSRDATREIARTHGARVIHQDWLGYGPQKQFAVEQAAHDWVLCVDADERVTPELRASILAILPEPNCHAYRFARCNRFMGRYLRHGEGYPDWSLRLFDRRDARWSDDAVHEKVIPDGPVGTLAGDLLHDSAETLATYLAKQDRYTTLAAEAALADGRRASLVRQLLSPLVRFAKFYFLRLGFLDGWPGFVHILIGCRNSYAKYGKMRSFRAEKS

SEQ ID NO: 3343 - protein, 1309 aa, Selenomonas sp.
MKISACYIVKNEAEELRRSLVSVQQAADEIIVVSTANDPFVAAAAMEFQAQIYFFAWQNDFALARNYALAQATGEIVIFLDADEYFFHPEEVRAGILDVVHSQPGLDIIMISLCNFMTHDSFQDAHFIQSPRIFRKEGLHYVGMIHEQLIREDGEERVLAYGDERVAAAHTGYLMEMGEEKIRRNIAMLERDAALRGRTAMHAFYLADCCFGLKDYEKTLALSKEALAGDIAFVGEESKIYHQMIESMRALHYPDEEMLELADEALAKFPMLPDFYAQRGMILCGLIRYAEGMDSLIEALRRYDEGGAHTENTSFFNDSVAAAIADRVARLCLHMEDREKADYWSARACSYRGDDVVKPSEDKMCITACYIVRDDAAHLKISIASLRDAVDELIVVDTGSIDDSVHVAQSYGAQVYHFPWTDDFAAARNEALAHVTGDWVVFIDADEYFSLETRDHLRTVIDHAAEDGEVLLVPWHNIDEETGETLLDSYAPRIFRWREGRRYVGRIHEELREADGAAPLCRTVAPELLTLVHTGYSARLTQEKGERNLRLLLAEVESSDTPERCWRYLAETYDNLGEERMAEHYALLDIGQGRRSVVYASLCYRILLRIYGAQPARRMERLTVAEQAVDAFPELPEMHAELAEALAVLHRYEEAIPAAEKAVEEEPPEGGTDCSFFNEEMREELRRRIQIWHRITARAKELRIAAAVFVRDDARDMETWLANTAVYADERIVVDTGSQDGTRALAADAGATIVDFPWKNDFAAARNAAVRAADGDWAAVLDADESFFDPSEVRSYLAMVDVTMPQVDAVLLPIVHVDEDAGGRETGRAPHVRLLRMGRGLRYEGRVHESLCKEEGTPVLYHEPVALSIRHVGYSSGRIRAKHERNLALMEQRIAEHGLQPGDARYLGDTYYGLGQYAAALLYARAALAESVTSLGAQSHLHHLLLDAMEKENIPLTEQIEAARTASFAFPQLPDFHGRLGILLAAAGADGALPALTHALEIYEAPLDTGGEASEFPAWAGPVSAARARILMEMGENAAAEEEVLRALSFDTAREEALDIYVEMHQRASSDQLLAALREIVGSDKESLIYLVRFADAYGWLYLAEEARSVLQREAGIHMPSPAIYGQARSLPSAEFGEQMVGALAAYVREMPEILLRLEKEQGGESPMLRHRLREQLPASMLEFWRHYDEPDAVPLPESREGYDLVRDSFIRYANAHQSERFLHIAASFGDDVLREATASFDHVRHWEGAFIGWSLLAATGGETADTLYGMALASLFLGGREEAKDYLERALGMDAAHRKSKELMELIA

SEQ ID NO: 3344 - protein, 258 aa, Unknown
  Description of Unknown: Candidatus Erwinia dacicola sequence
MHARQKLSVVMIAKNAAELLPECLESISWADEIIVLDSGSSDGTAAIAERHGARVYHSSEWHGYGKQRQLAQSYASHPMILTIDNDERVTPELQHAIEHVLEQPASDSVYSIARRNLFLGRFMRHSGWYPDRVTRLYPCHYRYNDNQVHESLETSGKCATPLKGDLLHLTCRDFSAFQWKQFAYAEALAKQRHQQGKRCGIAAIFGHTFGAFFKTLVLRAGFLDGKQGWLLAMVNAQYTFNKYAALWALNHASRKGRL

SEQ ID NO: 3345 - protein, 288 aa, Polaromonas sp.
MYTKNEQLDILACLQSVAWSDDIHVLDSGSNDATVAIARNFGAHVIERTYGENKLAFGGDEAGHRNWGLKNISFKHEWIYIIDADERMTPELFSAAESAIASPGRHVAFRVQRHDFFLDTWIKHVTPSPFNIRLFLHEKVHYERLVNSITVVDGPVGEIAAHFNHYSFSKGMSNWFDKHNRYSSLEAAQIVFNTNSKAKFSLRKAFFSKAINERRFHQKEMYYRAPFRPLLMFGLLYFVKRGFLDGRAGLTYALLRSIYEYMIVLKVREMKTLEPAVSNESHQTAVSG

SEQ ID NO: 3346 - protein, 267 aa, Unknown
  Description of Unknown: Betaproteobacteria bacterium sequence
MRPITLSVILITRNEAHNVAGCLGSVAFADEWIVVDSASTDATREIAEQFGARVVTTSDWPGFGAQKNRALALAQGRWVLSIDADERVSDELATSIQRAIAVDTSGHASGAAAMAQPLGYELSRLSSFCGQWMRHGDWYPDRVLRLFRRDAGRFSDDMVHERLIVDGPVGTLDGELLHDSMPTLDSALDKMNRYTAGRALDKVRAGKKGGLASALAHGLWAFIRCYVLRRGFLDGRLGFVLALYVAEGTYYRYLKMGLLAPARAAMQ

SEQ ID NO: 3347 - protein, 261 aa, Ralstonia pickettii
MSGKLTATILTRNEAHNIGDCIASLADLADQVIVLDSGSTDATRDIARARGAIVIEDNGTWPGFGPQKNRALDHATGEWVLSIDADERITPQLRTDILAAMHSASQTVFAMPRLSQFCGRFIRHAGWYPDPVMRLFRRGAARFSDDLVHEKLVFSGATGMLAHPLLHYSYRDYSDVLRKIEAYSSAGARQAFQAGKRATPSSALFHGVWAFVRTYVVQLGLLDGAQGFGVACMNAQASYYKYIKLWHLARTAQPRASDAHS

SEQ ID NO: 3348 - protein, 258 aa, Pseudoxanthomonas mexicana
MTDASATRTPPLLLSAVIITKNEVDRLGRCLASVQGLCSEILVLDCGSDDGTVALARSFGARVEHQDWLGFAGQKNEAIRRAERPWLLLLDADEWLADGSAAQLRALFATGEVERADVWRLKRCNWFLGRLLRGFERTERLVRPDHRYLPMRVHEKPDLAGKRVEDCDIVIEHNTARTLEAHRAKNDRYARLWAEQRHADGKRCSASSPWTHAAAYWLKMYLLRGAWRDGRRGWWFHASHARAVVDKYRHLHALGKRR

SEQ ID NO: 3349 - protein, 258 aa, Comamonas aquatica
MATLTIGILTMNEERRIAACIDSAAFADQIIVVDSGSSDATVEIATAKGVEVYSYPDWQGFAVQRNRILQHATGDWIFFLDADEVVTPALAQEMRAIVDGNVACVWEVAWEQIAYGQSLGRMRSSGGIPRLFPRAQILQFEGVVHEGAKLKDPTLPVRLLKERLPHYSRETIYGSLQKLAQYVQLGAYKRMQAGKRGGVLRGMGSAIANFIRLYFFHRGFLCGRAGFLHSFFVALECFFRYVALEIDRDFLEQAKKRG

SEQ ID NO: 3350 - protein, 281 aa, Unknown
  Description of Unknown: Sphingobacteriales bacterium UTBCD1 sequence
MEPVSAVIITLNEEHNLLSSLPKLSWCDEIIIVDSGSSDSTLDICKSFGCKIFHRQFDGYGTQKQYAVSIARNDWVLCLDADEVMSDALVDEIRKEMQAPLAEGYLIPMTFVFLGKKFHYGKEGWRYFMRLYNKKSGSFNDNKVHEKIELNGSTRKLCNNIYHYSYHSLNQYFDKFNRYSTYGAEMAFQRGKRKSLFAVVTAIPFNFLKYYFIELNFLNGLSGFYWSVLNAFYHFAKYIKIRELHQQQREVQKNEIKFNSRFIGSVEKISSAEKSCMPDLK

SEQ ID NO: 3351 - protein, 257 aa, Comamonas kerstersii
MARLTIGILTMNEERRIAACIDSAAFADQIIVVDSGSSDATVDIARAKGAEVYIHADWQGFAVQRNRVLQHANGDWIFFLDADEQLTPELAAEIRGVVDADQDAVWEVVWEEIAYGQSLARMSGGGGVMRLFPRRLLLGFEGVVHEGARLSREGVLQRQLSHRLPHYSRETIYGSLVKLAQYVQLGAMKRHAQGKRGGVLRGLASGIANFSRVYFFRRAFLCGRAGFLISLFVGLECFFRYVALETDQAQLQETKKR

SEQ ID NO: 3352 - protein, 271 aa, Unknown
  Description of Unknown: Candidatus Pacebacteria bacterium CG_4_10_14_0_8_um_filter_ 43_12 sequence
MNKPSMTAVVIAKNEALMIEACLETLQWCTEVLVIDNGSTDATADLAEKRGAQVISFKHQSFARLRTEALKAVATDWLLYIDADERVTPELAKEIMVRVETGNWAALAFLRQNYFFGQLFRHGGWETDTVIRAFKTEDLKEWRGDVHESPVFDGQSTLLTFPLVHFTHRSVAAGLSKSAEWTPIEASLLFQSATFQVGVGTIIKKGLAEFVKRAIYRQGYQDGQAGWVESISQAINRMLVYMQVWELQQNPSSAKKYEQLEKKIKEKWQSA

SEQ ID NO: 3353 - protein, 256 aa, Lelliottia amnigena
MPLRLSVVMIAKNAADLLPDCLASVAWADEIVLLDSGSEDATPDVARAAGVKVYTNTDWQGYGIQRQRAQAYATGDYVLMIDTDERITPELRQSIQNVLHAPAPGAVYSIARRNYFLGRFMRHSGWYPDRVTRLYARTDYQYNDNRVHESLACDHAQVVALRGDLLHLTCRDFASFQQKQLNYATAWAQERHQRGKKTSLTGIFTHTLGAFLKTLLLRGGVLDGKQGWLLAVVNAQYTFNKYTELWALNRGYSEKA

SEQ ID NO: 3354 - protein, 271 aa, Acidovorax sp.
MSVAAGGGTPSPTLTVAVLSHNEAHRIEACLRSAAFADQLLVVDSGSTDGTVAIAQGLGAEVHSHPDWQGFAVQRNRLLAHARGDYIFFLDSDEVMTPAFAQELQAIVRSGEQAVWKIRWRMVAFGHELTHFRSQSQIERLFVRRMVKEYTGVVHEQAQLHPQPGGADVPRRLIKARLLHYSRTTVRGSLEKLTQYVMLGAAKRAEKGQRGGVLRGLASGLSMFLRLYVFRLGFLCGGAGFLYCLFVALEGFFRYAALHYDRDSLTGRVIR

SEQ ID NO: 3355 - protein, 279 aa, Unknown
  Description of Unknown: Curtobacterium sp. MCBD17_021 sequence
MLPISVVIITKNEGVGLHRVLSRLSSFDQIIVVDSNSTDNTKEVATSFGAEVVNFDWNGRYPKKKQWSLELERLRNRWVLLLDGDEYPSDGLISELEEMSQTFREPSAIGAFDVPLLYRFTGKFLHHGHTVTKRSLLDREVAHFPVVDDLDAPGIREVEGHYQPQTAKTVGTLSHRICHDDLDPITTWFARHNRYSDWEAYLNTHPALRRQIAGNRSPKGRLFDRVPFKPLAFFIYAYLLRSGFRDGRAGFDYAFALASYYWQIDVKTRELRRLKDVVN

SEQ ID NO: 3356 - protein, 276 aa, Archangium violaceum
MKLGGYVIHGNNRDTLGACLESLSAVCDEVVALDSRSTDGSVELARSMGARSVSHSWRGYGAARAAAMEALGPCDYVLYLDSDERLAPEALSVIRAWRDSHPAEPAYRLPCRDWAEINGHRFRYRTHWRARLVRRDAAIWRPEMIVHEALPRMRAPRLHAPIDHRFATSLEGRAEKEERYALLWAVRAFAEGRRLKPAALQRPAHLIRDCLMHGALWRGGLDALRLAWAVSNYHSAKYRHLRVLRQGGFPELRKAFDEGRYGEVFALVREERTRAP

SEQ ID NO: 3357 - protein, 271 aa, Rhodanobacter sp.
MPALPLTLAVITHNEADTIARCLDSVPFAAEKLVVDSGSDDDTVAIARAHGARVVHQDWLGFGAQRNFTSGQCRHDWILVLDADEYLSPELADELQQRLPALIASDTPAAWLRRSTIYMGRPMRWYRPAVGEKLVRLYHRDRARWSDARVHESLRFDGIAPTLHATFNHSNNPTLVHKQLKVLRYAELKCRDWLDKRKPVRMWQSPFVFALAFLKDYVFRLAFLDGWRGFMIAHTAASYAIYKRMRYYEMIHNPASVARAGDLLDKHGIDR

SEQ ID NO: 3358 - protein, 279 aa, Melaminivora sp.
MLEAAGGADQAPPSSFPPEPTLTVAVLTHNEAQRIAACLQSASFADQLLVVDSGSDDETVAIAHRLGAEVYVHPDWQGFAVQRNRLLAHARGDYIFFLDADEVMTPAFADELRAIVRSGRQGVWTIRWRMVAFGRELRWFRAQTHVERLFTRALLVGYSGAVHEQAELRPLADGSAPPRRHMRARLLHYSRSTVRGSLQKLTQYVMLGAAKREEAGRRGGVLRGLASGSSMFLRLYVLQLGFLCGGAGFLYCLFVALEAFFRYAALHYDRGTLTQRVVR

SEQ ID NO: 3359 - protein, 260 aa, Tatumella saanichensis
MTTRQRLSVVMITKNEAELLPDCLASVLWADEIVVLDAGSDDATCEIARHAGAKVYQNDEWPGFGPQRQRAQHYASGDLILMIDADERVTPALRHAIETLLSKPINNNCVYSIARSNWFLGRFMRHSGWYPDRVTRLYPARFTYNSHRVHESLEHPGAEVIKLAGDLQHLTCRDLHHFQQKQLSYAHAWAQQRFEQGRRCGLFSIYSHTVGAWLKTAILRAGFLDGRQGWVLAQVNAQYTFNKYALLWALNATKPGESSS

SEQ ID NO: 3360 - protein, 253 aa, Paraburkholderia sartisoli
MQETTLGVAIITKNAAARLAECLQAVAFADQIVVIDGGSTDGTVNIARAYGARVLDQTDWQGFGPQKNRAVAALTTNWILSIDADEIVSPELAAAIRAALAAPTADVYAVDRLSSFCGHWIHHSGWYPDWIPRLFKSGVAHFSDDLVHERLVFDAPVQQLTGKLMHYSYEDFESVLRKLDAYSTAGAQQRHTAGKRGSFGMALGRSAWAFVRTYVLRRGFLDGRAGFMIALFNAETVYYRFLKLSRLGKKTQR

SEQ ID NO: 3361 - protein, 258 aa, Polaromonas sp.
MTSLSVTVITKNEANNIGDCLRSVRFADQIVVLDSDSTDATIEIARSMGADVSISPDWQGFGVQKNRALDAAKGDWVLSLDADERVTPELAQEIQAQLAQVQVSGQSVAFAIPRLTQFCGVWIRHCGWTPDYVLRVFKRGEARFSDDLVHEKLQLIRADMPIVRLKTPLLHYSYPTPEHYWRKLQRYSQDWARQRHARGQKATITRAALSAVTAFIRSYVFQLGFLDGAMGFAVCTMQAQSAFGKYFELYCLGHEHDK

SEQ ID NO: 3362 - protein, 258 aa, Sphaerotilus hippei
MIAFNEAEKIRDAVSSVLWADEIIVADSHSTDGTVEIAEGLGARVVQIDFQGFGDLRNRAIAQCRGDWIFSLDADERCTPEVRDEVLALVDGAARHDAYWVPRRNYFMGRWIRHSGWYPNFRQPQLFRRGAMRYTMEPVHEGYEMLSGGQPGVLRHAISQFPFRNLDEVMRKANRYSTLGAAKVRPGRASMSRALVSATWAFVKHLVFKRGLLDGWAGFIIAFAYFEQTFYRYAKRWEQDMDFQRPPQAPVRRTDRPA

SEQ ID NO: 3363 - protein, 261 aa, Halobellus clavatus
MAMDRPPITICTTTKNCADDLDRLLDSVIDFADEIVVVDSDSTDGTISVAENHGAEVYQRDFTGFAGIKRYAIQQATNDWVWILDADEEVSPDLRHEALSALSKADDTVAFKMRKRNLMFGEETNISHPKRPYLAKKEVLEFKNEIINETLQVKAEYRNRVKKLGSEITHHAYESIGEYLETWDRYSTLEAKQIRNQGNERPFLYYFIYGLGECVYYLFIEGAILDGWRGIFFALMSLNFRIAVYGKLRGDEILLGEKLRP

SEQ ID NO: 3364 - protein, 256 aa, Polaromonas sp.
MASLTVTVITKNEAHNIEACLRSVDFADQRVVLDSGSTDGTSELARLAGAEVSVQENWQGFGIQKNSALSLARSDWVLSLDADERVSPALRAEIEAAMASPQFDVYAFPRLSSYCGQYMRHSGWYPDRVTRLFRRGSARFSDDLVHESLVTASAVGHLTSPLLHESFRSFEDVLDKVNRYSSAGAESLKNRGQRSSVGKALGHGLWAFVRTYFLRLGFLDGRMGLLLAISNAEGTYYRYLKLWLLHRKVGKTPPAP

SEQ ID NO: 3365 - protein, 240 aa, Unknown
  Description of Unknown: Oxalobacteraceae bacterium IMCC9480 sequence
MDSGSSDGTVGLARAAGASVIETTDWPGFGPQKNRALAAAEGDWILSLDADERITPALRDEILAVIAAPQHDAYALPRLSSFCGQFIRHSGWYPDHVVRLWRRGSGRFSDSLVHERVLVNGGKIGYLRSPIIHYSYRDNGDLLRKLEQYSELGARQAFAAGKRGTLRKAFVHALSAFLRSFVFKRGFLDGRAGLIVALCAAETTYHKYFKLMMLTQAEGGSVRDADVYERTQTQQRSSQD

SEQ ID NO: 3366 - protein, 245 aa, Halotalea alkalilenta
MVKNEAQNLAACLDTLGFADEIVVLDGGSEDATREIAARYTDKVFVEAQWRGFGVQRQRAEAYASGDWILMIDADERVTPQLAQSIREAIAGEPAILSMPRLSWCFGAFIRHSGWYPDPVARLYPRSGAGYNDALVHEKLENRSGLPERSLEGDLLHYTYRDLRHYLEKSAHYAEAWAEARAARGKRGSLAAGIGHGVGCFLRMYLLRAGFLDGRAGLLLALLSAHSTFAKYADLWVRTRTGSPD

SEQ ID NO: 3367 - protein, 261 aa, Comamonas terrigena
MDARMSRLSIVVLTLNEAHNIEACLRSAQGVADQILVVDSGSQDATVSLAQGLGAEVVAYPDWQGFGEQRSRALQHVRADWVFFLDADERLTPALADEIRQVVAGNAEAVWEVEWEQMAYGQSLGRMRGTGGVARLFPMRVLEGFSGAVHEGAVLRTAVPTRHLRQRLPHFSRETIYGSLVKLAQYVQLGALKRHQAGKRGGVLRGLGSGIANFTRLYVFQRGFLCGRAGFLYSFFVGLECFFRYVALEVDRDQLKKPVRR

SEQ ID NO: 3368 - protein, 254 aa, Paraburkholderia sp.
MNHTTLGVALITQNAATRLADCLAALAFADEIVVIDGGSTDGTAGIARAHGARVIEQTDWPGFGPQKNRAVDALGTDWVLSIDADEVVSPELAASIRAAIAAPQCNVYAVDRLSNFCGTWVTHSGWYPDWIPRLFRRGAARFSDDLVHERLVFEGAAQRLTGKLLHYSYDDFDAVLRKLDAYSGAGARQRAAAGQRGSFGRALARGAWAFVRTYVLRAGFLDGRAGFMIAVFNAETVYYRFLKLALLNERDHRA

SEQ ID NO: 3369 - protein, 255 aa, Cupriavidus basilensis
MKISVVLITKNEAHNIRECLESVSWCDRAIIVDSGSRDGTVELARSLGAEVFETEHWPGFGAQKNLAVSKADGDWIFSIDADERVTPELRDEILAAVASGQSDAYEVPRLSRFCGRFIRHGGWYPDYVTRLFRRGRARFTDDLVHERVVADAPVGRLNSPLLHYTYDDFSQVLQKVDKYSSLGAQQGFARGKTASPASAVLHGAWAFLRTYLLRRGFLDGAQGLGVALMNGQASYYKYIKLWYLQQKTERQAPPR

SEQ ID NO: 3370 - protein, 248 aa, Unknown
  Description of Unknown: Candidatus Magnetaquicoccus inordinatus sequence
MAEPLSAILITYNAASLLPECLATLAFAEEILVVDSGSQDASCAIAQAAGARVLHHPWSGFGPQKQWAVQQARHDWVLCLDADERLTPQLQQQIQEVLRAPRYPAYRLPRCNRFMGRWLRHGEGYPDWVVRLFRRQHGQWSADPVHERVEVQGAIGTLTGDLLHESALSLHDYLHKQNHYTTLQAQQLLLQNRSIHLRHLLFSPLWRFMRFYFFKRGFLDGIPGLVHILIGCGNSFLKYAKAMALRRQ

SEQ ID NO: 3371 - protein, 355 aa, Sphingosinicella sp.
MTRLALVMIVRDEARCLARCLASARPHVDRMIVLDTGSSDGTIGIARAAGAEVHDFAWCDDFAAARNAALDYSDADWNLVLDADEWLEAGVEALSPEAFPPHARRTPAFIGCVRIANRQDANKGGGRRAYIPRLLPRGVRYEGRIHEQPVSALPLVQLPLVVGHDGYEAAQQARKKGRNAALLRAEIAAQPDDAYLRYQLGREYLVDDRAAEAAECLVAAYHAVQPDAAYRHGIVLYALRALRGAGRFDEALALADAEQSRWPHSPDFYYAVAELYLDWAGLNPEIARDQLLPVVEMAWLKCLQIGERPDLAGSVEGLGSIRPAESLAHLYRSLGLIEEADQYDRIAADLRAAKA

SEQ ID NO: 3372 - protein, 294 aa, Solimonas aquatica
MTTSLPEPDPRPLAARAPRRHSLSVLMICRDEADRIEAALRSVAGWADQILVLDSGSRDGTVDIARRYSSEVYQTDWPGFGPQRQRALRLCRGDYVLTVDADEEVTPQLRAEIDAELSAQTPRCAVYLIRWQPIFMGRPLRFGRFQAPQLRLFRRQGAEYPQAQVHEKLRRPPGAVGVLRGRLRHDSFRDYRHVVDKHTQYAWLLAQEKHARGERASLEFALLRGLGEFLMQYLLRGALLDGRRGLLMSAIQAQYAFHKYAALWSLRASGAAPRAEFMPDKRQRRETATPDAPP

SEQ ID NO: 3373 - protein, 262 aa, Uruburuella suis
MNTPTLQPGLTVALITKNEADNLEACLQSLAGLNAEIVIIDSGSTDATAEIAARHRARFYVHADWPGFGPQRNRAHQYIRTEWVLWLDADERLSDALKQSIQTALRTTPADARTVFAFNRLSNTFGAFIRHCGWYPDWVVRLYPTAFTRYSDDLVHEKVLLPAGTSVEKLAGDALHYTYANMSQFLAKQNLYSNIWAEQRAAEGKSAGLGDALLHGISSFVKMYVLKAGFLDGKHGLLLSVLSAQSAFNKYAALWLLGKKKP

SEQ ID NO: 3374 - protein, 365 aa, Unknown
  Description of Unknown: Beijerinckiaceae bacterium sequence
MSAPTVAAAIIARNELKFLPGCLESLQGLVDNVVIVDTGSSDGTQAVARSYGADLFEFEWIDDFAAARNRALSKVRADWILYIDADERLRTPGRRPIGDFLAPQTAGAYVRFQPRPGYTFYREPRLFVNHPEIRFRGRIHETHRGDLSAFAERRNLAIPPTPVVIEHLGFEGDQSHKHARNLPLLVRETAEHPERPYCWHHLAETLAGLGQRKDAIEACRRGLNISIEAPSAKEIIDRRQLGKTYARLLLDEGQVADDIIAELLEDTPEDWALLYLKARSDLAAGRHESVLSIAERLKAIDPDELTDGFIAYDRRLFTDFAWDLTGAACLLGGRRRDAAAAYREAACLAPDVVAYRAKAAALAMN

SEQ ID NO: 3375 - protein, 248 aa, Pleomorphomonas koreensis
MTAPRLSAILIVRDEARDLPDCLAALAFCDEIVVVDSGSRDGTPDIARAAGATVLETPDFPGFGPQKQRALDLASGDWVLSVDADERIPPELAAEIRATIAAPTADGYRIDRRSQFLGRVMRHGGWAPDRVLRLARRAAARFSTDIVHESLIVGGPVADLASPMDHLSYRGIDEVLDKQRRYALASAEVRRRRGKRGGLGPAIGHGLFTFLKHYLLQAGFLDGAHGFVAAAAKAQESFWRYLAVSWER

SEQ ID NO: 3376 - protein, 257 aa, Unknown
  Description of Unknown: Chloroflexi bacterium sequence
MALMAASLTVVIITLNEESNIVECIKSTLGADEVIVVDAGSRDRTAELATSHGARVVEHPMTDFAQQRNYANSIAKSDWIFHLDADERLTPALRDELKSALSSNTYSGYRVPRLNFIFGAPLHHGGWYPQYEMRLQRRGRGMWSRAVHETAALREGSVGTLREPYEHRGHPDVRTFLAKTDRYTSIEAEALAGRSMLTLGLLAVVVPPIYFAYKYVFQAGFRDGWRGFAAATLLSFYRALAYVKAMEVRSSRSSTKS

SEQ ID NO: 3377 - protein, 257 aa, Izhakiella capsodis
MTEPLHLSVVMIVKDEAELLPECLESVSWADEIILLDSGSQDTTREIAARHGALVFSTDVWYGYGKQRQLAQQRASGEMILMIDADERVTPELHLAIKQVLNAPLQQDVVWSIARRNLFLGRFMRHSGWYPDRVTRLYPRHYQYNSSQVHESLESGNARIQPLQGDLLHLTCRDFANFQWKQFAYAEAWAKQRFHQGQRCGFFSIFSHTLGAFVKTLIIRAGFLDGKQGWLLAMVNAHYTFNKYTTLWALSHAAKKG

SEQ ID NO: 3378 - protein, 301 aa, Rhodopirellula sp.
MSTLDLTIVIPAKNDADRLGICLDAIGHDLASSVVIVDSESSDNTAEVAEAYGAELIQFRWDGMFPKKRNWFLRNHTPATKWVLFLDSDEILTDEFKAELRRTLPQSDCDGYWLRYTIYFLREELKYGYPLRKLALFRVGAGEYERIDEDRWSKLDMEIHEHPVIEGPVGELRSKIDHRDFRDVSHYIAKHNEYSSWEAHRFLRSLEQQTDHGKLTLKQKVKYRLVQSPFAGVVYFFGAYVMMRGFLDGKRGLAFALLKLGYFTQVYCKIRELRGQQPNANPRAAEPVRTAPQAGQPLEVS

SEQ ID NO: 3379 - protein, 252 aa, Haemophilus ducreyi
MPTLTVAMIVKNEAQDLAECLKTVDGWVDEIVIVDSGSTDDTLKIATQFNAKVYVNSDWQGFGPQRQFAQQYVTSDYVLWLDADERVTPELKASILQAVQHNQKNTVYKVSRLSEIFGKEIRYSGWYPDYVVRLYPTYLAKYGDELVHEKVHYPADSRVEKLQGDLLHFTYKNIHHYLVKSASYAKAWAMQRAKAGKKASLLDGVTHAIACFLKMYLFKAGFLDGKQGFLLAVLSAHSTFVKYADLWDRTRS

SEQ ID NO: 3380 - protein, 274 aa, Mucilaginibacter lappiensis
MVPVSVVIITKNEAEMIGRSITMLRQLTDDIIVVDNDSTDHTVDISMENGCRVYQKSWDGYGANKNKGIALARYNWILSLDADEIPDAALLTSINQLKLDDCNTVYDIPFKAYYGNKPINFGNWGRDHHIRLFNRTQVKWSEPPVHETLVMPQNMRVQKLNGHLHHYSVKNVQEHEAKIVHYARLSALKYLQSGKKASLVKLYLAPLFHFVKAYVFLLGFLDGKEGWNIARMAFKNTWLKYYYLHKAKQNPILKKNFYEAPVMAYEFKANAHSE

SEQ ID NO: 3381 - protein, 262 aa, Erwinia billingiae
MSSRQALSVVLIAKNAADLLPECLESVSWADEIVLLDSGSSDGTPQVAARHGAKVFHSTEWHGYGRQRQLAQSYANHPMILMIDSDERVTQQLRASIEAVLTSPASADAVYSLGRRNLFLGRFMRHSGWYPDRVTRLYPSRYQYNDHQVHESLDTQGVAVTALKGDLLHLTCRDFSAFQWKQFAYAEAWAKQRYHQGKRCGIVSIFTHTIGAFFKTLVLRAGFLDGKQGWLLAVVNAQYTFNKYAALWALNNSSHASGKGGL

SEQ ID NO: 3382 - protein, 258 aa, Sulfuritalea hydrogenivorans
MTSADRMPISAVLITKNAAHQLADCLASVAFCDEIVVVDSGSDDGTAEIAGRHGARVIQSEWRGFGPQKQFAVDQASHDWVLCIDADERVSEGLQESIREVRGAVSSAPTFSAYRFARRNRFMGRYLRHGEGYPDWSLRLFDRRHARWSDDPVHEKVIAAGAIGTLQGDLLHESAESLETYLAKQNRYSTLAAEEALASGKRATVMHLLFSPLLRFVKFYFLRLGLLDGLPGLVHILVGCGASFFKYAKMLAFQRSGQ

SEQ ID NO: 3383 - protein, 385 aa, Unknown
  Description of Unknown: Oscillatoriales cyanobacterium sequence
MSIRAALGQKPFLSFCAIVKNESENLARCLASVQPYVDEIIVVDTGSQDGTPEIATQYGAKVGYFEWCDDFATARNYALSLVTGEWILVLDADEELVVTSVDFRETLKFHPEALAYSIIRTEVRHQAGMTPLHMIRLFRNLPEIRYVGRFHEQIQYQNRSFSDSEVRSLDSVRVLHHANSHQQVAAKVVNRNIPILELARQEEGLSLMLLYSLAGMYGSAGEDEKARDCWEEALERLFPHLIDGNPPEEFGFIPSLVFTLAGRSLQNRDYETTMLLCQRGLEWCPNYPPLNYIAGMTLINLGFPLGAVAYFENCLKLGKDNSYYTREPFEPSFTTTDPACCLGLAYINLKRWSDAVSAFELALTFDENCTAAQENLAKIRQSFNQ

SEQ ID NO: 3384 - protein, 261 aa, Erwinia mallotivora
MTTRHPLSVVLIARDAADLLPECLASVSWADEIILLDSGSSDGTPQIAARHGAKVYHSAEWQGYGKQRQLAQSYASHPVILMIDSDERVTPQLRSAIETVLEQPLSNTVYSLSRRNLFLGRFMRHSGWYPDRVVRLYPATFHYNDHQVHESLDARGATVTALRGDLLHLTCRDFSAFQWKQFAYAEAWAKQRYHQGKGCSIASVFAHTLGAFFKTLILRAGFLDGKQGWLLAVVNAQYTFNKYTALWALHNASHSSGKGHL

SEQ ID NO: 3385 - protein, 332 aa, Pseudohaliea rubra
MATLSLCMIVRDEAWILEECLAAARPQVDQLVVVDTGSVDGSREIAAAHADRLLDFSWCDDFAAARNHGLDAATGDWILVLDADERIAPADYPRLREAMADDTVDGYYLPQHNYGDDQTAWGWRPVGEHRALARGYSGYTINPILRLFRRKDGICYQGRIHEIVDGTIAEGRRSELPVPLHHYCHANSERPRRARGERYQAMLERELAGDADGRLYGIAAAGAMHSKGDYRRAKDYFLRAAALGYEPQRCLEGAAEACYRDGDFGAAGDLYQRLYRDGYRTASLCLNLANLAVRRGDRSGALGLLRECLALGGLGPAVNDVIERNIKHLEGA

SEQ ID NO: 3386 - protein, 251 aa, Chromohalobacter salexigens
MKPLTGIVITLNEQANIADCVRSLRRVCDEVIVVDSLSTDDTVAIAEAEGATVISQAYLGDGPQKAHGVPFAKHDWILALDADERLDDDAVALIESLALDDPRTAYSFRRKNYVARHWIRAAGFYPDPVVRLYNRTTSGYLPKKAHSSVQAPRVEATSAHLRHFTYEDMSHWIRRIDTLSSRDAWAMKERGKRPSRLSPILHATNAMLRKLVFKGGLFQGMDGMTVAMTTAFHAYMKYAKLNELYELERDA

SEQ ID NO: 3387 - protein, 256 aa, Enterobacter lignolyticus
MPLRLSVVMIAKNAADLLPDCLASVAWADEIIVLDSGSSDDTVALAQSLGAQVHVNTDWLGYGIQRQRAQSFATGDYVLMIDTDERVTPELAQSLQQALASPQPGAVYSIARRNYFLGRFMRHSGWYPDRVLRLYERARWQYNDSLVHESLACEGAPVVALSGDLKHLTCRDFADFQRKQLAYASAWAQERHQKGKKASLGGIFGHTLGAFIKTLLLRGGVLDGAQGWLLAVVNAQYTFNKYTELWALNRGYSKKA

SEQ ID NO: 3388 - protein, 258 aa, Nitrospira japonica
MPAVTALIITKNEEINIADCLASVRWTEERLVIDAESKDRTAELARAAGADVVVRPWPGFGPQKNFGMERAASDWILIVDADERVPGPLAEEIRSLLSRWTEGDPVAYEIPRMNFYYGAWIRHAGLYPDYQIRLVRKGTAAYNDVPVHENLIVRGTIGKLVQPFEHQTERRIDDHFRKFGLYTTLAAREKGRTVSTVRRRDLLARPLVVFLKTYLLKRGYRDGVRGLIVCLFASMYTFVKYAKLWDATRTPAASRGPA

SEQ ID NO: 3389 - protein, 257 aa, Halomonas zincidurans
MPITGIVITLNEAANIAACIRSLQRVCDEVIVVDSLSEDDTVAIAEAHGAHVIAQAYLGDGPQKAHGVPFARNDWILALDADERLADDAVALIEGLALDDPSQAYAFRRKNYVGNHWIRAAGFYPDSVTRLYNRTTAGYLPRKAHSSVEAPRVKLTQAHLDHFTYASLSHWIQRIDALSTRDAWAMKERGVTPSPLRPAVHALTATLRKLLFKGGLLQGADGMTVALTTAFHAYMKYAKLNELYENERTANAQEPPP

SEQ ID NO: 3390 - protein, 249 aa, Unknown
  Description of Unknown: Desulfobacteraceae bacterium CG2_30_51_40 sequence
MLSVAVITKNEAANIEDCLRSVSWASEAVVLDQFSNDGTADKAAALGAAVFQEDWKGFAGQKMSAIEKTHGDWILSLDADERVTPELQMEIEAVIREKDALNGYFIPRRNYFAGTWIRYGGWYPDYCLRLFRKGLGRFEERVVHEKLTVQGRPGYLKNPLEHYTYRSVGDFLLRMERYSRLAAAQISDKKRFFPFSGLLFRPPFTFLSMYVLRGGFLDGRKGFFLAVSYSYYTFLKYYRLLEKDLDAPD

SEQ ID NO: 3391 - protein, 310 aa, Unknown
  Description of Unknown: Rhodospirillaceae bacterium NAU-10 sequence
MNRLPLSIVVMTRNEAANIGACLDSLAGLGELVVVDSGSDDGTPALAAAGGAWVVPFQWNGRYPRKKQWCLDLPGLHHDWVLFVDADERVTPTLRRALERLFRAGPDCAAYFIDSRPLFLGRMLRFGTRYRKIALMHRRRCRFPDCEAGGGWEVEGHYQPAVRGRIGRLGGFLLHVELRGPHWLFDRHNRYSDWEAAGRGAAGSALALHAERPWRRLLKTLFQHLPLRPLLVFLHAYLLRLGLLDGQAGLDHALFRAFYYWQVELKRRWAGTGPTIQSSPRASSPARSPASLSPASALISSKARRRTGSS

SEQ ID NO: 3392 - protein, 258 aa, Erwinia toletana
MTARQRLSVVMIAKNEAGLLPDCLASVSWADEIILLDSGSSDDTAEIARQHHVQVYHSEGWPGYGLQREHAQSYASGDMILMIDADERVTPELRASIERVLEHPQPHTVYSIARRNLFLGRFMRHSGWYPDRVTRLYPRDYHYNDNQVHESLNTRDAHVVPLLGDLLHLTCRDFSAFQRKQFAYAEAWARQRHQQGKGCTVFSIFSHTISAFLKTLVLRAGFLDGKQGWILAVVNAQYTFNKYAALWALNQAAEKGSL

SEQ ID NO: 3393 - protein, 717 aa, Motilibacter rhizosphaerae
MRRSPASVVVVAAPGPEGRARADFLVRGLRPSLGVRDEVVLVADGTPAGDALAAVGGGSLAARRDTGVRLATRDVVVLVCADSVAPKHAIDPLVAALDSGAIAAGPVHDLGTGRQGLTPPLPALASAQELREWTARWHDEHRGGRLGVEDLGEGVLAARRAHLQAVGCREGVVQRLLAAEGAGALGPAVVVQDSVWHHRGAPGCALPPSPQPLLSIVMIVKDEEKALPSSLASLAGLGDEVVVYDTGSSDGTVEIARAMGARVVQGYWDDHFGDARNRGLAHARGRWFLQVDADEQFTGDAASLRAQLEVATDPTFMVDVESQTESGFGTTYCTPLRRIGLREDCWFLGRLHEQIALRAGGVPPSSVLRDGRLLHSGYLASTAADKDKRTRNLRLAELATADEAGDLPRGVVLCNLARSQRFAGDNEGVLATAAEAWEAEHTSVSRRDLCATAATAAAVLERYAEAELWCDRLEEQGVPLRAAETRAVVLLAQERWLECLEAVRRIPDSGWDRGDVREIKRSGSIVVELKALVSLGRYDEAVDRLLRVVRAGELNVCLPDVLELFHSAPARLREYATDLPEELLLPTLAEVRTVPVDRADTFLDALYTAGRRQAAVVAAAAPVAPHLPLPRAVEWSLRLRAAGDPGSCPLVRIARAPERSPRDRVLAAALVMESFADETVLPQFLEAAELVPDAQADAVGKELRLLAPLTAARLLAV

SEQ ID NO: 3394 - protein, 261 aa, Erwinia typographi
MSSRLALSVVLIAKDAADLLPECLESVSWADEIILLDSGSSDGTPQVAARHGAKVFHATEWHGYGKQRQLAQSYATHPMILMIDSDERVTPQLRSSIEAALEQPAPGAIYSLGRRNLFLGRFMRHSGWYPDRVTRLYPASFQYNDHQVHESLETQGAVVTPLKGDLLHLTCRDFSTFQWKQFAYAEAWAKQRYHQGKRCGVFAIFLHTIGAFFKTLVLRAGFLDGKQGWLLSVVNAQYTFNKYAALWALNHTSHASGKGGL

SEQ ID NO: 3395 - protein, 281 aa, Rhodopirellula islandica
MLDLTIVIPVKNEADSLGDCLDSIGTDFASQVVVVDSGSTDASCQIANDWGAEVVGFVWDGKFPKKRNWYLREHTPATKWVLFLDADEHLTPAFKSELSQTLPSTSHVGFWLHYTIYFLGRELKHGYPLDKLALFQVGAGEYERIEEDGWSHLDMEIHEHPILDGTLGTIRSKIDHRDFRPLHHYIAKHNEYSSWEAARFLVRSEEDRASMTWKQKLKYRMVTSPLAGPVYFVGAYLFLRGFLDGSRGFVFALLKMSYFTQVYCKIREARQAAGPDSHGDV

SEQ ID NO: 3396 - protein, 255 aa, Paludisphaera borealis
MPEPKITALIVARNEERKLPGCLDSVRFAHERIVVVDAASDDDTLAIARRSAEVVIVRPFDDFASQRNAGLAAATGDWILSIDADERVTPGLADEIRSALAEPANRHAGFRIPIRSEILGRPFGYSGTQQDLPMRLFRRGRGSWTGQVHETVDLDGSIGRMRHPLDHHTIPDVRVFLRKIDQYTTLEAHDLYRSGDRYRTRDLTLRPVWLFLKLYLYKQGFRDGLEGLMFCALSGVSAAVRTWKLRELDHLETAS

SEQ ID NO: 3397 - protein, 269 aa, Pseudoxanthomonas mexicana
MNVSSLHRPAISACIIAFNEADRIGACLASLDFCDDILVVDSYSGDDTAGIARSMGARVMQRPFDGFRSQKQYAVDQARHDWVLCLDADERIGDALRASILQARDAGFGAAAGYRFARLSDYFGRFLRHGNAYPDRVLRLFDRRRGGWRGKREVHEAASVDGPLETLAGDLIHYPYRSLDQQLAKTQRYARMMAEYDHAHGRRATLTGLILSPAWRFWRGYLLRGGFLDGWHGLVYAYVRANYVRQKTIMLWMLERGQPIATPPASGDG

SEQ ID NO: 3398 - protein, 309 aa, Unknown
  Description of Unknown: Alphaproteobacteria bacterium HGW-Alphaproteobacteria-16 sequence
MTTSLTVILLTHNEELHIGRALAAIAPIAQRVVVVDSGSTDATVAIAQSHGATVLHNPWINYAQQFAWALDHADITTDWVMRLDADEIIGPDLADEINAKLPALPADVAGVNLQRRHIFLDKWIKHGGRFPLTLIRIWRTGQGRIEDRWMDEHMVIWGGRTVTFNGAFSDHNLKDITFFTAKHNGYATREAIDVLIDKYGLGDKDDALSAKSASFQASLKRFVKERIYNRMPFYVSTTGYFLYRYIVQLGFLDGKAGLIYHFLQGYWYRFLVGAKVVEFEHAIAGATTKEERARILSEVSGHRITLPAP

SEQ ID NO: 3399 - protein, 301 aa, Natronolimnobius innermongolicus
MSYTYDHLVEHVKTAFSDRHSSGESASYDGPLESLPISVCLTTKNNVETIDACLESVHAWTDEIVVVDSNSQDGTVERCEAYGANVYQHEFESFAQIKTQAMEHAENDWVFILDADEKVPETLRDEILSTFGTPGIVAFLIEKQEYMMGARTNQYHYKRPYLARKDVLYFQNEYIWERLSVEEAYEDRTETLSSRIDHYRFDRASEIESKMMQYSALEALQAVEGDGGESFLSFLVRGIAVAGDRLVISRGLLDGYRGFYVAFLEFYQMIAAYVKVRDIYRLQRRYPDRWREIWIREECRR

SEQ ID NO: 3400 - protein, 244 aa, Pigmentiphaga sp.
MRLSVIVITRNEAHNIAACLESVRFADEVIVVDSGSTDGTVDIAGSFGARVTAAPDWPGFGPQKNRALALATGDWVLSLDADERVTPELAAAIAQVLRDPRHDAYDMPRLSSFCGRFIRHSGWWPDRVLRLFRRGTARFSDDQVHEKVLPDGSVGQLAPHLLHYTYPDLDTAIAKMNRYSADSAQTLHARGKRASIGTAIGHGLWTFIRIYLIKRGFLDGRHGFLLATTAAAGSFYRYAKLSLK

SEQ ID NO: 3401 - protein, 289 aa, Hyphomicrobium sp.
MDKLPISCFIIAKNEADRIGRTIRSVKPWVDEVVVIDSESTDDTVRVAASEGCRVVTQRWLGFGGQKRFGEDQCRNDWVLNLDADEVVTPALRREIMALFKYVAPSRVAYGMPIELVYPNTKRPRLWARDHWYVRLYDRRVVRFRDSNVHDTVVTDGQAVGILRAPAYHYMFRSYEHLKRKLGERMLLSAKHANSSTAALVARMAIEFPVNFFKYYIGRRHFTGGLNGLRYSWIQADYRLLKIFHMWRDRSSKGQSPEPDTAGGHENFKAKADADTKAGSSAAELPLYG

SEQ ID NO: 3402 - protein, 263 aa, Limnohabitans sp.
MNISASRQSLCIGILTLNEEKRIAQCIQSARFADQILVIDSGSQDQTQALARAAGAEVHNYPDWQGFGEQRNRMLGHCRCDVIFFLDADEEITPALEKEIQQAVQAGDDVIWEVMWDQVAYGRALSHMKTTGGVQRMFRSASIDRFEGVVHEGARMKAGKLPVRTFKARLLHHSRETIYGSIQKLAQYAQLGAAKRAQKGKTGGILRGFASGLASFIQLYIFRRGFLCGPEGFLYCLFVALEAFFRYAMLRYDREHLNKIVKR

SEQ ID NO: 3403 - protein, 256 aa, Geobacter sp.
MSVKKPSISAFVITKNEAAKIGACLDSLEWVDEIVVVDDFSTDATPDICRNKNVSFHQNAFTGFRDQKRFAMSRTAHDWVLEIDADERVSPAMRQSIEDLTVDDFDTVSCFEFRRITNFWGKWIRHASLYPDYKGRLYHKRRGEWSEANIHERFIPSGRTKRVAADIIHDQDLDICSYFKRTVRYGEMSALELFARGKRACWLHLTLRPLYTFFYRFVVRLGFLEGMPGFVISVMGSVGTFVKYAKLFELQIKIKT

SEQ ID NO: 3404 - protein, 253 aa, Burkholderia sp.
MTQPTLGIAIITYNAAARLAQCLAAVSFADDIVVIDGGSTDATAGIAEAHRARVIVEREWPGFGPQKNRALDALATDWVLSIDADEVVSPELAASIRAAIVDPRADVYAVDRLSSFCGEWIRHSGWYPDWIPRLFRRGTARFSDDLVHERLVLSTAAPLARLEGRLMHYSYEDFESVLRKLDAYSTAGALQRHAAGKRGSFSIAVARGLWAFLRTYFLRRGFLDGRSGFMIAMFNAQTVYYRFLKLAHLNAFR

SEQ ID NO: 3405 - protein, 347 aa, Paenibacillus mucilaginosus
MIVKNEAQDLARCLESAGPLVDEIVIADTGSTDNTREIALSYGAKVYDYAWTHNFSDARNFALRQSTGDWNLVLDADEYILNDCGGEIRDFIARHQGIGRIKRIDKFEQNGEVMESQVFISRLFPKGTFYTGIIHEQVVTDLPALKTSIEVYHDGYFRRSKSDRNLKLLRSAVKEHPLDAYFLFQLAKEYRMAGDYRAAAPYFAQCYEHLRREEAFYPLAVVDYLYNIIASRHLEEGLELIEREKTFLPDYPDFHFVCGHYYRELVFSNIEKYIAYFPQIEQSFLTCLALGETSRYDSVRGTGSFLPAYNLGVFYETTGDTAKARMYYETAARDGYKPAADRLAKLG

SEQ ID NO: 3406 - protein, 247 aa, Acidaminococcus sp.
MGSITCIILTKNEEKNLPSALQNAASWADEILVVDSGSDDGTVEIAKKSGASVIYRAWDGDFAAQRNFALTGAHGDWVLYLDADERLTAGAIQKVLAIKKGAPNHHYSFRRENIAFGHHFHHGAFGPDRVVRLFPKAAVHWEGKVHEHAVCTVPLEALSERMDHYTYAAFADWWRKAGQYTTIWADDAYARGKRASYGKAASHALLGMLKVYLLQGGFLEGSMGIIATLQHGIYTAIKYAKLAEKNN

SEQ ID NO: 3407 - protein, 256 aa, Enterobacter sp.
MSRRLSVVMIAKNAADLLPDCLASVAWADEIVVLDSGSEDDTVGIATRAGAKVFSSAEWPGYGIQRQRAQRYANGDYILMIDTDERVTPELAQTLRAVLDAPQPGAVYSIARRNYFLGRFMRHSGWYPDRVTRLYERERYQYNDNLVHESLEAPQAQVIALSGDLLHLTCRDFFSFQRKQLNYAAAWAQERHQRGKKTSLPGIFAHTLGAFCKTLLLRGGVFDGKQGWLLAMVNAQYTFNKYTGLWALNHGYSEKE

SEQ ID NO: 3408 - protein, 271 aa, Acidovorax sp.
MSAAAGDAKVSPTLTVAVLTHNEAHRIEACLRSAAFAHQVLVVDSGSTDNTVALAQGLGAEVHSYPDWQGFAVQRNRLLAHSRGDYVFFLDADEIMTPAFQQELQAIVRSGARGVWTIRWRMVAFGQELRYFLSQSRIERLFVRSMVREFTGVVHEQAQLHPEPGGVAVPRHLVRARLLHYTRNSVRTSLEKLTQYVMLGAAKRAEAGKRGGVLRGLASGGSMFLRLYVFRLGFLCGGAGFLYCLFVALEGFFRYAALHYDRDSLTGRVIR

SEQ ID NO: 3409 - protein, 208 aa, Vibrio maritimus
MFAKRCLVDEIIIVDSGSTDGTQQIAEKYGAKFFVNSEWPGFGKQKQLAQSYTDCDWVLALDADERIDDVLQQEIQTMLIAPPKNAVFSLNELTWVFGRFLKHSGWYYHHVRLYPNSLTQYNDNLVHESVIIPDGVDTKRLKGDILHYSYKDMEHYLVKSASYGRAWADQKQKRGKSASLAQAILHALGCFLKMYVLKRGFWMVSRAF

SEQ ID NO: 3410 - protein, 270 aa, Curvibacter gracilis
MPTPSNAVRADRPTLTIGVLTKNEAHRIENCLRSAAFADQVVVVDSGSTDDTVAIARRLGAEVHLYPDWQGFAVQRTRLLAHATGDYLFYLDADEVVTPALQAEIEAAVRSNERAVWQIEWSVVAYGRELKHFLSQSRLDRMFRRDMIERFDGVVHEHAVLRDGGQPLPRHAFKAKLLHYSRETVRGSLEKLTQYSMLGAAKRAAAGKRGGVLRGMASAFAIFLRLYVFRLGFMGGGPGFLFCFFIALECFFRYAALYYDRDSLSQSVGR

SEQ ID NO: 3411 - protein, 282 aa, Unknown
  Description of Unknown: Alphaproteobacteria bacterium sequence
MALTVIIPVLDEAPHIARCLASIGTLARRIIVIDAGSTDGTADIASSHGAEVLFHKWSSDARQINWAIDTAGITTEWTFLLHADEVVLPPLAARLADLAVLPDGPLGFTVRRRFHFLGRWLRRGGLYPERTLRLWRTGHGHCEDRLVGTRMIVHGRAGAIPADIAAIDLHNIGWWTDRQNDHATREALAQLHDGWPSGAVGGIPVGIRAPAVTLWRYLVRLGCLDGWEGLVYCVLQTGWFRFLVDIKKREVEALMAERQHTLNTVAADEYGIRLIPLGINGA

SEQ ID NO: 3412 - protein, 270 aa, Verminephrobacter aporrectodeae
MSVVADGAALPTLTVAVLAHNEAQRIEACLRSAAFADQLLVVDSGSQDGTVAMARGLGAEVHSYPDWQGFAVQRNRLLAHARGDYVFFLDADEVMTPAFAQELQAIVRSGEQAVWSIRWRMLAYGCELKYFRSQSQIERLFVRALLKEYTGVVHEQARLHPLPGGGAVPRRRIRERLLHHSRSTVRGSLEKLTQYAMLGAAKRAEMGQRGGVLRGLASGGAMFLRLYVFRLGFLCGGAGFLYCLFVALEGFLRYAALRYDRDHLTGRVIR

SEQ ID NO: 3413 - protein, 247 aa, Unknown
  Description of Unknown: Candidatus Amesbacteria bacterium GW2011_GWA2_47_11 sequence
MITDCLVSARFADEIIVVDNASTDATVSMAKSHAAKIVRTKGADYSQRKNDGLKAVSPAADWVLFLDADERIGPLLRQEILQVISRRSTHSAYAIPRQNIFLGQPLFFGGWGNDYVIRLFHKPHLRYWQHPLHEEPVYTGTLGKLVNPLVHFSHRDLASMVDKTILFTGHEARLRLESLHPPVVVWRFVRVMFTEFWHRFIKLSAWRDGTRGVIDGLFQVFNMFIIYARLWELQHNPRLQTSRLIVE

SEQ ID NO: 3414 - protein, 254 aa, Pseudoxanthomonas wuyuanensis
MPTPLPLSGVVISKNEADRIGRCLQSMRSVCSEMLVLDCGSDDDTVAIARQAGARVEHQDWLGFAGQKNEAISRATQPWLLLLDADEWLADGAEQQLRELFASGRVEQADVWRLRRSNWFLGRRLHGYERTERLVRPDHRYLPMRVHERPDLAGKRVLDCDAIIEHNTARSLQAHRAKNDRYAQLWAEQRHADGKRCSALSPWTHAAAYWLKQYLLRGAWRDGRQGWQFHASHARAVVRKYRHLHALGKAGAPV

SEQ ID NO: 3415 - protein, 253 aa, Tenacibaculum discolor
MNISGLVITFNEETNIKDCIISLNRVCDEVIIIDSFSSDKTVEIAESMGAKVYLQKFLGDGPQRVHGLQFCKNDWILNLDADERLDEDSFKFIKSGKYLNEPYDAYNFRRKNFLKDQPINFAGWYPSYTCRFFNKQTAKPATTKVHQSIQATNLKTTKLHLLHFGWKDFHQIIGKYNLYTTWQSEEYFEQNKKVNFFTPIGHGLWSFLRCYILKKGIFHGLDGITFSMMQAFFSYMKYAKLRKLYENNKKGKI

SEQ ID NO: 3416 - protein, 253 aa, Yersinia sp.
MSAKKRLSVVMITKNEADLLPECLDSISWADEVVVLDSGSEDDTLDLARQYGAQVYSNVQWQGFGKQRQRAQQYATGDYILMIDADERVTPELKASIDVVLASPDDDAVYSCGRRNLFLGRFMRHSGWYPDRVTRLYAHHRYQYNDNLVHESVDAGNAKVIPLKGDLLHLTCRDFFAFQRKQLSYAEAWATQRHQQGKSCSYFSILSHTLGAFCKTWLFRAGFLDGKQGLLLAVVNAQYTFNKYAALWALNQK

SEQ ID NO: 3417 - protein, 520 aa, Acinetobacter boissieri
MIVKNEAKNLEKSLPALHGWIDELIVLDSGSTDHSEVLVKQAGGQWYSHTTWPGFGKQRQIAQQYATGDWILALDADEEITIELRDNILKVIAEPSQNVVYGIKRIDCIFGHKIDNPYWPVKAHWRLYPKQFNYNDNLVHESVVLAEAETKKLQGFLLHHTADTPFFWLDKRLSYAKAWAEDRYPKGKKVSILSIFVRSFWAFFKQYIIDGRFLMGRYGLVYSAMFAQYTFNKYAILYDLIENKAEQAFKQSLIDTEQQTTLDAQMKQSTVSLVMIVKNEARHLAACLDTVKDLVDEIILLDSGSTDHTQDIAKSYGAKWYENQDWQGFGKQRQIAQSYATSDYILVLDADERLDSDLRHSILTVLQQPIKTDVVYALNRRDYFCGRVVRQGYFDAYDRLYANHVFQFSDAEVHESLDRNSAKREVLRGVLYHHTNDSLYHFLFKNIHYSHQWAQQNVVRKKSIWLGSAFLRAFVSFCREYIFRSACLGRGYGLIFAMATMGYTLNKYLILWYLKHEKIQ

SEQ ID NO: 3418 - protein, 672 aa, Halospina denitrificans
MAFSRLNPILSAVASLALIGAIGASLTVDSALSSLTFVLALAGLTVIAVARLRGRTALAPADREIKLIGFAMAFFAIASLATWALNGFSYEGFKGLGKHGRLLLFWPLFVVLARALVRESTAFIAILACAGLAGGTALAPLIENGAVARVDGATNAIPFGNLSLLSAMLLLVAAAYGYQTGRKALLGLALIGVALGLSAAYLSQTRNNLLVLPALLLFLVIAAPPRQRIVLVGLGGLILALFTGLESRIGEGLSALWSGRYDSGITYRFEIWQKALALFLEAPISGVGSQQYAQAVLNGVESGELSRGLKRCCLDHAHNDLVQILATRGLIGALSWLLLLAIPFAQFLKLIRHESPRVAHLATAGALVPVAYLMFGLTEAALERGIYVTFYLVTVTTLTYLTWKAVDESLHRHRRQKLSATIITYNEADNIGACLESLVPVADEIIVLDSGSTDDTVAIARRYTEHVTVTDWPGFGIQKQRALERATGDWVLSIDADERVTPYLAREINHTLAASPSAEAYKLPWAVTIYGKRLDFGRSGRAPLRLFQREGVRFSEAQVHEKILLPDGYRIKTLRGRLTHYTHRDYGHALEKSAQYAWLGAKQKAEKGQKTRTLLYPSLRALTTFIHVYILRLGFLDGPVGYLMAVTYAQSSFNTYAGLWTLQRKVLRDDDQ

SEQ ID NO: 3419 - protein, 252 aa, Unknown
  Description of Unknown: delta proteobacterium MLMS-1 sequence
MMPITGIVITLNESAMIAECLHSLRRICDEIIVVDSLSSDDTSEIAAREGAKVIKQTYLGDGPQKAHGVPFAKNDWIFSLDADERLEDDAVALIRELPLDNPRMAYAFRRRNFVGTHWIKAAGFYPDSVVRLYNRNSAGYLPRKHHSKVEAPKVRHTKTHLRHFTYEDLSHWIRRIDELSALDAWAMKSRGVKPSTLRPTTHAFAALLQKLVLKGGLFQGSDGMTVAVTTAFNSYMKYLKLNELYEQDSTQP

SEQ ID NO: 3420 - protein, 253 aa, Burkholderia sp.
MQNTTLGVALITRNAAVRLAECLQAVAFADQIVVIDGGSTDGTAEIARANGARVIEQTDWPGFGPQKNRAVEALTTDWILSIDADEIVTPELAASIRAAIAAPAANVYAVDRLSSFCGQWVHHSGWYPDWIPRLFKRGTARFSDDLVHERLVFDTPAQRLTGKLMHYSYEDYEGVLRKLDAYSTAGARQRYEAGKKGSIRLAIGRGLWAFLRTYVLRRGFLDGRAGLLIAVFNAETVYYRFLKISRLEKTGGR

SEQ ID NO: 3421 - protein, 258 aa, Nissabacter sp.
MSARKRLSVVLIAKNEAELLPECLRSVAWADEIVLLDAGSHDATADIARQAGAKVYQHETWEGFGKQRQRAQSYATGDYILMIDADERVSAPLRQAIEQVLHAPQENTVYSLGRRNLFLGRFMRHSGWYPDRVNRLYEARRYQYNDHLVHESLETQGARIVALPGDLLHLTCRDLYTFQQKQLGYARDWAQQRYSQGKRCGFFSILSHTAGAFCKTWLLRAGFLDGKQGFLLAVVNAQYTFNKYATLWALHHTQPTGE

SEQ ID NO: 3422 - protein, 252 aa, Paraburkholderia sp.
MTETTLGVAIITRNAAARLAECLAAVAFADAIVVLDGGSTDGTVEIARAHGARVVQQTDWPGFGPQKNRALDALDTDWILSLDADEVVSPELATSIRAAIASPVAQVYAVDRLSSFCGHWIHHSGWYPDWIPRLFKRGAARFSADLVHERLVFSTPAQRLSGKLMHYSYEDFETVVRKLDAYSSAGAQQRHAAGKRGSFGKAVGRATWAFLRTYVLRAGFLDGRAGFMIAVFNAETVYYRFLKLERLAAERR

SEQ ID NO: 3423 - protein, 280 aa, Unknown
  Description of Unknown: unclassified Streptomyces sequence
MKRLPIVVAIPTKNEAENIATTVRSVIDHFEAVVVVDSDSTDDTRALAADQGAEIVPYTWDGKYPKKKQWCLDHIHPELDWMLFIDGDETPSPELITELHRIFDPVAADGTRKVAPAAFDIPLGYWFAGKRLRHGYTIVKRALMDRTRVRFPELGDLDAPGMGEQEGHYQPLADGPVVRLNATIEHEDLDPVRTWFERHNRYSDWEAWLELHPEVREEIRQAKTRQGQLFHKAPLKPLVSFAYAYVYKRGFLDGRAGLDYALAMSFYRWQIGLKTREESA

SEQ ID NO: 3424 - protein, 671 aa, Haliea alexandrii
MISSARGQQLLAGLAVAGFAGSLLYSSLLSAAVFLLALAAALPALRRRLHASGWERPRELRLLHFACWFPVAVFLCFWLASGFDYRALKELDGPARLLLFWPLVLALCWSTLGARHLFAGFALMALGAAVHAAASMWLGGPPSPGEPLRAGLWLNPITLGNLSLFAAAVLLSAALYWQRLQQPRYTGLALALAAAALVAALLTQTRSNLLALPLLLAVLLPLMGSRQRVLAVLAGLVFLALTVAGNDRFLETVASLQAGDFDVQTASRLAIWQIAWGEFVGHPWLGGGLNAYHDAVQAAAVAGTLPQPDFVLDCCTSHAHNDLLQSLATRGLLGGLSWLLLLVIPATVFARHLRASEPAVAFVASVGVLLPVGYAAFGLTEAVFSRSLFITFYLLTLAACGAALVTELRRACQRQRSVRVSVIVITKNEEEHIGACLASVAGVADEIIVVDSGSDDATVAIAREHTSHVIETDWPGFGIQKQRALERASGDWVLSIDADERLTPGLVAEINHVLAAPAADAYCLPWAVTIYGTRLDFGRSGRAPLRLFRRAGVRFSDALVHEKILLPEGRRVRTLRGRLLHFTHRDFGHALQKGAQYAWLGAQEKHRQGKRVRSLLYPSARGVLTFVHVYLLRLGVLDGQVGFLSAVLYAQVSFNKYAGLWTRDRPRYGAD

SEQ ID NO: 3425 - protein, 253 aa, Polynucleobacter necessarius
MPTLSVILITRNEEANLGDCLASLEGIAQQIVVVDTNSSDRTLEIARSHGAVIAQPLDWPGFGPQKNRALDLASSEWVLSIDADERLTPALRSEILTAIHHSARVNCFAIPRLSWYCGRFIRHSGWSPDYVDRLFKRGTARFSDDLVHERLIPSGSVARLKNPMLHYSFMNYSQVLQKLDRYSTVSAEQAFAKGKTSSPLKAVFHGAWAFIRTYIIRTGFLDGGQGFALAISNAQGTYYRYIKLWHLNQEARK

SEQ ID NO: 3426 - protein, 288 aa, Bryocella elongata
MQTVGQDGEHSRPSITGVIVARNEADKVMHALASVRPILDELLFCDMESSDATAAIAASFGATVIPVALATGQEPVRPAAVAKASGEWVLMFDADEVIEPRLRETLLRIARQDEADVVSLPRFNYLFGKPMYGALMGANDDRQIRFFKKGAVEVTAALHVQPVVQPGARLKELTFQHDGAIIHFNYVDIDNYLTKFIRYTYMESRKPSAAAKYKLFPTILKMGWEFVNRYLRKGGYRDGWRGFYIAASMSFYRLTIWARVCEMEDVGTREQIQSIYSREAARSVRENH

SEQ ID NO: 3427 - protein, 258 aa, Pantoea sp.
MSQRQRLSVVMIAKNEAELLPEALASVSWADEIVVLDSGSHDATAEVARQHGAQVYQAEAWAGFGKQRQRAQARASGDMILMIDADERVTPPLRHAIEQVLAQPPAATVYSLNRSNLFLGRFMRHSGWYPDRVMRLYPRHLNYNDNLVHESLETQGAPVVRLEGDLQHLTCRDLVVFQRKQLNYAEAWAQERFQRGKRCGIFSIFSHTLGAFLKTLLLRAGFLDGKQGWILAVVNAQYTFNKYSALWALHHTSTQGRV

SEQ ID NO: 3428 - protein, 264 aa, Unknown
  Description of Unknown: Betaproteobacteria bacterium HGW- Betaproteobacteria-16 sequence
MNESPANRLCVGILTLNEERRIARCIESASFADQIVVIDSGSTDATRDIAASMGADVHLFPDWQGFAVQRNRMLPLVKCEYFFFLDADEVITDELKQEIQQAVASGDNAAWKVYWDQVAFGKALSRMAKTAGGVKRLFRTDNILEFKGVVHEYAQLKDESAPTRVFKGRLLHFSRDTVYESLLKLAQYSQLGARRREQAGKKGGVLRGLGSAISNFVRFYVFRRGFMCGPQGFLFCLLVALECFFRYAILEYDPPQGANAVVKR

SEQ ID NO: 3429 - protein, 522 aa, Moraxella sp.
MIVKNEAHNLALSLPSVAEFADEIIILDSGSTDNSRQIAESFGAKWFVNTDWQGFGKQRQIAQSYATGEWILALDADEVVTMALKNSILQTIKNPPANTVYGIKRLDFVFGHQIDNALWGVKAHWRLYPKHFGYDNNLVHESVVLTGANTAKLDGFLEHHTAPTPKFWLEKRLDYAKAWADDRHNQGKKGKFYKVVLNPLWAFIKQYVIDGRFLQGRYGLIYSLLFSQYTFNKYACLYDLSHNQAEQAFLQSVAMTKNLQPIDLSQKKSTLSLVMICKNESKHLKACLDTVHDIVDEIIVLDSGSTDNTRQIAESFGAKWFVNADWQGFGKQRQIAQSYATGDYVLVLDADERLEQPLRQAICDVLRSPLQTDKVFSVARVNTFCGVEVQPRFWYTDKLARLYANQAFCYNDLQVHESLDQKGVPSVVLKGFLPHITNDNLHHFLVKNIRYSHDWASEKHIKGKRIGVIGMVLRSCFSFIREYVLRADFSSGAYGYILAVASLGYTLDKYVMLWQMNQDKQP

SEQ ID NO: 3430 - protein, 286 aa, Unknown
  Description of Unknown: Planctomycetaceae bacterium TMED10 sequence
MTLSSTMSSHSALPRSSAGHPEEKQTLRATISAVLITKNEASQITPCLRSLTDWVDEIVVLDSGSTDATLDIARQHGAKVFVREDWEGFGIQRQRAQDLATCDYILAIDADERISRELRNNIEAVLKNPDDACLYQVVRQNAFLDKDVFHNGWRREKIVRLYAKNNFKFNSRAVHESVDSKGIQTRTLSGFLIHDACRNYEYYLEKHLAYAHSWARNQAQAGKTGSLFDAVLHGLTTFGRLFVLQGGFLDGRHGFLFAVHLSQYSFNKYAALWYYGRQFRRGKNLQ

SEQ ID NO: 3431 - protein, 379 aa, Delftia acidovorans
MPPGNRQVRVRAGLAVASLHLTPTFFSIHMPQTALVIIARDEERSIARCIDSAKDFVDEVLVLDTGSVDRTMEIARSCGAQVHRFEWCDDFAAARNRALDLADANWNLVLDADEWLVEGGAWLAGLPTMERQLGVADVQSLYEMGVTGSVSRSRITRLLPRGVRYQGVVHEQPLSDLPRVLVPLVIRHDGYLPEQMSRKQGRNQRLLQQQLGRNPRDAYVNYQLGVDCELNKEFSKACAYYGVAMDQLEVSSGYEHDLCVRYLYCLGQAGRHEEGLALAQAQMPKWQDSPDFFFALGGVLLDAAIAKLDGQVEHWLSMAQASWERCLEIGEVDAGPHGGVAGRGSYLAAHNLAVMHEQLGNLDEARALRLRHPMPASGS

SEQ ID NO: 3432 - protein, 261 aa, Rhodanobacter sp.
MRRERLSVVVITLNNAATLDACLSGVDWADEIVVLDSGSTDDTLAIARRHGARVAMHPFDEFGPQKQRAIDMASHDWILNLDADEVLSPASRAVIERALVNPRCAGFRLPRRERMFWTVQHPWSWRNAHLRLYDRRRGRMNEVEVHSAMEVDGPVKTLWRADFINDSDPDIASRIERINRYSSALVAHKLRRRQRFTGLRMVLYPPVFFLRQYLFKRYFLSGWAGFIASVVGANYVFLKYAKLHEARRQAKPGSRVGNDPE

SEQ ID NO: 3433 - protein, 400 aa, Sulfobacillus benefaciens
MSVISVALIVRNEEQFIEQCLQSVRDITDDIVVVDTGSEDATIKLAQKEGARVISRPWPGDFARARNWALEEAKNPWILMIDADEVFLADDKDKLIQAVTRPTADAYNLRIVSLTDRAEDLAEARVTRLFRNDPRIRWEGRVHEQIIPSINRAGMVLNPLDVRLMHYGYLNKVMVDRKKLERNLDLLDQSLAEAVQPEWKAYLYWQRAQTLVPLERYDKAIKDVRQAMDLSHPTAPLQPLFWMTLVKIHTAKRDLRKVHQTVREALKLFGDYTDLVYWEGLVFIDEGQWGKAEECFNKAISLGVPKDYLQSELGVGTFKALWQLARVSWLQGNLTLAEAYYLKTIQLKPAFYPAWKEYLAFVANTDAPIVYQRLTMVLAPKQILEVLSAIPNMTLLEDAI

SEQ ID NO: 3434 - protein, 259 aa, Pantoea stewartii
MTATRQRLSVVMIAKNEAALLPDCLASVSWADEIIVLDSGSTDDTLSLAQQAGAQVFQATEWQGYGKQRQRAQSFASGDMILMIDADERVTPELRQAIEQVLEAQPGPTVYSLSRSNLFLGRFMRHSGWYPDRVMRLYPRTLGYNDNQVHESLKTEGAPVKVLKGDLQHLTCRDLMVFQRKQLAYAEAWAQERFQRGKTCSLVSVFSHTAGAFVKTLLLRAGFLDGKQGWLLAVVNAQYTFNKYAALWALNKTSAEGRT

SEQ ID NO: 3435 - protein, 488 aa, Sulfobacillus benefaciens
MDCMAPAATPVTAETMQEITNMLRQEQYPRVQETVVSILEDNPAIAQLWVFLAEALEHLNKKEEAWACYERAWILDPAAAWAPGTKERLKAHVNGQIPKWLKSLLEVPKVSLSAAMIVKNEAQTIADAVKQLLKATDEVIVVDTGSEDDTMALAKDAGAKVYSYTWEDDFGQARNEALSHVSGDWVLFVDGDEVLDDEDVYVPRTVAGLFNQQDPPFIFRIVQVNHMGGTIEPNYDMSRLFPTRFGLRWWGRIHEQIGPPEGGVFAQVYNRPVVRIRLHHTGYEPEVMLQKKKLDRNIELLRKTVEEDPRDVASWGFLGREYYLVGKLEEAVRALYQAEGLAAGNPNYGRVPEVRSYLTEALLKLDRLEEALQVTKRLVKDMPQFPGGWYLKGRVELTIAVKMLEEAKVSFAQSRDQAPSYRGIVSYDSAIPGFRSVVGLADVAKLQGRLNDAVTLYKMALEANPEAKEVEAQLNYLKEQSRQILQRS

SEQ ID NO: 3436 - protein, 392 aa, Bacillus pseudofirmus
MTEEPLISLCMIVKDEEESIEGCLKSVSGIVDEIIVVDTGSSDNTVSIAKENGAKVYYKEWKNSFSEARNESLKHANGKWILCLDADEQLDKKAGQQLRELLKTTRYDVLTFPMLNYYGASVSSDQCVSLGKIKCFRNKLSLKYVTDIHEQLDLSEVDAEQEGEVDIPIHHYGYLDQYVKGKKKTERNLQLVKQQLEKEDNGWMRYYLAAEYYQQKKYIEALKELDTALFQYLKKGLKPPAYIYRLKYTILVERKQWKFVREGIEKVLMLYPDYVDLWFYKGMALYNEKEYDEAIYCFEECIRLGESNLSYYTVKGVGSFNSWFYKGLCYKKLNQQDQAIISFIHSWLLSPNNKILVNEIRKIVKYFHGWMELLESNLSKVESEKVKQFFQQ

SEQ ID NO: 3437 - protein, 259 aa, Mixta calida
MTERQRLSVVMIARNEAELLPDCLDSVSWADEIILLDSGSEDATLSIAQRYGAKVFQSHSWPGYGKQRQQAQAHASGDMILMIDADERVTPELRAAIEQVLNGTPQADKVYSLGRLNLFLGRFMRHSGWYPDRVVRLYPHTYRYNDNQVHESLETGTAQVIALPGHLQHLTCRDFSAFQRKQLAYAEAWAQQRHQQGKRCGVFSIFSHTLGAFCKTLLLRAGFLDGRQGWILAMVNAQYTFNKYAALWALGQSATGGKS

SEQ ID NO: 3438 - protein, 612 aa, Paenibacillus sp.
MTTISIILLAQHAELTDPCLSALQQHTPGQIELVVVNDGDRADTARAIDRYAERVTRVIATPSLTGLAAGYNIGAAAAAGERIVFLRDHVTVTPGWLEGLSRVMDLYPDAVAVGPVSHGVSGAQQLDLPIDGLLRLSADQRSMVLTRGGEAHIRTNRLLSFLLLVDRARFHELGGFDEQFVMESYEDDDYCLRVLQAGYGLYIARDVAVKYTMPPLLFPDDPSWYGRQLATNRELAAAKWGEDVSALLNRQTRPVSVSLCMIVKNEEATLEGCLSSVAGLVDEIVIVDTGSTDRTKAIAARFTNRIFDFEWVHDFSKARNYSFQQATGEYILWLDADDVFLAEDREKLRQLIGSLPYHADAVSMPYHLHRDQHGNVTSSIRRNRLVRKSMGYRWIGWVHEYLEVQGSILASDVAVTHNRVHQSTTRNLELYETRISQGDQLGPRDTYYYANELYDHGRWAQAAEQYEQLLKLPNVWVEDRIGACGKAAECYIQLQQLEDARLKALQSFSYALPRAENCCRLGQIFLSEQRYQEAIYWYETAAQLTMPTDSSALLLHAYWTWLPQLQLCVCYDRIGDYARSYAANERAAVYLPDDQRIIDNRAYLQQRLEAIR

SEQ ID NO: 3439 - protein, 297 aa, Bordetella genomosp.
MTRVPVSVIVMTKNEERNIEKCLRALSDFDEVFVVDSHSTDRTVEMATALGARVVQFEWNRRYPKKKQWCLDNLPFSHDVVLYVDADEVMSPALAREINDCLPRFAQGAGGAFVGFDYVFCGKLLRHGHRVYKLVLLPRARSRFLDYNDLDVANMWEVEGHYQPQVTGPVFLLKHRMAHHDHDGLFHYFDKHNKYSDWEASLRVKGLLNDPREANIGLRSAMKRIFAAMPFKAAAAFVHCYIVRLGFLDGKTGLDYAVARSMYYWQIGIKARELRAAMAAASPAADANADPVRGGTH

SEQ ID NO: 3440 - protein, 523 aa, Acinetobacter indicus
MIVKNEAKNLELSLPALKGWIDELIVLDSGSTDHSRQLVEDAGGQWFENLNWPGFGKQRQLAQSYATGEWILALDADEVVTEQLQQSILKAIQQPPLDTVFGIKRLDCIFGHQIDNAYWPVKAHWRLFPKDYQYDDNLVHESVVLNGAKTEKLQGFLLHQTAPTPKFWLEKRLDYAKAWAVDREQRGKTVGIWGVFFHTLWAFIKQYLIDGRFLMGQYGFIYSLLFTQYTFNKYAILYDLKNNHALATFNQSLENIKKLQPVDQSEKKSTVSLVMIAKNESKHLAACLATVHDLVDEIIILDSGSTDQTEEIAKRFGAKWYVNCEWKGFGIQRQIAQSYATQEYVLVLDPDERLDQALRESIVEVLKQPLQTDKVFSLARVNQFCGVEVQKRFWYADRLARLYANKSFQYSSLEVHESLDQKNVPAVKLNGYLEHLTNDDLHHFLVKNIRYSHDWASDKFKHGKKIGLFAAVLRGIFSFIREYIIRGDFLGGAYGYLLAMASMGYTLDKYLMLWQMNKESNKK

SEQ ID NO: 3441 - protein, 308 aa, Planctomyces sp.
MPVLDEARTQVQAQAPERSADAPRTGRAPVSVIVPVKNESANLRRCLPALDWADEVFVVDSQSNDDTCDVAVEHGASVVQFAFNGVFPKKKNWALENLPFRNEWVLIVDADEVVVPELAEEIRARIAADEAEGFYLNSKYYFLGRRIKHCGYSECWNLRLFKHKLGRYERMPDHTGGRSGDNEAHEHVELQGRVGRLRHELDHHAYPTIAAWVEKHNRYAVWEAAQYERFLSEPIPKSIGRGKRFKRMLKKIYLRLPMRPAVRFLYSYVLRLGFLDGKPGLVFCTLLSFYDFLSWANVYENRVTERDA

SEQ ID NO: 3442 - protein, 529 aa, Unknown
  Description of Unknown: Acidobacteria bacterium sequence
MTKLTAIVLTGDCQEQLPGCLESLGFADKILVVDSGSRDRTREIASAHGARVLQHPLERFDEQRNWAQQQADTDWVLFVDSDERVSPELAQEVVAALASGGEAVAYSMPRRNHFLGRWIRRCGWGNDRVTRLLRRAAVRWEGAVHEKPRIDGSQGSLQAPLIHHSYPTISVYWDKMQLYSRLAAAEDFRRGKRSGFLRLGVQPKLVFLRMYLLRGGWLEGRHGLVLCLLSAFSAFTRALRLWEHQLGASGRSLLPEGPAVEAPHQGGPQLSILVPTHNEAANIEAVLDSTGWADEVLVVDSFSDDGTVETARRRADRVLQHEYINSAAQKNWALPQTRFPWTMVVDADERVTPELAREVRQVLASGPAHQGYVIRRVNHFHGQRIRHCGWNRDRVLRLFNRERSRYQELEVHAEVDVDGSVSTLRHPLLHYTFRSVDQYWPKLRRYTDWGASQAYTDGQRTTLHHLVARPMGRFIKMYLLRLGMLDGTRGLVICWISFFSVFSKYAKLWEKHLDAGSLPGTVKTGSSRA

SEQ ID NO: 3443 - protein, 259 aa, Chitiniphilus shinanonensis
MTSPTLGVALITKNAARRLPECLTALAFADRIVVLDSGSDDDTVAIARAHGALVEVSPDWPGFGVQKNRALALLDTDWLLLIDADEVVTPELAASIRAVLANPAHAVYALNRLSSFCGHWMRHAGWFPDWIPRLFRRGAARFSDDLVHERLLFEGGAGRLDGLLLHYSYEDHADVLRKLDAYSTAGARQRFARGQRGGLGKAILRGGWAFVRTYFIKRGFLDGAAGFQVAMFNAETVYYRFLKLAAMEREGRGARNPKS

SEQ ID NO: 3444 - protein, 260 aa, Unknown
  Description of Unknown: Candidatus Hoaglandella endobia sequence
MSQRKRLSVVLLTRNEAELLPNCLASVSWADEIVVLDAGSHDQTRYIAAQAGARVFQSTDWPGFGIQRQRAQAYASGDYILMLDADERVTPPLRQAIEEVLQQSNNPKVVYSCARRNLFLGRFMRYSGWYPDRVVRLYAREHYLYNALPVHESLEIGEAAIVALPGDLQHLTCRDLPAFQRKQLQYAEVWAQAHHHQGRRCSIFAIIVHTYSTFVKMWLLRTGCLDGKQGWLLAIVKAQYTFNKYSALWALSHAAKENNL

SEQ ID NO: 3445 - protein, 291 aa, Unknown
  Description of Unknown: Acidobacteria bacterium 13_1_40CM_4_58_4 sequence
MHGEFVTGPQQRPRNLSTIPLTVVMPTLNEAARIHESIIALAWADEVIVVDGGSSDGTPERARTSGAKVLQVTGATIAGQRNAGIAAARNHWVLALDVDEHVPEALRAEIESVLAAPKHEAYRLSLRNFYMGGELRHGIWVDDWHVRLFSRERRFVEQRVHEELEPVRDVGTLHAQLEHTSYRDLAHHLEKITRYAKWGAQDLYDRGRRASFLDVTVVPAWRFFREYVLHSGWRDGQRGLVLASLSACAALLKFAHLYALEWQATRPQSIPMVQPQHSLPAIRAREGEPTE

SEQ ID NO: 3446 - protein, 262 aa, Unknown
  Description of Unknown: Burkholderiales bacterium sequence
MARISAYIIAFNEAEKIEAALRSVSWADEIVVADSFSTDQTVEISRRHGARVIQVPFEGFGRLRNSALEALAGDWVFSLDADERCTEAAAAEIRATVERVDAADAYWVPRRNYVFGRWMRHSGYTPDYRQPQLFRRGKMRYTEDSVHETFVLDGTLAYLQEPIAQIPFRDLSQMLYKMQRYSTLGTERLRARDVRASMAGALAHGTAAFLRHYVFKLGFLDGWAGFIIAFANFEGTFYRYAKHLEQTRGLVREPDLPRSFRN

SEQ ID NO: 3447 - protein, 352 aa, Rubrivivax sp.
MHRTALVMIVRNERRCIQRCLLSVKPWVDELVVMDTGSTDDTVALARACGATVHHMAWPDSFAAARNAALDCSTADWRIVLDADEYLQHGGEALAALRQHAPDFVGALDVVSVFHDGTGTPGRASSLISRVLPRGVRYEGVIHEQPVHRWPVRRLPVAVQHDGYLPEYQQGKGDRNQRLLQAALAARPHDPYLLYQAGKDHEVHDRFEPARQAYDAAYALTTASAPYRHDLVLRHLFTLKALGRTAEAIHLADSEMAHWPHSADFHFVLGDVLLDHALAHPASAPELLPMIEASWQQCLALGDTPALEGAVQGRGSYLAAHNLAAFHECLGHVEQAAHFQALARRLREAAQP

SEQ ID NO: 3448 - protein, 303 aa, Beijerinckia mobilis
MTELAVVILTHNEEMHIGRSLDSIAGIASEVFVIDSGSTDTTVAIAKAKGAHVLPHPFVNYAKQFQWALDNAPITAEWVMRLDADEIIEPDLAEEIRSKLPRLGPDVVGVNLKRKHVFMGRWIRHGGRYPLLLLRIWRRGAAHIEDRWMDEHMIVSGGTTVVFEGGFADCNINDLTFFTQKHNKYASREAVDVINQRLNLFPRPDDLSTQATSWQASAKRFVKEKLYNKIPFPLSTTGYFLLRYFVQLGFLDGIEGLIYHFLQGYWYRFLVGAKVLEFERAISHCKTKDEQRAELARISGLKL

SEQ ID NO: 3449 - protein, 307 aa, Unknown
  Description of Unknown: Proteobacteria bacterium sequence
MKAPPCSFGPKRTTMVFVNKSIEKIPCSVVLIARNEAGHIARAVASAAEFAETVVVDGGSTDNTVAIAEAAGARVVKRPWTNFSDQRNYSLAQAQHDWVLVLDADEAITPALTGWVREFFAAGRDKAAPWGYKIRRAEYFIGKRILGACWNPSFQDRFFLRAKASYVGEIHEYPLVEGGMVNAPEEMLIEHNPNITAESFFDKMNRYTTIEAFDRYRAGQRTSLPHLGVVFFATWWKNYFYYKGYRDGAHGFVICLMEAVSRTVRHIKLWQIQEMHRLGKAEHLPDPRRALEGSQSRAMESKAASRP

SEQ ID NO: 3450 - protein, 303 aa, Blastococcus sp.
MGVNSRAGSRTLKTSDFAPRSIPVSVIVLTKNESANIGHTLRQLSPFDDVIVVDSDSTDDTRQIASSQGARVVLFEWNGQYPKKKQWSLENTGATHDWVLLLDADEYPTADLVREIDALVRSGALATGPDAYDIQLSYRFAGRILRFGHRVSKRSLLNKHTVRFPEVGDLDAPGIREVEGHYQPQGCEEPGQAQAALIHDDRDPVSTWFERHNRYSDWEAHLRRNRAVRRQVAALRSDRGARFDSVPGKPVLFFLYSYFVKLGFLDGRAGLDYALALSMYYWQISVKVREKSQGGAETSARRS

SEQ ID NO: 3451 - protein, 267 aa, Advenella kashmirensis
MPAEPGHAPRRVTLAVALIVKNEAQYLAACLDSVAGWADEIVILDSGSTDATEEIARRYTQAFYTSADWPGFGPQRQRAQTHVTADWILWLDADERVTPQLRASIDAVLQDPPANTVYQVARLSWAFGQFIRHCGWYPGYVERLHPRALTRYNDALVHESLVLPPGAQLKTLQGDLLHFTYATVDEHLRKSAGYAIAWAEQREAAGKKGSLLTATLHAGARFIRTYFLRLGILDGKAGFLLSVMAAQSVFNKYACLWSRTRQTRRPD

SEQ ID NO: 3452 - protein, 259 aa, Thiomonas sp.
MPNRPSAGPTVSAVIITRDEAANLPACLESLAWCDEIVVLDSGSTDATPELARAAGARVHITPDWPGFGPQKNRALALAGCDWVLSIDADERVSPELAHEIREAVRAPGAPTAFAMPRLSSYCGQFMRHGDWYPDDVLRLFRRGSARFSDDLVHERLLVDGPRGRLHARLLHHSFRDMHQVLAKLDAYSSAGARAMHARGRRSGVLGALGHGAWTFLRGYVFKRGFLDGRLGLVLALSNAHGAYYRYIKLWLLQREPAC

SEQ ID NO: 3453 - protein, 404 aa, Unknown
  Description of Unknown: Candidatus Rokubacteria bacterium sequence
MISLAMIARNEKERLTACLASARPAVDEIVVVDTGSTDGTLELARAEGARVVPWAWRDDFAAARNESLRHASGDFVLVLDADERLAADAVLRVRALATAGRADGFDCRLVSRLPADQPSPVITHWYCRLFRKRDGVRFTGRIHEQVAPSIWRAGGRIAPSDVTILHEGYVEVSPAKLERNLRLLELEMADRPGDAFVNFNLGMTLLSAGHWARASAAFERALAAPEAALAPHLRAVAWMKLAEMRLRAADWRGAAQAADQALGLEADLAMARYALGRALFEHGAIAGAGRVFDDLATAPADALGMTLHPRVVAVARALVMLRQRRFQEAADVLKPVAADDPTGEAALHFGNACLALGRLSDAAAAYESARARGVNDPHLDRRLALATRLAEAGTTAAANNRQGA

SEQ ID NO: 3454 - protein, 273 aa, Geminisphaera colitermitum
MFSTVILTLNEERNLPACLASIAGCDDIVVLDSGSTDRTADIARAAGARVFVNPFHNFAQQRNHASDTIDFRHDWVFHLDADETFTPALLDEIRVRLATDDLQLIDGYYIAPRMIFRGRWIPHCTDYPAWQARLIHRKRFRFVQAGHGQREAPDMRMGRLRENYHHNLSSESEETIAQKLARYARSEAAHAAATCRPPRQLLRALLSRDALARRRALKELSYRLPARGAIRFIYQYLLRRGFLDGSPGLAYCRLLAGYERESARELRRLRKIS

SEQ ID NO: 3455 - protein, 248 aa, Prevotella sp.
MVINTYNASAHLKRVIGSVTGFDEILVCDMESTDDTVAIARGCGCRVVTFPKDGCDIVEPARQFAIDSASYDHVLVVDADELVPDELRNYLYGMLAGGSCPAGIAIPRRNYFMGRFMHSCYPDYVLRFFDRRVTVWPPVIHTSPRVDGTVVKIPAWRTGLALEHLANDSVSAIIRKTDVYSEHELPRRRHKNYGLFAVVYRPAFRFFKSYILKRGFLDGMPGLIHATLDAVYQFAIVAKLIEERRRKK

SEQ ID NO: 3456 - protein, 268 aa, Alcaligenes faecalis
MASSSTTEVEQRAVTGSGKRLSVILITKNEQAHIRACLESVAFADEIIVVDSGSTDQTVEIARSLGAKVTVTPDWPGFGPQKNRALDQATGEWVLSIDADERVTPELAQLIQQEMAQPRGMAYRIARLSEFAGRWMRHSGWWPDRVLRLFKRGTARFNDAKVHESVQTDHPVLILDGHFLHYPYASLEIFIDKINRYSSDAARQMQAKGKTTSLPGIAGHASWTFVRHYIVRRGFLDGPQGFILACMAASGSLFRYSKLWYYTRQKSD

SEQ ID NO: 3457 - protein, 270 aa, Delftia acidovorans
MPPGNRQVRVRAGLAVASLHLTPTFFSIHMPQTALVIIARDEERSIARCIDSAKDFVDEVLVLDTGSVDRTMEIARSCGAQVHRFEWCDDFAAARNRALDLADANWNLVLDADEWLVEGGAWLAGLPTMERQLGVADVQSLYEMGVTGSVSRSRITRLLPRGVRYQGVVHEQPLSDLPRVLVPLVIRHDGYLPEQMSRKQGRNQRLLQQQLGRNPRDAYVNYQLGVDCELNKEFSKACAYYGVAMDQLEVSSGYEHDLCVRYLYCLGQAG

SEQ ID NO: 3458 - protein, 267 aa, Paenibacillus stellifer
MTDCKPLSVVIITQNEEEKIEQAILSCRPFADEIVVVDGGSTDGTVAIAQRLGCDVYHNPWPGYAKQRIFGADRARNNWIFFIDSDEEVSAELQKSLQDWMTRPEDDIKAYNIYRIGDFMGKWMPKGENIVRLYKKDEVAMKDVLVHEGPDVDSSSVPVLEGVLWHHGYRSIQDHVQRFNKYTDLEARKDFDRRRPFSLMRLLFRPPAKLVYTLFFRKMITKGVAGFSVAFFWMYYEFLKEIKLYELHRTEKKQKPVYIVESEKHPV

SEQ ID NO: 3459 - protein, 321 aa, Unknown
  Description of Unknown: Nitrospirae bacterium CG18_big_fil_WC_8_21_14_2_50_70_55 sequence
MFCLGEPVELWQHFPGRPRGRRPHVVEQPPICCTPKHPGSRLQTADPTSPRPTPGDPQRAELQRVGAPLSVAVLALNEASRLASCLESLRFADEVLLVDGGSQDRTVAIAEEFGCRVVVQPWLGYSRQKQLAVDRCRNDWVLILDADERIPPATAAAIRTLDLGTAAPAAYRLRRRNYFHGRWIRRCGWWPDRVVRLVDRRRGRFCDRQVHEQWLARGPVAELDADLEHRSFRTYADLVQKMQLYSSLSALEMAHQDLRVHPWSAATHGLWSFLNTYLFQLGLLEGFDGFMIATANAGGSFLKYAKLYELNRYGDGREGED

SEQ ID NO: 3460 - protein, 361 aa, Massilicoli timonensis
MKTISLCMIVKDEEAVLSRALDSIKDVVDEMIIVDTGSKDQTKAIASRYTPHVYDFIWCSDFAKARNYAFSKGTMDYLMWLDADDVLKEADRQELLALKETLNDDVDMVMMPYVAAVHEDGSVAFSYERERLFRRDRHDQWQGAVHEVIVPAGKILHSRVHIWHQSIKKTKTRRNLDIYEAIRKTRSLDAREQFYYARELQECGESRAAVQAFITFLQRGDGWAENCIDACRHLAYLEPEEALNWLFHSFIYGKPHAEVLCEIGSCLFQMRRYQEAIYWYRQALHAKRVKGAFIVEDAYGFLPSLGLCVCYDQLHQQKRAYHWHLRSKHYHPEHPSVLHNEAYFQQILGSLHAKQGKTMIK

SEQ ID NO: 3461 - protein, 254 aa, Phaseolibacter flectens
MPRQKLSVVLITKNESELIGDCLKSVSWADEIIVLDAGSTDDTCEIAAANGANVHQSQQTWPGFGIQRQRAQQYASGEMILMIDADERVSPQLQSSIETILQQPQQPNTVYSLNRSNWFLGRFMRHSGWYPDRVIRLYPRHFHWHAHLVHESLNSENASIENLKGDLLHLTCRDLYRFQQKQLAYADAWARQRINHGKTCRLYSVYSHAVAAWLKTLLLRGGILDGKQGFILAMVNAQYTFNKYAMLWALSRSA

SEQ ID NO: 3462 - protein, 255 aa, Unknown
  Description of Unknown: Deltaproteobacteria bacterium sequence
MTKPVTATIITLNEEANIEAVVASAARFCDEVIVVDSASTDRTVELAEAAGARVFVQPYLGDGPQKNYGVKYAKNDWIFSIDADERLEDSAVKTLLELDLEHPDADAYAVRRKTFIGDRWIKLWYPDWVTRLYDRRLCAYEESIGHASVKGGRIKKLPCDLLHYSYADYSDIVKRVDKFAARGAKQLLARGGRISPLSPLLHGISRFFKQYILRGGIMQGLDGLNVSVISAFGAYMKYAMALEAKRNKAARERQR

SEQ ID NO: 3463 - protein, 266 aa, Caldilinea aerophila
MVRLAAVILTYNEAHHIEACIASLRGCADVVVVWDSGSTDGTPARARAAGALVVQRPFDNYAAQRQAALDAINAEWIFFVDADERVTPMLAAEIAQVIEEAERSSQAPVGYWVPRRNLIVGHEMRGGGFYPDHQLRLLRRGTAHYVPDRHVHEIVELSGQDAYLRHPLIHFNYFSWEQFHRKQRFYAAYEARILAMRGIRPRPHNFILQPLREFWRRFVTLSGWRDGWQGVRIAFWLAWYYGLMPYVILLRLRPEQTGYTTAGRMK

SEQ ID NO: 3464 - protein, 259 aa, Oceanisphaera profunda
MSTRPTLAAVLIVKNEAENLADCLATLDWVDEIVVLDSGSTDDTQAVAEAVGARFFVNSEWPGFGKQRQIAQSHVQSEWVLWIDADERVTPELKTSIEAALTKPKANTVYSIPRLSWVFGRFIRHCGWYPDRVLRLYPKALTGYNDALVHEKVHLNKGVKVKKLHGDLLHYTYRDLEHYLVKSAGYARAWAEQRQLRGKQASISQGIFHGLGCFIKMYVLKAGFLDGKQGFLLSVLSAHSTFVKYADLWINTHTHGPKE

SEQ ID NO: 3465 - protein, 312 aa, Bosea sp.
MAVAEHGLDRSGVTTSGIAPTPTPADRPEPRSGCTPGISALIMTFNEEVNLPACLASLAWCDDIVVLDSGSTDRTVEIARLAGARVVERPYDNECNQRNFGLTGIGYRHPWLYIPDADEVTPADLRDEMLAIARDPSRPESFFRARYRNMFMGRWIRRSSLYPTWIPRLVHVDRVRFERAVHMRCMGEGPEGRLEAHFVHYSFNKGLSAWYDKHNKYSQVEAREALRSLRDGRVPWADLFAATPEARRRALKELALRLPFRPTLRFIYMYVIRRGFLDGWPGFTYCRLLATYEHMIVLKTVELERREKGLSI

SEQ ID NO: 3466 - protein, 257 aa, Orrella dioscoreae
MDRASMPRVSVIIITKNESAHIQACLESVAFADEVVVLDSGSTDDTRDLALAWGARVEQSPDWPGFGPQKNRALDLATGDWVLSLDADERVPPELAEEILAVIASPQHDAYDVARLSELCGRPIRHSGWWPDYVLRLFRRGTARFTEAAVHEKVVPQGSVGKLRHHLLHFPYADLEALIAKNNRYSSDAAAQMHARGKRTTPLGMLGHGIWTFIRIYFLRRGFLDGRQGLVLALFAASGSIFRYAKLLLWDETRGKG

SEQ ID NO: 3467 - protein, 304 aa, Bradyrhizobium sp.
MNLAVVILTRNEERHISRALASVAGIAREVFVIDSLSTDHTVDIARAAGATVIQHEFINYARQFQWALDNAPITAEWIMRLDADEVIEADLAATIREELPKLAPDIAGVNLKRKHIFLGRWIRHGGRYPLVLLRIWRRGQGRIEDRWMDEHIILSGGRAVTFEGGFADCNLNDLTFFIDKHNKYATREAIDVINQRRQLFRRDVDLVTQEGSRRAAVTRWIKENIYNHISYRISAPGYFLFRVIFQLGFLDGKEGLVYHGLQGLWYRFLVGAKVEELELAISGIEDPQLIRAELRRLTGLAIDG

SEQ ID NO: 3468 - protein, 250 aa, Unknown
  Description of Unknown: Chromobacterium subtsugae sequence
MAISGLVITLNEAHNIVDCLRSMKAVCDDIVVVDSGSTDGTIALAEAEGATVIVQKPFLGDGPQRSLGLPHCRHDWVLNLDADERLEPDFVEYAQKTDLAALGVDLVETRRRNYIGDRFTPYAGQYPDYVKRLFNRQRADFTPVVAHTYVKAASAKRVPIHITHFSYRNYPDMIAKCKYAEWLSIGLAKSDKRIYPWQPALHGGWAFFRHYVIKLGFLAGLDGLTLSICKGVGSYLKYAHAIELRRSGKA

SEQ ID NO: 3469 - protein, 253 aa, Unknown
  Description of Unknown: Acidobacteria bacterium OLB17 sequence
MKISAVIITLNEEANIARAIASAAWADEILVVDSGSTDATRSIAAELGARVIEQPWLGFGPQKQFAAEAAANDLIFSLDADEEVTAELAGEIKQLVASGRILDGYRVPRLAIYAGRKIRHGGWYPDRQLRLFDRRKGHWSDDKIHESFKLAADATRGDLKNDLLHYTCTDIAEHARMIQERYAPLSAAAMNAKGKRASILAIAAAPAFAFFRDYILRAGFLDGPQGLIIAGFGAYNVFLKNVLLWQIQRAEKS

SEQ ID NO: 3470 - protein, 253 aa, Pasteurella skyensis
MPTISVAMIVKNEQQDLAQCLDTVKDWVDEIIILDSGSTDNTAQIASDYGAKFYTNTDWQGFGKQRQIAQKYVTSDYVFWIDADEQVTPELKQSIIQAVKDDKPNTVYKIGRLSEVFGREIRHSGWYPDYVVRLYKTDFAQYGDELVHEKVHYPENTTIIKLKGDLLHYTYKNINHYLVKSASYAKAWADQREQSGKKASLFQAITHSLGSFIKMYLLRGGFLDGKQGFALAILSSISVFSKYADLWARNINK

SEQ ID NO: 3471 - protein, 309 aa, Unknown
  Description of Unknown: Acidobacteria bacterium sequence
MSLVQGARGTEEVENGGCVHVGQVYGGTLPCDRPFRPAGRPCVPAIVAAVVPLTVAIITRNEAAHIEACLASVAWADDRLVVDSGSTDDTVARAERAGARVIVRDWPGYAAQKNFAAAEARHDWILSLDADERVTPALAHEIRDLFDQPVPPPAPGYRIPRMTWHLGRWIRTTDWYPDPQLRLYDRRRGRWVPRRVHESVAIDGEPGRLVHHLEHYAYRDIAHHLETMNRYTTLAAEDMFEAGRRASPADLVVHPAAAFARNYLLKRGFADGLPGFIVSIMNAHYVFLKMAKLWELGRRTTHGSADPSG

SEQ ID NO: 3472 - protein, 258 aa, Ruminobacter amylophilus
MASLSALVIARNESANIAECIKSMQDIADEIIVLDGGSTDDTVKIAEGLGARVVHHPEWEGYGKQRQKLQNYATCDWCLWLDADERLTDELRHEIREFIKKARQNEVLNISRANHVFGVRIHHCGYFPDRVYRVHYRTYTKYNDSLVHEKLDLPSDAVTVNSKNSMIHYTYATYQNLLFKQTKYADEWAKNRYQKKHKGCCFITPFVKAAFAFFRMYFLQLGFLDGRMGFLISACASSYTFNKYLCLYQIALEHSRKK

SEQ ID NO: 3473 - protein, 275 aa, Sinomonas atrocyanea
MTKIPATVLILTKNEEASVQRAVESAKPFDEVIVVDSGSTDKTQEVARRAGATVVEYLWDGAYPKKKEWSLSAAQNDWVVYLDADEFFPDDLVEEIAAVLVDPTASAFEVPLQYYWMGKRLAHGHQVRKRIGMRRSRCQWPRPNDLHVEHMWEVEGHYQPRVLSGRLLQLSKPLGHDDRDGLYDYFARHNRYSDWEAHMLVDRDAEAVENRSTLGRIAAKLPAKPLIFFIYSYIIRRGFLDGTSGFHYAAALSFYYWQIGVKMSEIRRRDASAVI

SEQ ID NO: 3474 - protein, 259 aa, Unknown
  Description of Unknown: Bacteroidetes bacterium HGW-Bacteroidetes-1 sequence
MEKLSVAIITLNEEKNIERCIASVEGLADEIVVIDSFSTDRTEAICSKFNVKFEPHFFEGYIQQKQYALSQCNYNYVLSLDADEALSERLKAVIMLEKETGFRNSAYTMNRLSNYCGQWIRHCGWYPDVKLRLFDKTEGAWGGQNPHDKFVLYNLQQKVVHLEGEIFHFSYYAIDEHYKQASKFAGIAANELSKKGKHSSILYAAMKTGVKFLRNYLLKAGFLDGRNGFIICKISALETWWKYTRLIQLNKIKKANEST

SEQ ID NO: 3475 - protein, 349 aa, Butyrivibrio proteoclasticus
MYSCAYEQFEIQRLDVPSRRCDVITIILCMIVKNEEACLGKCLDSLKGIVDEMIVVDTGSTDNTIQIAKDKGAQVYNFNWTGDFSEARNYAFSLAKCDYIYSADADEEIDEDNRERFIKLKEDIDELNVDIVQMYYCNQLAFRTVYNYDRELRPKLFKRIREFVWVDPIHEQVLLEPVVCDSDIEIIHNPRENHSGRDLETFRNAVREGRRISRRLLGMYARELFLAGSDEDFLNAKEFFTEATLDNNRSLDEIKEASCVLAHVAVLEKDADAMLKYSLKDAITEMSSEMCYELGNYYYNKKDLDEAIVWYYNAAYECSSILDIRKSRELPRLAIAKCYRELGNEEQGS

SEQ ID NO: 3476 - protein, 253 aa, Actinobacillus porcitonsillarum
MPTLSVAMIVKNEAQDLAACLDTVKGWVDEIVILDSGSTDDTEQIAEQYGAKFYVNTDWQGFGKQRQLAQQYVTSDYVLWLDADERVTPELKHSILQAVKNDEQNTVYKIGRLSEVFGRQIRHSGWYPDYVVRLYRTTFAKYGDELVHEKVHFPKDANVKKLTGDLLHFTYKDVHHYLVKSASYAQAWSIQKAKAGKKASLFDGVTHALGCFVKMYLLKAGFLDGKQGFLLAILSAHSTFVKYADLWNRTRNR

SEQ ID NO: 3477 - protein, 260 aa, Unknown
  Description of Unknown: Chloroflexi bacterium UTCFX4 sequence
MTLTGIVLTLNEAKHIHACLKSLDGTVDEMIVFDSGSADDTVARAQAAGARVIERPFDNYAAQRNAALGAANGEWIFFIDADERATPELGAEIRTRISHSEDAMPPQVLLWIPRQNYIFGKWIRHTGWSPDYQPRVLKKGQAHFDETRPVHELVVAAGAVGFLATPLIHYNYETLTQFRRKQRRYTRFEAEMMAAQGIRPRKISYLSMPAREFYRRFIVLQGFRDGGHGFLLSFLMAYYAFWRQVWAAELVRKADRATAQ

SEQ ID NO: 3478 - protein, 506 aa, Desulfotomaculum ferrireducens
MVGIKVSLCLIVKNEEEHILNCLNSTKHIVDEIIVVDTGSTDNTVRRAREAGARVFFYPWNGNFSDARNYALQQATGSWILVMDADEVLASIDRESFHALLANEQAEGYFLTIHSYQGSGREYMIDHVVRLFRNKPCYRFSGAIHEQVAPSILQESRGKGLQNCSLIIKHYGYLETEIKKKDKFRRNTSILLRELAKCPQDPFILYCLALEYYQRELVGQGLECLKKALQFMNGSEGYFEDVIVATANGLLNLGLSEELLGFTEKYLQILPENNNLHIFRGLGHMQAKKYAQAAEELFRSLGEEENKFLPRHKHLCLLGDAFLLSGNVEQAVKFYLSALTYETGLTYPVIRIVDLLRKNKLTCEKLCAYMSADTLNKAGKQLIAAQQPYYAMLLFIFEIKLLFREPRQDLMLSQSVLEFYQIIHYQPFLQVPSFHYLCLLVRELYLCSLIIEKDYHAFIKIDERVSQLTNGIARLIVRDYCPKMEITGDVLGGDNAEKKSIIRQPG

SEQ ID NO: 3479 - protein, 248 aa, Unknown
  Description of Unknown: Candidatus Curtissbacteria bacterium GW2011_GWA1_41_11 sequence
MNQPEITISAVILTRNEEARIEACLKSLSWVDEVVVIDNGSSDKTVALAKKTGAKVTLSVEKDFSRLRDIGKEKTTGDWILYVDADEIVPEALRSEIIERTKSKGCVAYCIRRKNYYLGNPWPYQDKMQRLFLRNALVGWHGAVHETATVNGPTETLHSPLEHHTHRTLEEMVAKTNEWSVVEARLRLDAHHPPVVWWRLVRVMITGFWESFVRNGGWRAGTVGFIESIYQGYSMFITYAKLWEMQVK

SEQ ID NO: 3480 - protein, 235 aa, Nautilia profundicola
MNKLSVVIITKNSAKFIEGAVKSALFADEVLILDSGSSDNTCETAKAMGARVEFQEWLGFGKQKQKAVDLAKNDWVFVLDSDERITAELQNEIKAILENPEFNAYYVPRINVFWGREIKRLGLYPDYSVRLFDKKKAKFNEKEVHESVECECEIGYLKSPMKHLAYESIEEFIDKQNRYSTLGAKPNKLKAFISPLWTFFKLYFIKLGFLEGWDGFVIARLYSQYTFWKYVKGKK

SEQ ID NO: 3481 - protein, 251 aa, Castellaniella defragrans
MTLSVIVITRNEAAHIGDCLDSVAFADEIIVLDSGSTDATREIARARGARVEVAPDWPGFGPQKNRALALATGDWVLSIDADERVTPELAGAIRQAIGAPAAEAYRIARLSNFCGRWIRHSGWWPDYVVRLFRREAGRFTDAAVHERVEVRGRTGTLSGHFLHYPYATLEVFIDKINRYSTEAARAAFERGRRTTALGPFGHGLWTFVRHYVLRRGFLDGWQGLVLAGMAATGSFYRYVKLYWLGRGSRRS

SEQ ID NO: 3482 - protein, 262 aa, Unknown
  Description of Unknown: Bacteroidetes bacterium HGW-Bacteroidetes-20 sequence
MAKITGIITTLNEEHNIIEAIKSLQLICNEIIVIDSNSSDQTVSLAQTMGAKTYLQTYLGDGIQKNVGIQYASNDWIFSMDADERITPELALLINNIDFENTSFHGFAIRRRNMIGSRWVKSCGWYPDYLVRLFNHKQIRFREVKQHASVPSKNTQKLKGDILHFRYHNLGELFAKPARNYSTRGAKILYLNGKKATAFTPFLHGFSSLFVNLFFKGAILEGIDGFTLALSIATNSYLKYAKLLEYQRDSKVREREDFNSVW

SEQ ID NO: 3483 - protein, 352 aa, Paenibacillus sp.
MLVSVCMIVRNEEANLERALSSIPASYEKVVVDTGSTDATMEIALRLGAKVACFTWIDDFAAARNYSFSQATGQYILVMDADEALDKNIEKQIERFISNDSDCAAAVTLITVINDETHKHRMVRFFPNKHTYQFNGIVHEMLYDNGQPAPFQASEITIYHYGYQEEQYADGSKVQRYVELYNKHLSENPQDGYMFYQLGKLYHSNKELDKALDAFEQCLALNERDQLYYPVMLVMLGYTLKTIGQSALAEELLSAVQAEYPQFPDLPFLLGLLAMDTGNIADIESHFLKALAIGETSKYTSVDGVGSYKASYNLAVYYEITGNKSKAMQYYQTSAIANYAPARERLNQLAVR

SEQ ID NO: 3484 - protein, 315 aa, Unknown
  Description of Unknown: Candidatus Levybacteria bacterium GW2011_GWA1_39_11 sequence
MNKLSVVISAYNEEKNIKDCLDSIKNLADEIVVVDNLSADKTAEIARNYTKKVFEQKNDPKNIDLQKNLGFSRASGDWILSLDADERATPELTREIKSVLSQKPTAKSQQSINGYWLPRKNIIFGKWIKSEMWWPDYQLKLFQKGKGGFDKNQVHRALRVQGETEKLENFLIHNNYVSISQYIEKLNNYTNIEAESLAASGYRVNWLDALRFPVDDFLKTFFLQKGYKEGLHGLILSLLQAFYMEIVFAKLWEREGFKEIEDADFQKKLMKEAKAIRNKFKYWFLSSTIKVTKNPFKKILLRVTRKITSQKLKNS

SEQ ID NO: 3485 - protein, 292 aa, Sporocytophaga myxococcoides
MNKITFIILTYNEEKNIGDLLDNLKGIPGEILVVDSYSKDKTIDIVKERSVCYLQHPFENYSVQRNWAQENNPFKTDWVFHLDADERLTTELRSWLINDFKPSPGIDGYMFGRRAIFMGKWIKSHYNYHLRLFKPEKGGCEAKAYDQHFIVNGKTQVIKKKDMTSEVADNLNNFIASHNKWSFLEAIDVIKNEEGGEVKASFWGSPIERKRWMKNNLFHKTPLFLRSFIYFFYRYFIQMGFLDGKEGLAFHVLQAFWFRFLIDAKVLEIKLKMKENNQDLDTTLETNFGFNK

SEQ ID NO: 3486 - protein, 293 aa, Unknown
  Description of Unknown: Candidatus Shapirobacteria bacterium CG_4_8_14_3_um_filter_39 _11 sequence
MKVSVVVNTYNEEKNLARCLESVHQLADEIVVVDMHSDDKTVDIAKKYGAKVFYYDYTRFVEPARNFALSKASGDWTFLIDADEELPETLVKKLKEIAKENTADFVEIPRQNIIFGKWIQHSRWWPDFLVRFFRKGRVKFSDKIHVPPTTEGNRLTLEAKQEYAIIHHNFQTISQFIERLNRYSDIQADEIIKKGEKFRGMDLITEPSSEFFSRFFAGSGYKDGVHGLVLAFLQAFSELAVVLKVWEKLGFEQIPIKNLGKSAQRAVSDFYYWQSKTSSGILEKIYFRIKRKI

SEQ ID NO: 3487 - protein, 237 aa, Unknown
  Description of Unknown: Candidatus Curtissbacteria bacterium GW2011_GWC1_44_33 sequence
MKLSVTIIALNEEKNLARAIDSVHSLADEVVVVVDPRSRDKTLEVARSLGAKTFVRVFDNFANQKNFASQMAKGKWILAMDADEEIPTPLKDEIKKAIAKDSFDGYLIPRRNFLLGKEIKHTRWSPDKHIWLWKKDKGKWAGKIHEEIILEAKLGELKEAKIHHSYETVADFILMLNSYSQYEAEEKIAKGQRFSFFRFFFDPCLSFFRRFILPGLKFGRNKDDLGSIGTSTSLEDY

SEQ ID NO: 3488 - protein, 251 aa, Unknown
  Description of Unknown: Cetobacterium somerae ATCC BAA-474 sequence
MLSVGLITFNEELRLERTLKAVQGLADEIVVIDSFSTDNTVEIAQSFGAKVEQISWPGYGMQKNNVIERCTKDWILLIDADEVITPELAKEIKEVMKHGDYYVYEIPFNSVCFGKRIRFGGWSGSSRVRLFKKTSGHYSLDAVHEQFLTGDDIGKLHHRIDHYTYEDYYDYLHKFNRYTSEGALVAFNKNKSAGLFNIVLNPIFKFLRMYIFRFGFLDGIEGLALSTFSALYTSVKYLKLREMKRKNDTNC

SEQ ID NO: 3489 - protein, 249 aa, Polaribacter sp.
MTKITAIIPTLNEEIHIADAIASVSFADEIIVIDSFSTDKTIEIAEKLNVKIIKRKFDDFSSQKNFAIDQAKHTWIYILDADERVTPEVEVEIIEAVKNPKDFVGFYVRRTFYFCDRKVNYSGFQRDKVIRLFLKEKCKYNGLVHEKISANGKLGFFKHKIDHFSYRSYDHYISKMNHYAAIRAKELHEKKRKVNIYHVMIKPAARFFIHYVIRLGFLDGFTGFLVANTQAYGVLTRYIKLWFLNNKKH

SEQ ID NO: 3490 - protein, 251 aa, Confluentibacter lentus
MKKLTAIIPVGNEIHNIEAVIASVNFADEILVVDSFSSDGTFELAEKLATKVIRRPFDYPSSQKNWAIPQATHEWILLLDADERVTPELKVEVLGILKNPDPNIVAYWIGRMNHFMGERVHYSGWRNDKVIRLFRRDVCKYEDKHVHEEIIADGPVGKLKNKLYHNTYISLDKYIDKMNTYASWQAKDYDKKTGILTPYHFLIKPFWGFFKHYIVQSGFRDGVVGLTIGYIQGYVVFMRYVKLWLLRKERD

SEQ ID NO: 3491 - protein, 249 aa, Polaribacter gangjinensis
MTKITAIIPTLNEEIHIAEAIKSVSFADEIIVIDSFSTDKTLEIAATYDVKIIKREFDDFSSQKNYAISQASNPWIYILDADERVTPQVEKEILEAVQNPQDFVGFYVRRSFYFAGKNINYGGCQRDKVVRLFLKEHCKYKGFVHETIVANGKLGFFKHKIEHYSYRNFDHYISKMNHYGELRGKEYFEKGKKVNLYQILIKPPARFVIHYFIRLGFLDGFPGFAFAKAQAYGVYVRYIKLWLLNRGVK

SEQ ID NO: 3492 - protein, 306 aa, Unknown
  Description of Unknown: Candidatus Woesebacteria bacterium GW2011_GWA1_37_7 sequence
MKKHNLRPLSHKTLSVVLATRNEEQNIGECLESIKYIADEIIIFDEESSDKTPEIAKKYGAKVFTVKHEPIFHITKQKALSAASGNWILQLDADERVTPKLGEEIKEVVKFENNQIVRDQFERKCNEKNELYELFLRHQKLIEKREGHIGTESGEIVAFFIPRRNFFLGKQLVHAGVYPDGVIRLVKFGKAKFPAKSVHELMEVDGEVAWLFNDLEHHESPTFSRYLERLNRYTDLQAKEFKIKFKSKRSIIHLLYFSFIKPFYLFLLLYLRHKGYLDGMRGFIWSVFSALRYPIAYFKYWQSVKS

SEQ ID NO: 3493 - protein, 256 aa, Unknown
  Description of Unknown: Acidobacteria bacterium sequence
MSKLSVTVITKNEAARISDALASVQWADEIIVVDSESEDRTVEIARTHTARVVVRRWEGYVSQKNFAASLATHDWILSVDADERVTPELASEIRTILSGPSHQGYRIPRATWHLGRWIRTTDWYPDYQLRLYDRRSAAWAGRYVHEGVVVRGSVGRLAGELQHFPYRDISDHLQTIDRYTTFAAREMHEKGTGAGLARLALHPPLAFLRNYLARGGFRDGVPGFIISALNAYYVFLKFAKLRELQQRDPTDVLPAR

SEQ ID NO: 3494 - protein, 251 aa, Gelidibacter mesophilus
MQKLTAIIPAGNEIQNIEAVIGSVGFADEILVADSFSMDGTYEKAQQLATKVVQREFQYPASQKNWIIPQAKHEWILLVDADERVTPELRTEILEVLKNPDAKYVAYWIGRTNMFMGERVNYSGWRNDKVIRLFKRDFCKYEDKHVHEEIIANGHIGALQNKLLHHGYTSLDKYVEKMNRYATWQAKDYDHKTGKLTPYHFMLKPFWGFFKHFIVQSGFRDGVVGLTIGYMQGYVVFMRYVKLWLLRKNRE

SEQ ID NO: 3495 - protein, 294 aa, Unknown
  Description of Unknown: Candidatus Woesebacteria bacterium CG_4_10_14_0_2_um_filter_39 _14 sequence
MAKISVIINTWNEEENIKRCLESVRRIANEIIVVDMYSKDRTTAIAKKLGAKVFFYKYMSYADPAKNFAFRQAQGDWILSLDADEEIPPLLAKMLQDLAQDSKDLAYFRIPRKNIIFGKWIKHSRWWPDYVIRFFKKGAVRWSEKIHSVPLTRGEGRDLEAKEVNAIVHHHYQSISQYLERMNRYTGIQAEELIKTGYKFRWQDMLRKPMGEFLSRFFVGEAYKDGLHGLVLALLQAFSEMIKYIKVWEKEKFIEQDISSYHEVLEENINDYLHWQVKVSGLIGKIRLKIKKKI

SEQ ID NO: 3496 - protein, 440 aa, Clostridium sp.
MLHSVRLSQCMIVKNEEKNIRKALEWGKGTVFEQIVVDTGSDDRTVEIAKEMGAKVFHFPWIDDFSAAKNFAISKAKGSWIVFLDADEYYSAESTTKLIPILEQIENGIYEAKRPHAVRSSLLNLDDKGQVFSTGIQDRIFCNMPTLRYQNRIHESLYISDGSEMLVVDASRELIIYHTGYTKQIYQETGKLERNVRMLRSEVAEHSDDYNAWSYLGDSLFAMESYDEAEEAYLHVIANGDRVLSEGRKEAVFCNYFKLKYLNDSGIEEELCDIYEKAKAIGCTSPDLECWFGYWYYKKEDKKKAVLYFERALQLLDQYHGTSFLDISGALIEIYQILFYIYREFGQVSEMIRYGVLALRMDLYLMPILKDIICLLKTEKGEILTGESTFNFLLKLYNPTSLKNKLFLLKAAELADFSALERRIYGLFSVEEKSILDNSQ

SEQ ID NO: 3497 - protein, 281 aa, Unknown
  Description of Unknown: candidate division KSB1 bacterium sequence
MSAVSVETPQKLDRQAAVQNESTARLSAIVITKNEGENIHECLASLHWVQEIVVVDAESQDNTVALAREFTDKVFVRPWEGYAAAKRFALAQCTGDWVLWIDADERVTPELRQEICDLLSNAPACAGYELARLANFLGRWIMHGGWYPGYVLRLFRRENANFNNLKVHEGVELKGKIGRLQNHLLHYTDRDIRRYFEKFNRYTSLAAEELHRKGKRWQWWDLLFRPFWMFLRMYVFKTGFLDGMPGFILACFSAAYVFTKYAKLWEIEKTQKNSHSPSLAE

SEQ ID NO: 3498 - protein, 302 aa, Unknown
  Description of Unknown: Parcubacteria group bacterium GW2011_GWA1_36_12 sequence
MTPKISTVVSAYNEEEKIEECLKSVENLADEIIFVDNTSHDKTIEIAKRHKAKVFIRPNDPVMLNKNKNYGFSKAAGDWILSLDADERITPVLAKEIKAAVKQKNIKGFEIPRKNIIFNKWIQHSIWWPDYNLRLFQKNSGRFPEKHVHEKIEVSGKVAKLENPMTHYNYQTISQFLRKLDTIYTESETENFIKKGDQIHWYDAIRWPASDFLKTFFLERGYKDGLHGLVLSLFQAFYSLVFFAKVWEKKEKFKDLTPDNFLREVSKEFAKVIKDSKYWFNTVMIDELPAKKLYYKIRRKIS

SEQ ID NO: 3499 - protein, 325 aa, Unknown
  Description of Unknown: Acidobacteria bacterium sequence
MHQLEELAPLEKTTAAVTLPVSVLIPTRNEARNLPRCLEALRGVGEIYVIDSQSADETVEMARLHGAQVVQFHYQGGWPKKRQWAMDTLPLAYDWILLLDADEILTSELAGEIRRVMQVSDCNGYYISLRMHFLGRILRHSGASFWKLSLFRRGKGRYECRLHDQDMSMGDMEVHEHVVVQGRTGRLKNPLIHCNVESLARYIDKHNEYSNWEARVWTRQEEDREELRPSLFGTQAQRRRWLKQKLFRVPGAPALFFFYKYVVRFGFLDGVPGLIYCAFQGIQFFQVKAKIYEQEWARDIAKAHNPTALQDGANEGRNTKCSSSV

SEQ ID NO: 3500 - protein, 262 aa, Galbibacter marinus
MQKSTKLSTSTKLSVVIITYNEIEYIEECIDSVIFAHEIIVVDSYSNDGTWEYLQSRPEVKAQQHAFENFTKQKSYALSQATNDWIYFFDADERVTPELQKEIIQTINDPNSFDAYWNYRSFMFKNQRLYFSGWQTDKVYRLFRKSRCEFVNDRIVHETLQVNGSEGKLKEKLLHYSYKNYQDYKGKMIRYGQLKAKQAHLKGKKWSIFKQYLRPAWKFFNHYLLRMGILDGKKGVIISYLNALGVYERFREQRALELKAKS

SEQ ID NO: 3501 - protein, 256 aa, Unknown
  Description of Unknown: Acidobacteria bacterium sequence
MKISVCLITLNEETNLPRTLQSVMPIVRDGNGEIFVVDSGSTDRTVEIAESFGAQVFIEPWKGFAAQKNSAMEKGPGDWILQLDADEALEPELIQEILNAIEAAGGTVGFYIPRKNFFLGRWIKHGGFYPDPKLRLIRRGAGKFEEYGSHPTIKVKGPTGQLKHALIHNAYPTLRGYIDHMNGYSSSGAEVAVAKGHRSFNLLNIVVRAKLTFIYNYFFRLGFLDGREGFLLHAYHSVYVSWKYAKAWELARTNRK

SEQ ID NO: 3502 - protein, 249 aa, Unknown
  Description of Unknown: Candidatus Shapirobacteria bacterium CG03_land_8_20_14_0_80_39 _12 sequence
MISAVVLAKNEEKNLEDCLSGLKWCDEIVVIDDDSTDKTKEISQKAGAKVIPHSLKNDFAEQRNFALKEASHDWIFFVDADERVSDKLALEIQKKIKKTTSTGFYCWRIDNFLGRWLKHGEIGSTRILRLARRGSGWWKRNVDEQWAVSGKTETLKNPLLHYSHRNLTEFLESINERSTLNAEAFYREGRWITVFEWFKPKGKFILNYFLRLGFLDGLPGFVFAVLMSLHSFLVRGKLYLLWRRRGGWQ

SEQ ID NO: 3503 - protein, 332 aa, Lachancea meyersii
MWESYCSKIREADLAVLSLTFLVVIFSSLYLIVFLLSHSPRKPFEEELLYKTNGLDEEVISGSLVSVKESEKEVDGIELSVVVPSYNEIGRILVMLKDAIEYLQEKMANKWEILIVDDGSKDGTSEYCLDLAHTTFKLQPGQLRVIELTKNRGKGGAVRHGMLHIRGRFGLFADADGASKFADCEKLLSAIKKYDDSGKRAIAIGSRAHMVNTDAVVKRSFIRNFLMYGLHTLVFIFGIRSIKDTQCGFKLFNRSAIGQVFPYLRTEGWIFDVEILILALRKQIEIQEVAISWHEIDGSKMELARDSINMAKDLVIIRLAYIMGIYSDKNEC

SEQ ID NO: 3504 - protein, 269 aa, Maribacter sp.
MGLQSTKITALVITYNEIGYIENCLKSIEFADEIIVVDSYSTDGTYEYLSAHPKVKAIQHPFKNYTAQKAFTLEQASNDWILFVDADEVVTPELRKEITQTVNNSSKTHAAYWFRRKFMFQQRRLRFSGWQTDKNYRLFRKSKVEFSAKRIVHETLEVNGTSATLNEKLTHYCYRDYADYKRKMLLYGRLKAKEAIQKGKSFTIGMLLGKPTFTFVYNYIFRLGILDGMKGIKVCYLNALGDWERYLELRKLEQEQKAPSLKPVQQRGN

SEQ ID NO: 3505 - protein, 618 aa, Paenibacillus elgii
MIVKDEEELLSRSLTSVAGIASEIIVVDTGSTDRSAAIARDFGASVYAHEWEDDFSKARNQALDAASGDWILVLDADEELAPECLPLLSKSLCRSDAFAYALHFVNYYGQLTEYLSFTDSCCRLFRNLPDLRYSGKIHEDIVPSLLKRHLTPIPSRITIRHYGYLENRVRQKRKPQRNAALLAKAIAETPWDSRLQYALGTEYLHAEQYSEAMGVFLPLLKSLEPSCGFYPDLLLKTALLLRVQKSNDEALRLVKEGLRLFPDFTDLWDLLGDLCVERAEYGSARKAYECSLLQTPRSGLYASQTGSGSFATAHRLGQLQEKLLNRAEALRSYRQALDSFPRYEPAWRRWLELTAAEGRWAELLYCLRSWQAKLTPQQWTEAVRCLLRYNELPLAQRIREWVPKSVLASLNPLSLRLSQWLIRCKQGDKAVVLAELQGLNEPKEGTLDIELLRWALQFDLSAAKEDDRQELVRDESAAADERTFLTACTVFLEAACWDGLVRYLRHSVGALRHLPGLLRPPLLQLVVQAPDLALQAILSRCNRDRLSPQELCAYGLLCGALQRWKEADAALRQVQDRLPDWPLPRLILAQAYQSLAFERLGQPQEKAEWLKLSLWLSA

SEQ ID NO: 3506 - protein, 272 aa, Unknown
  Description of Unknown: bacterium sequence
MQKLSVILVTLNEEKNIDRCLGSVRWADEIVVVDSFSSDQTVELARKYTDKVYQHEYPGTSKQVERGITYATGEWIFIIDADEEMSDELAAEVQTVLRGNGDIVGYEFIRKPSAFGKWIEHGVWFPDYQFRFFRKDSYYPEHQEIHGGFNTKGRRGRLNGYLYHHTYGTIYAYVEKMNEYTSLHVSNKLKDNPAADARWHNLILNPLSHFLRMFFSKKGYKDGFHGFVLALLDATYTMLLYAKLWEYRMRQKEGKGVLPPTTNVELNALKRK

SEQ ID NO: 3507 - protein, 254 aa, Muricauda pacifica
MDKAKNDISALLITLNEEDNIDAVLENLSFVNEIVVVDSYSSDATAEKVQNHKGVKLIQREFKNYTDQKEFALSQAKNDWILFLDADERVTPELKNEILEVTNGSNTASAYYFLRKFMFQNQVLRFSGWQTDKNYRLFKKSKVRFDQEKIVHETLIVNGDSATLKNKLIHYSYSNYEDYKGKMIKYGEMKAMEEFKKGNKARFYHFLFRPFYKFFNNYILRLGILDGRKGIIICYLNALGVHSRYKKLKELNNK

SEQ ID NO: 3508 - protein, 276 aa, Unknown
  Description of Unknown: Microbacterium sp. Leaf151 sequence
MKMSDISVIVLTKNEEEGLANTLRELSDFEDLIVVDSNSTDRTVEIAHSLGARVVNFTWDGAYPKKKQWSLDHAGAKNDWVLLLDADEYPTQALKDELRALEGKLAAAPEGAFDIHLLYRFGGRLLTHGHVVTKRSLLNTKRARFPEVADLDAPGIREVEGHYQPSTSAPIGKLRARIVHDDRDPVSSWFARHNRYSDWEAHLEMNRELKKDIASKRTVKGRIFDSVPMKPFLFFMYAFVARAGFLDGRAGFDYAVALSTYYWQIGVKRRELLRVA

SEQ ID NO: 3509 - protein, 251 aa, Lacinutrix algicola
MQKLTAIIPTKNEIDNIEAVIASVDFADEILVIDSFSDDGTFEKATTLATKVIQRKFDFYGTQKNHAIAQAKHEWILLVDADERVTPKLKTEVLSILNQDKIEHDAFNIKRINHFMGERVNYSGWRNDSVIRLFKRDVCKYDNRHVHEALIVNGSVGHLKQKFLHYSYRSFNHYMQKMDRYATLQAKDYDKKTGRLTPYHFFIKPFWGFVKHYIIQSGFRDGVVGLTIGYVQGYVVFMRYIKLWLLRKNRT

SEQ ID NO: 3510 - protein, 258 aa, Unknown
  Description of Unknown: Aquificae bacterium sequence
MLSVLIRTKNEEENIERAIRSVQDLADEVVVVDSGSTDRTVEIAKSLGAKVFFREWTGYSDQLNYGVGLCCGDWVLVLDADEEVSRELKESIKEEIKRPRYEAYEVCRRTCYLGRFLRHAWYPEWRLRLFKKGKVAFEGVLHERVVFEGKVGRLRGDLYHYSFKNLEHQYLKTVKYAKLMAQEAYAKGKKFRLINLLFNPLWHFFKVYLLDLGFLDGKRGLMVAFSGFVYTFLKYKFLYELELKEKGCHAKREDEGPA

SEQ ID NO: 3511 - protein, 284 aa, Unknown
  Description of Unknown: Microgenomates group bacterium GW2011_GWB1_45_17 sequence
MKLSIVLAVYNEEKNLAECLKSIEHIADEIVIVDGGSTDNTVEIAQKFGARVIKTTNPPMFHINKQKALEAAKGDWILHLDADERVAPALAKQIQEAVKGYPIEIVDAKKQNLFIRHQQNIEARDGKIGTDKSEITAYFIPRLNFFLGGYLKHGGVYPDGEIRLVKKGKAYFPCKNVHEQMHIDGRVAWLSEDLIHMADPTFSRYLMRANRYTSLTAKEFEKQHIPKFGISVFMYMFVKPFTTFLSLYFRHKGFLDGFPGFVWAVFSGLHFPLAYMKYWENHDA

SEQ ID NO: 3512 - protein, 405 aa, Phorcysia thermohydrogeniphila
MKISACIIAKNEEKNLPRLLKSLKGKFDEIVLVDTGSTDRTKEIAKSYGCKVVEHEWNGFADARNRAVKEASGDWLWHFDADFELEDLEFKKALSAMQRAPKEVDAFAIGVKNFGRNGEIKAISSHIFIHRAGIEWKGKVHESPKAKLVIGIPVFVNHYGYADPKLLFKKGERNLNLLLEELQELPKGSKEYNYKLFFLVQTYNLLSAKDKSYLSKALSAAEEFLRAAKDNFSDYGFFLVYMYNYYLQLLWKTNRRKEAEKILNHVFSLNINLPEFFFFAYKIFREKGNSAKAFDYILQVAKQLDIINSNPFVSSWGNASECLPAFENEILTPPFSISSKNMEKLREEWKKNKGRNLGLLLYWFEANKTEKIKILRKLSLRYGDSFIYKLFLLNKLQEEKHHLST

SEQ ID NO: 3513 - protein, 258 aa, Unknown
  Description of Unknown: Acidobacteria bacterium sequence
MNRLSVCLITLNEERNLPRALCSVQGIANEIVVVDCGSSDRTQEIAREHGARVIARAWTNFAEQKNSAAAAATHDWILSMDADEEVSPELRESLLAWKQQESQIAVYEIARCAWYLGAWIKHSGWYPDRQRRLYRRDAAQFCGIVHESLRFEGSPGRLRGNLLHYTMNSFAEHEDKVERYTTLAARQMYDAGKRSWRAAMWLAAPWSFFSTFLLRGGFLDGYRGWLISRMAARSVWLKFKKLGRLVATERCGNNMQTP

SEQ ID NO: 3514 - protein, 295 aa, Unknown
  Description of Unknown: Candidatus Woesebacteria bacterium GW2011_GWB1_39_10 sequence
MKDNSSPKLSVVLAARNEEENLGRSLESVKEIADEIVVVDEHSTDKTVEIAKEYGAKVFLESHHDIFHITKQKALEKATGDWVLQLDADEEVTPALAQEIKKVIDMSNEDIKKRFDLDIHEMYHFRKHQRIIEERDGKIGKNTGEVVAFFIPRLNMFLGRPLRYGGVYPDGVIRLVKNGKARFPQKSVHEQIQIDGEISWLFDDLIHYDSPTMKRYLARFNRYTDLKAKELNEDKAPKNFWSLFLYTIYKPLYTFLNIYIRHKGILDGTQGFLWAFFSAMHFPIAFYKYITNGNE

SEQ ID NO: 3515 - protein, 259 aa, Selenomonas flueggei
MSLNVSVLILAKNEEKNIEACIRSASFAGEVLVIDDFSTDRTAELARSLGARVLTRALDGNWGAQQTYAIEQAQCDWVYFLDADERISPKLAECIRKVVTEDDRRYVYFNGRLNYFWEQPLRHGGWFPGYGLHLAPKKGTSVTGFVHPTICHSYKIRKFPSDAYLVHYPYRDWEHHLNKLNFYTTLAAKKRYQEGYRAHMFDIILRPIWASFRMYFLRGGFLDGRIGFILASFHFFYTMEKYVKLYYIDKTNNHVGDFS

SEQ ID NO: 3516 - protein, 249 aa, Polaribacter sp.
MTKITAIIPTLNEEIHIEEAIKSVSFADEIIIIDSFSTDNTVTLSEKYNVKIIKRKFDDFSSQKNFAIEQAKHPWIYILDADERVTLAVEKEILEAVKNPNECVGFYVRRTFYFCDKRVDYSGFQRDKVIRLFLKDHCRYSGHVHEKITTTGKLGFFKNKIDHFSYRNYDHYISKMNHYAAIRAKELHKRGDKVNIYHVMIKPSARFFIHYFIRLGFLDGFAGFLVAKTQAYGVLTRYIKLWLLNRKIN

SEQ ID NO: 3517 - protein, 256 aa, Unknown
  Description of Unknown: Bacteroidetes bacterium sequence
MPGHPFSTVIITKNEAENIRPCLAAIRHVCTDIIVVDAQSTDKTPDICREMGARVFEKAWEGYSENKNFGNARARHDWILSVDADEVLSPALIETLENWTPRPKTVYALDRISSFCGQWIRHGAWYPDWKIRLFDRRVVQWTGDFVHEKPDYPPDFKVVRLKGKLYHYTCKDPSEFYARLDQYARLAALEMFEKGQKPSFFKQFFSPGFRFFRDYFLRKGFLDGRAGRDIARANACVVSRKYARLKELYQTKHRGN

SEQ ID NO: 3518 - protein, 305 aa, Unknown
  Description of Unknown: Candidatus Collierbacteria bacterium GW2011_GWC2_44_13 sequence
MARIKISAVVNTRNESENIFDCLKTLGFCDEIVVVDMESEDNTKEIVKQFTDRIYDHKMVGFVEPARNFAIKKALGDWIFIVDADERVPKTLAAKLIEIADKNEVDFVRVPRKNLVFGHWLQHSRWWPDYNIRFFKKGSVDWQDEIHSVPITYGNGINLDVEQGTALEHHHYRTIDEYFIRALRYSDQQSKELIESGYKFDPVDLIKKPTGEFLSRFFAGEGYKDGLHGLVVAVLQFFSILLIYLKVWQNEGSKPVSERVFTQTWQSVFLEKFKEFRYWFLTSKIQNSKNKTEAFLLKLQRRLLK

SEQ ID NO: 3519 - protein, 270 aa, Unknown
  Description of Unknown: Candidatus Shapirobacteria bacterium GW2011_GWE1_38_10 sequence
MPKLSVIILAHNVEEEIVPALETSKFADEIIVVDTDEGSTDKTVAVSLKREARIVRSPGYNFAKWRNDGAQAARSDWLLYLDSDERIPVKLAQEIRSTISNPDHQAYTISRFEVFLGKHLEHWPDPRVLRLIQKSALKRWEGKVHEQPVIDGTVGDLDKQMVHLSHKNIDEKVTSTMKWSRLEAEMMLKAGHPPMAGWRFLRIMFTEFWHRFVRQGLWRDGVEGWIEAIYQMFSKFLSYERLWEMQRKPSLKDAYKKIDQQVLDEWKQQK

SEQ ID NO: 3520 - protein, 317 aa, Persephonella sp.
MKISACIVAKNEELNLPRLLKSIDGLFHEIILVDTGSTDNTIEIARDYGCKVYKKDWQGMADARNFGILKVSGDWIWHFDADFELENPNDVEKVKEIIQKESPDIISIFYRNLTIYGRDSFVERRMIHRKDKNLYWIKPVHENLILPKGIRIARSDVKIKHYGYFTQDILFEKTKGYLKYLSQNFKDCYDFVYLIKSLFILSFVDKNYINEFFKFHSRFIKVCNPTFLDFLYAVNLLVFNQKIEQAMLLLEMNKSFSGRFYYEFFRAIAEYESGQYDISRQRFLKCKKYPEEDIYIYPFSLLYDPLKIIDYYLQKLQ

SEQ ID NO: 3521 - protein, 255 aa, Succinatimonas hippei
MKLSIIILTRNEAKNLKDCIASTADLADEIIVIDGESTDNTVEVAKSLNAKVVIFDKWQGYGPRRQDAQKHAGGEWILHLDADERLTPQLVELIKNELSKASGNEIFAIPRATYLLSHRINHCGWYPDYVLRLYKNSYTHYDDALVHEKLEVPKNAKIIYLKEPMIHYSYRTLEQYFDKQKTYELAFGENKFKKGKKVNLLSIPFRALFGFIRIYFIKKGFLDGKIGLWLAISVAAYVTNKYLALYMAQNNEKLK

SEQ ID NO: 3522 - protein, 264 aa, Kriegella aquimaris
MHTSSEKISAVIITFNEMGYIQNCIKSVEFADEIIVVDSYSTDGTFEFLQEHPKVKVIQNPFENFTSQKSFALKQAANDWVLFLDADEVVPDALREEIKTTLDNGTDIAAYWFYRKFMFKNDLLRFSGWQTDKNYRLFRKSKAKFSDKKIVHETLDVNGASGIMQEKLIHYCYKDYDDYRAKMLKYGRLKAKEDFYKERTFNYLFMLVKPTWKFFNHYFLRLGILDGRKGMVICHLNALSDLERYRELKKLEKKNELAYYLLMP

SEQ ID NO: 3523 - protein, 299 aa, Unknown
  Description of Unknown: Candidatus Woesebacteria bacterium CG_4_10_14_0_2_um_filter_44 _9 sequence
MNTQPSTRNRKTVKLSVVLATRNEEENLGRCLESVQGLADEIVVVDEYSTDKTRQVAEKYKAKVYLEPHHDIFHVTKQKALNWATGDWVLQLDADEVVTPELAKEIELVVRGQRLEVGNAKKQKLFQRHQELIEQRDGPIGKKTGEVVGYFIPRRNMFLGKALIHTGVYPDGVIRLVKKGKARFPQKSVHEQVQLDGKVGWLSGDLLHYDSPTLKRYFNRMNRYTDLQAEELKMQGVSKNAWFIIQYSLFKPLYIFLNLFARHGGFKDGVRGFLWSLFSSWHYPIAYFKYLTAKSASAS

SEQ ID NO: 3524 - protein, 270 aa, Paenibacillus elgii
  MOD_RES (249)..(249): Any amino acid
MIVKDEEGLLPRSLTSVAGIASEIIVVDTGSTDRSATIAREFGARVYVHEWEDDFSKARNQALDAASGDWILVLDADEELAPECLPLLSESLCRSDAFAYALHFVNYYGQLTEYLSFTDSCCRLFRNLPDLRYSGKIHEDIVPSLLKRHLPPIPSRITIRHYGYLEDRVRQKRKPQRNTALLAKAIAENPGDSRLQYALGTEYLHAEQYTEAMGVFLPLLKSLEPSCGFYPDLLLKTALLLRVRGANDXCCSRPLSCSGCGEPTTKRFGL

SEQ ID NO: 3525 - protein, 255 aa, Unknown
  Description of Unknown: Candidatus Roizmanbacteria bacterium CG_4_10_14_0_2_um_filter_39 _12 sequence
MKLSLCIPTFNEEQNIQTPLDTAYELVDEIIIIDGGSSDKTIEIAKSYGDKVRVISVDNPSNFLINKQRAIEQATGDWILQLDADERLSEELKKELRNLKLEIRNSKPIAGYWIPRKNWFLGKFLMKGGVYPDGVLRLYRRDKAHFALKDVHENVIVSGETAWLQNAIEHMADPTFERYLDRWNRYTTFDAIQLVEKGEKPCFPCYFFGKPLFTFLNIYIRHKGFMDGFPGFVWALFSSIRYWVIYVKSKSYSTD

SEQ ID NO: 3526 - protein, 304 aa, Geitlerinema sp.
MFSIFILTYNEELDIAACIESALLSDDVIVVDSLSSDRTVEIAQRYPVRVVQHAFESHGKQRTWMLETVEAKHEWAYILEADERMTPELFQECLEAIANPQAVGYYVAERVMFMGSWIRHSTQYPRYQLRLLQRGKVWFGDYGHTEREICDGPTDFLKETYPHYTSGKGMSRWIDKHNRYSSDEAIETLRQLEQGQVSWQQLFRGKTEVERRRALKDLSLRLPFRPLVRFFYMYFLLGGILDGRAGFAWCTLQAFYEYLIVLKVWELQHMPVPTLDEQGMPQSTARKTGLSEASAAPSQEINAP

SEQ ID NO: 3527 - protein, 250 aa, Polaribacter sp.
MTKISAIIPTLNEEIHIREAIESVGFADEIIVIDSFSTDKTLEIAEKMNVKIIKRKFDDFSSQKNYAIAHAKHDWIYILDADERVTSELEKEILEAVKNPKDFVGFYLGRNFYFAGKKIKYSGWQRDRVIRLFLKEFCEYNGNPVHETIKTHGSLGFLKNKINHYSYRNYDHYISKINQYAWLQAEDLYKKGKKVNGYHILIKPPVRFFVHYIVRLGFLDGFEGFMIAKTQAFAVLSRYLKLWLLKNNLK

SEQ ID NO: 3528 - protein, 239 aa, Unknown
  Description of Unknown: Candidatus Collierbacteria bacterium GW2011_GWC2_45_40 sequence
MNLSVVIPTLNEEKDLPECLESLKGLADEVIVVDSGSTDKTVEIATRFGVKIVNHPFTSYSGTRNFGDSQVRGDWILSIEADVTISPELSEEITKAINLEKFDAYFIGRVNIIWGAKVLHADWSPKDDFHIWLYRRGIGEWQSLVHEEFVTDKKAGMLINFLMHKNYETVSEYIDKINKYSELAIRQKNYFPDWWFLRDFFKRYFYKLGFLDGYRGLFLSYLQSVYYLTLSVKRYTKTS

SEQ ID NO: 3529 - protein, 257 aa, Unknown
  Description of Unknown: Acidobacteria bacterium sequence
MERISATIITHNEEGNIAEALERLGWVNEIVVVDSGSRDRTLDICALYTDKVFHRDWTGFVDQKNYAVERASNDWILSLDADERPSAELESEIQSLRRGGFKRDGYRIPRVAHFMGRWIRHGDWYPDYQLRLFDRRRGRWQGGRVHESVKTEGSPGQLQGEIQHFTYRRLSDYLKRLETYSTLAAQDYRQKGRRSSVLRLLGDPPATFLKGYFFRGGFLDGVPGLMVAVMAAISVYFKYAKLYELCLNDELRMTSDE

SEQ ID NO: 3530 - protein, 251 aa, Seonamhaeicola aphaedonensis
MTKLTALIPTGNEIHNIEAVIKSVDFADEILVVDSNSTDGTYEKAQKLATKVIQRDYKYSASQKNWAIPQAEFEWILLVDADERVTPELKSEIKDILNNPPSDVVAFWIGRNNHFMGERVHYSGWRNDKVIRLFKRDYCKYEDKHVHAEIITNGNVGKLNNKLYHNTYISFDKYIEKMNRYAWWQAKDYDKKTGRLTPYHFVIKPFWGFFKHYIIQSGFRDGVVGFTIGYIQAYVIFMRYVKLWLLRKNRT

SEQ ID NO: 3531 - protein, 300 aa, Unknown
  Description of Unknown: Candidatus Woesebacteria bacterium GW2011_GWB1_39_12 sequence
MSKQSLAKSKFCNLSVVLATRNEESNISAVLESVKSIADEIVVVDEKSQDRTREIAKKYGARVYEVEHEPIFHKTKQKALNKAKFDWILQLDADERVTPKLAKEIKDVIDMPTAKILARRPGDNKKWALFQKHQKIIEKRNGHVGRPTGEVVAFFLPRKNIFLGKPLVHAGVYPDPAIRLIKNGKAHFPAKSVHEIMQIDGEVAWLFNDLEHYDSPTFSRYLERANRYTSLTAMEFEQKKSSKNIIVLFFYSFVKPIMVFLMLYVRHKGFLDGVRGFIWSAFSALHFPLAYFKYWVGETK

SEQ ID NO: 3532 - protein, 305 aa, Unknown
  Description of Unknown: Candidatus Nomurabacteria bacterium GW2011_GWC2_41_8 sequence
MTNSKISAVITTWNEAANLDECLATLDFVNEIVIVDMESTDNTVKIAKTYTDKVYRTPYTGYVEPARNFSIGKASGSWILVVDGDERIPVTLAKKLVEIAENNSADFVRIPRKNLVFSQWLKYSRWWPDYNIRFFKKGYVTWQDAIHSIPVTEGVGINLDPEPEFAIIHHHYRTIDEYIIRMLRYTSQQSKELIEAGYQFSLADLINKPAGEFLSRFFAGEGYKDGLHGLALAILQSFSMFVVYFKVWQEEGFVPQKDVLSNPSFKKLIKEKFTELKYWLYTIKIHLTGKKSEKFLLKIKRKFNL

SEQ ID NO: 3533 - protein, 332 aa, Lachancea sp.
MWGSLCSRVRDFNVAVVCGTFFAVILSSLYLLVLLLSHWPRKPFAEELSYRTNGNQGGETSGQLVCVKDCKENVDGIELSVLVPSYNEVGRILVMLTDAIEFLQKKIENKWEILIVDDGSRDGTSEYCLKLAHETFKLKPGQLRVIKLAKNRGKGGAVRHGMLHIRGKFGLFADADGASKFSDCEKLLSATQKLDESGKAVVAIGSRAHMVNTDAVVKRSFIRNFLMYGLHTLVFVFGIRSIKDTQCGFKLFNRPAIVQIFPYLHTEGWIFDVEILILALKKQIPIKEVAISWHEVGGSKMELARDSINMAKDLITIRLAYIMGIYSGKTEC

SEQ ID NO: 3534 - protein, 272 aa, Unknown
  Description of Unknown: Verrucomicrobia bacterium sequence
MPESLAIIVLTHNEAENLPRCLKSIAEFGEIIVVDSGSNDGTQEIANNSGARVYHRPFESFAQQRNWALENCDLKTEWVLFLDADEVATPEFRQAVAHAIQNAGDSIAGFYCCWKTMLDQRWLRRSDSFPKWQLRIVRRGRANFIDSGHGQKEGSVEGELGYVREPYLHYALSKGWEAWWAKHNQYSDEEATDRLSRSASLGELFSKDPSRRNRALKPILSRIPGWPLLRFLHMYILKGGFLEGREGFAYCASMGWYEYLIRAKMRDFRTNQ

SEQ ID NO: 3535 - protein, 296 aa, Unknown
  Description of Unknown: Candidatus Woesebacteria bacterium CG_4_10_14_0_2_um_filter_44 _9 sequence
MISAVINTLNEEKNLARAVASVRGLADEIVVVDMESTDNTREVARKLGTKVFTHKKEKYVEAVRNFMISKASGEWILVLDPDEEISPKLAKILKGLPRGGRKDSSGVVVADYYRIPRKNIIFGKWIKHCRWWPDFQIRFFKKGYVSWNEVIHAVPMTQGKGLDLPEKEDLAIIHKNYSSLEEYLAKMNRYTSVQAEELLKNGYVFDWKDLIKKPFREFLGRYFAGQGYKDGVHGLTLCFLQSFSELVLYLKIWQKQGFREQEIKRSEIKNEFGSLIKELRWWLRKELTWLKLPKWR

SEQ ID NO: 3536 - protein, 316 aa, Halomicronema hongdechloris
MSTAAGKIPVSVLIPAKNEEENLPACLESVAAAAEVFVVDSQSEDRSGEICDRYGAQVVQFHFNGRWPKKKNWALDNLPFHHDWVLIVDCDERIPPELWDEIAEAIQSSDYDGYYLNRRVFFLGTWIRHGGKYPDWNLRLFRHAKGRYENLHTEDIRNTGDNEVHEHVIIDGPVGYLQQDMLHEDFRDLFHWLERHNRYSNWEARVYYNLLHGMGNDGTIGANLFGDAVQRKRFLKTIWVRLPFKPLLRFCLFYVFQLGFLDGRAGYIYGRLLSQYEYQIGVKLFELERFGGSLNVNAAKAAPEATVTSEPGPANG

SEQ ID NO: 3537 - protein, 454 aa, Unknown
  Description of Unknown: Lachnospiraceae bacterium sequence
MRRGVRLSQCMIVKNEEENIERALSWGKDIMYEQIVVDTGSTDRTVEIAERLGAKVYHFEWIDDFAAAKNYAIELAKGDWIAFLDADEYFPPEDVAKLMPILRDLQHSKYEVLMTNILHLDKDGKAAESSTYMRIFRNRPGLRYRGRIHEELASDSGTIQFIDGTEDLSIYHTGYLQSAEGDVRKSKRNVPLIEKTLEEEPDNYVMMGYLGDGYVNLERYDEAVDLYQKAIVYLTKEELSEYDARSAATFKNLMRILLKIKGDVSAAENVYQQAVRSLPKNGDFDYVIGEEYIRLGRLQDAAYHLERGIGLLEKFGNTQKTDLLFANLQKAWEDLSLCYYGIGDLSQCVNCTTALLRANPWNMRMLQALLLAFLKDEQDAQTGGKGAYQAASPAQVRDFLGNLYNFQALRDRLFVLKAAMAAEYDGLVQELRQLMAPQELESFDRAMGQEVQEN

SEQ ID NO: 3538 - protein, 303 aa, Unknown
  Description of Unknown: Rhizobium sequence
MTSISVLILTYNEEVHIARAIESVASFATQIVVVDSFSSDRTVEIARSLGATVLQNPFVNQARQFQWGLDNAAISSDWVMRLDADEVVEPELAREIAQKLPTLAADVAGVNLKRKHIFLDRFIRHGGRYPLILTRLWRRGQGRVEDRWMDEHVIVWGGRTVLFDNPFRDHNLHDLGYFTEKHNKYATREAVDVLNRRYGLFAQDAGLTSEGTSLQASVKRFVKERVYNRIPFPVSTLGYFLFRYVIQLGFLDGREGLIYHFLQGYWYRFLVGAKVLEFDRAIRPLSTPEDKRQALAQLTGLAL

SEQ ID NO: 3539 - protein, 251 aa, Mesonia algae
MEKLTALIPTGNEIHNIEEVIASVDFADEIMVVDSFSTDGTYEKAQTLADVVLQRKFDYPSSQKNWAIPQAKHQWILLVDADERVTPELKQEILDVLKNPSNDTVGYWIGRQNYFMGKPINHSGWKNDKVIRLFKRDECRYNNKRVHEEITSDGNIGKLNSRFLHYTYTSFDNHIEKVNKYAWWRALDYNEKVDKITAYHFIVKPFWGFFKHYLLQSGFKDGVPGLTIAFLRSYSIFTRYLKIWLLRKGIK

SEQ ID NO: 3540 - protein, 609 aa, Propionispira raffinosivorans
MKISACIITKNEEKNMESYFAKIQGLVQEIILVDTGSTDRTVEIARSHGAKIYQYEWKQDFAAAKNYALQHATGDWIVFLDADEYFPSESIENLKKYLKTVHNNKKCDAIGVRIVNIDIDKDDQEISSFVNIRIFRNRLNLRYKNAIHEEVYNTKGTVHIFMLENDIKVYHTGYSTSIAREKMQRNLAILLKEIAEEGEKPAHYRYLCDCYHGLDDYANAIKYGRLHIEAKLSSLGAEQTVYDKVIDALINSEADSNEIRAEIKRAIQTFPNSPDFYCAYGRFAWLQKNYEMALQYFLKAISLRAQESKGSYQANSFDGHLTAVYFFMGEIYFLKNQSEQALTYYCKSLLRHKYNAEIFQRVYRLLMNTDPIEVISLFNGIYERTQKDISFIIENLSNCPKNKIFAYYSNILTRDFSVEVDSLWQYQMLGLGNYQKLYVTSMESMMQNSHMLASACIAQNNKQLMNEQYIKALNEAFKTVVLRFYDETLKLNEELFPAYETILKELLLIQSSSLDHYLELAEDFSNENILKITKILEEKKKYSKALNVYRQVYLRLSLSNPSEYYEDIGYCSYKLGLYAEAARYFDKVLEKNPENLKILQFKTWSEARC

SEQ ID NO: 3541 - protein, 328 aa, Leptolyngbya ohadii
MFSIYILTFNEELDIGACIESALLSDDVVVVDSCSSDRTVEIATEIASRFPVRVVQHPFESHGKQRTWMLEAVPPKHEWVYILEADERMTPELFQECLAAIQDDRSGNRYVGYYVAERVMFMGQWIRRSTQYPRYQLRLLRHGKVWFNDYGHTEREVCQGETGFLQQTYPHYTCSKGLSRWIEKHNRYSTDEAIETLHQLEAGAVNWRNLLLGRTEVDRRRALKDLSLRMPFRPLIRFLYMYLLLGGWQDGRAGFAWCTLQAFYEYLIVLKVRELRQAAAATPTPTPALQQCPGAQNASSVSASVATNVSASVSASVTVNTDKDKIYS

SEQ ID NO: 3542 - protein, 255 aa, Unknown
  Description of Unknown: Candidatus Gottesmanbacteria bacterium GW2011_GWC2_39_8 sequence
MEDLSVVIATYNEEKNIARAINSIKDLAEEIIVIDGSSTDKTVEIARGLGAKVTVAVNPTIFHINKQKGLNLSKCKWILQLDADEEVTEDLRNEIRSVIEQKSEYAGYYIPRLNYFLGGPLKKGGAYPDPVIRLFLRGRGKFPCKDVHEQIDIDGKVGVLSNYLIHRPYKTFQDYLIKAERYTDLTSEQYAQDKIPVTLINSIKFIVLKPIYIFFNIYFRHLGFMDGWRGFVWAFFSGLHPAYAYLKYLKKTRPI

SEQ ID NO: 3543 - protein, 342 aa, Zygosaccharomyces rouxii
MAFNDFKQLQNVDLKGFLTTAAIGLIVSGYLIIYLLSHTPRLPFDEELEYQTIDGKGGLVKKRLPNVCRGDSNKNKSNNDNNDEDILLSVVVPSYNETKRISHMLADAIAVLQKEMAHRWEIIIVDDGSKDGTSEYCLNLSEKVFQLQEGQLRVVKLSQNRGKGGAVRHGLLHIRGKYGLFADADGASQFNDVSKLIESIKQLEGPQGKPAVAIGSRSHMVNTDAVVKRSFIRNLLMYGLHTLVFVFGIRSIKDTQCGFKLFNRSAIESIFPYLHTEGWIFDVEILMLALRKKIPISEVAISWHEVDGSKMDLARDSINMAKDLVVIRMAYILRIYRDDKEC

SEQ ID NO: 3544 - protein, 219 aa, Unknown
  Description of Unknown: Acidobacteria bacterium sequence
MNRLSACLITFNEEHNLPRVLGSLQGIADEIVALDCGSKDRTQEIAQERGAKVVTHAWTNFAEQKNIAAAAASYDWILSLDADEELSPELRSALAEWKEKEPEFAAYEFARRTWYLGAWIWHTRWYPDYQLKLYRRDKSRFEVPEHATVKYDGPVGRLEGDLLHYTLRSYEEHAAKVESITTRQAQYLFSEGRRSWRVAMWLASPWNWFNNYILCRGFL

SEQ ID NO: 3545 - protein, 251 aa, Polaribacter reichenbachii
MTKITAIIPTLNEEIHIEEAIKSVNFADEIIVIDSYSTDKTVVLAEKHNVKIIKRKFDDFSSQKNFAIDQAQHPWIYILDADERVTPQVRTEILNAVENPKDKVGFYVRRSFYFVGKKIKYSGWQRDKVVRLFLKEYCRYKGIVHETIKTNGELGFLKGKIEHYGYRSYNHSIEKIHHYAFLKATDLHRQGKKAGLYHILVKPPARFIIHYIIRLGFLDGFEGIILAKTLAYSSRTRYIKLWLLNKGIKEK

SEQ ID NO: 3546 - protein, 250 aa, Lacinutrix sp.
MEKLTAIIPTGNEIHNIKAVIDSVKFADEILVVDSFSTDGTFEKAQKLANKVIRREYQYSASQKNWAIPQATHQWILLVDADERVTPELEQEIKQVLSNPSNNVAYWIGRNNHFMGESVKFSGWRNDKVIRLFKRDLCRYEDKQVHAEIIADGAIGLLKNKLYHNTYTTFDAYIEKMNRYAWWQAKDYDKKTGKLTPYHFVIKPFWGFFKHYIIQGGFRDGLVGLTIGYIQGYVVFMRYVKLWLLRKGRR

SEQ ID NO: 3547 - protein, 251 aa, Algibacter sp.
MQKLTAIIPTGNEIHNIEDVIASVDFADEIIVVDSLSTDGTYEKAKASGVKVIKREYQYSASQKNWAIPQAKHEWILLVDADERVTKELKEEIIETLKNPKDNVVAYWIGRNNHFMGEHVKYSGWRNDAVIRLFKRDSCKYQDKHVHAEIIADGDIGNLKQKLYHNTYITFDKYIEKMNRYATWQAKDYDKKTGRLTPYHFIIKPFWGFFKHYILQSGFRDGVVGLTIGYIQGYVVFMRYVKLWLLRKNRQ

SEQ ID NO: 3548 - protein, 258 aa, Unknown
  Description of Unknown: Acidobacteria bacterium sequence
MNRLSACLITSNEEHNLPRALRSLEGVADEIVVVDCGSWDRTQETARAHEAKVVTRAWTNFAEQKNFAAAAASNDWILSLDADEELSPELRQFLVEWKQKEPEFAVYELARRAWYLGAWIKHSGWYPDYQRRLYRRGAASFQGIVHESLRFEGPAGRLRGDLFHYTILSFAEHEEKVERYTTLAARQMYASGKRNWRAVMWLATPWTWFHSFVVRRGFLDGHRGWLISRMAARGTWLKFKKLGKLIEAERHGPAMKTP

SEQ ID NO: 3549 - protein, 254 aa, Tatumella ptyseos
MNTRQRLSVVMITKNEAELIPECLASVDWADEIVVLDSGSTDQTCEIARQAGAKVFRNTQWPGFGPQRQQAQQYASGDMILMIDADERVTPELRQSIETLLSQPPQAHQVYSIARSNWFLGRYMRHSGWYPDRVTRLYPASFTYNSHLVHESLEHPGAAVIRLSGDLQHLTCRDLHHFQQKQLAYANAWAQQRARQGRRCGLFSVYSHSVAAWLKTAILRAGFLDGRQGWILALVNAQYTFNKYAILWALTRTK

SEQ ID NO: 3550 - protein, 251 aa, Formosa agariphila
MTKITAIIPTGNEIHNIEAVIESVKFADEILVVDSFSTDGTYEKALPLATKVIRREFDYFASQKNWAIPQAKHEWILLVDADERVTPELQTEIIEILKNPDPNIVAYWIGRLNHFMGERVHYSGWRNDKVIRLFKRDFCVYEDKFVHEEIEANGNVGHLKNKLYHNTYTTFDKYLEKMNRYAWLQAKDYDKKTGKLTPYHFVLKPFWGFFKHYIIQSGFRDGVIGLTIGYIQGYVIFMRYVKLWLLRKGRK

SEQ ID NO: 3551 - protein, 251 aa, Mesonia aquimarina
MEKLTALIPTGNEIHNIEEVIASVDFADEILVVDSFSTDGTFEKAKELADKVLQREFDYPSAQKNWAIPQAKHDWVLLVDADERVTSSLKEEILNVLKNPPTDIAGYWIGRQNYFMNKPINHSGWKNDKVIRLFKKDECQYNNKRVHEEIITEGNLGKLTHKFIHYTYTSFDNHIEKVNKYAWWRALDYKDKVGKLTAYHFIIKPFWGFFKHYIMQSGFRDGIPGLTIAFLRSYSIFTRYLKIWLLRKGIK

SEQ ID NO: 3552 - protein, 342 aa, Unknown
  Description of Unknown: Acidobacteria bacterium sequence
MKAEKFPSTTEADDRKQTQTGADRLSVVILTYNEQANLPACLESLKGLDCEILLVDSGSTDATIEIARRAGATVFTHPFENYAAQRNWAQKNLPFHTNWVLHLDADERLTPALVKEITRVLKAPPDAMNGFLLRKRTIFMGRWIRHGGHYPSYHLRLFRTDHGICEDRLYDEHFLVRGKVGLLKSDYSDIITSDLTIWTLRHARWAELESQEIMRPSNSHLRVSPDPLGTPVERRRWMRTGVYLRLPLFVRAFLYWFYRYFIRVGFLDGKEGLIFHFLQGFWYRFLIDAKLYEAQQRISRQMAEKRRGSQRMLTFKSPGQRQVSEMVPCTAGLSLKRNAAFV

SEQ ID NO: 3553 - protein, 319 aa, Cyberlindnera fabianii
MDTNTVLSYFAAFLATAVALVYAVVLIFSHSPRPPVDSEKTFFTTTKTGLDPDHKPLPERGILQPIEDIILSVVIPCYNETSRLKIGLDETVEHLKAEYGDNWEILIVDDGSKDGTTKYALELAVEEYKLQPGQMRVVQLVKNRGKGGAVTHGMQHVRGKYAVFADADGASKFSDVQKLIESIEEYGDEPAVAIGSRAHMVESDAVVKRSFIRNFLMYSLHTLVFVFGIREIKDTQCGFKLFNRSAIANIFPYMHTEGWIFDVEILIIAIRKNIPVKEIAISWHEVDGSKVDLARDSINMAIDLVVTRLAYILGIYKDY

SEQ ID NO: 3554 - protein, 281 aa, Maritimibacter alkaliphilus
MPDQTRPKLGVVTISYNEERDLPGFLANLIDWVDEIIIVDDGSSDTTEDLAKAAGPKVRFLRSPRVEGEYFSHQRNKGIDAATSDWLLHMDVDERVTPELARQVQEAICDDGKDGYRYRRLNYFMHRPMKGGGWRDWNLVHLARRDKFRFGGMFHEDCLLDAPESRVGQLSALMVHFNEDNLEKRFRKSGQYMEEVVKGVEGRGRPVRFIDIAGRPIYEFFRKYVAKKGFQDGIPGFISAVHSATAIFRANAIVWDRQNAITRSQIDADFQDQWTRGGGAG

SEQ ID NO: 3555 - protein, 249 aa, Polaribacter dokdonensis
MTKITAIIPTLNEEIHIEAAIESVNFADEIIVIDSYSSDNTVQLAEKHNVKIIKRKFDDFSSQKNFAIDQATNPWIYVLDADERVTPEVEKEILEAVKNPKGKVGFYVGRSFYFVGKHLKYGGCQRDKVVRLFLKEFCVYKGVVHETIYTEGDLGFFMNRIQHYSYRGYDHYISKMNHYGALRAKQYFSEGKKVNFYHLLIKPIARFFIHFFIRLGFLDGFRGFIYARAQAYGVYVRYIKLWALNQKPD

SEQ ID NO: 3556 - protein, 252 aa, Polaribacter sp.
MTKITAIIPTLNEEIHISNAIKSVSFADEIIVIDSFSKDNTVALAEKHNVKIIKRKFDDFSSQKNFAIDQAKYPWIYILDTDERVTPEVENEILEAVKNPKDFVGFNVRRTFFFCGSKINYGGCQRDKVIRLFLKEHCKYSGVVHERIVANGKVGFFKNKIDHYSYKSYDHYISKMNHYGQLRAQQFFEEGRTVNLFHILIKPPARFFIHYIVRLGFLDGFPGFVFAKTQAYGVLTKYIKLWLLNRNATNER

SEQ ID NO: 3557 - protein, 249 aa, Formosa algae
MTKITAIIPTGNEIHNIEAVIASVNFADEILVVDSFSTDGTYDVAKKLATKVIRREYEYSASQKNWAIPQAKHEWILLVDADERVTPELKAEILNTLKNPKDVAYWIGRMNHFMGERVHYSGWRNDKVIRLFKRDLCAYEDKHVHAEIKVNGSIGKLEHKFYHNTYITFDKYLEKMNRYAWWQAKDYDKKTGKLTPYHFVIKPFWGFFKHYIIQAGFRDGLVGFTIGTIQAYVIFMRYIKLWLLRKNRV

SEQ ID NO: 3558 - protein, 249 aa, Lutibacter sp.
MNITAIIPTFNEELHIENAIESVSFADEIIVIDSFSTDRTVELVKKHDVKLIQRVFDDFSTQKNFAISHAKNDWIYILDADERVTPELQLEILETVRSPKDFVGFYVYRTFYFLNKKIRFGGWNRDKVVRLFLKSNCQYDGNLVHEIIKANGELGFLKHKLEHFSYRGFDHYISKLNQYSGLQAQQLDKQGKAVTLFHLLVKPPVRFLIHYVLRLGFLDGFSGFVLASTQAYGVYTRYIKMWLIRRNSK

SEQ ID NO: 3559 - protein, 253 aa, Polynucleobacter necessarius
MPTLSVILITRNEEANLEDCLASLEGIAQQMIVVDTNSTDRTLEIAQKYGATIAQPTDWPGFGPQKNRALDLATQEWVLSLDADERLTPTLRSEILTAIHHNGHIDCFAIPRLSWYCGRFIRHSGWSPDYVDRLFKRGTARFSDDLVHERLIPQGQVAKLKNPILHFSFMNYSQVLQKLDRYSTASAQQAYSKGKTSNPLKAVLHGLWAFIRTYIIRAGFLDGAQGFALAISNGQGTYYRYMKLWQLNQEARK

SEQ ID NO: 3560 - protein, 251 aa, Unknown
  Description of Unknown: Flavobacteriaceae bacterium PRS1 sequence
MTKLTAIIPVGNEIHNIEAVIASVNFANEVLVVDSFSTDGTYEKAKELTNNVLRREYQYSALQKNWAIPQAKHEWILLVDADERVTPELKAEIIEILNNPKDDIVAYWIGRNNHFMGEPVRYSGWRNDTVIRLFKRDFCSYQDKLVHAEIIANGTIGKLKHKLYHNTYITFDKYMEKMNRYATLQAKDYDAKTGKLTPYHFVIKPFWGFIKHYLVQSGFRDGVIGFTIGYVQGYIIFMRYVKLWLLRKGRK

SEQ ID NO: 3561 - protein, 298 aa, Unknown
  Description of Unknown: Candidatus Woesebacteria bacterium GW2011_GWB1_44_11 sequence
MAKISVVINALNEEKNLPQAIASVKGMADEIVVVDMQSQDKTAEVARSLGAKVFTHEKTGYVEPARNYAISKAGNPWVLVLDADEEVPAKLAQKIKQILKSPKADYYRIPRKNIIFGHWMKHSRWWPDYNIRLFRKNAVSWNEVIHSVPMTQGIGGALDDREEYALVHHNYDSVEAYLERMNRYSTLHAGLLSKEGYKFSWKDLILKPSNEFISRYFFGEGYKDGIHGLALSLLQAFSELTVYLKIWQKEKFTDQGPKLDEVVSIIREQEKDLHYWLSDSLFKQSGSLGDRIRRKLKI

SEQ ID NO: 3562 - protein, 298 aa, Bordetella genomosp.
MSRIPVSVVVMTKNEERNIEKCLRALADFDEVFVIDSDSTDRTVELAQSLGAIVVPFQWNRKYPKKKQWCLENLPFSHDIVLYVDADEEMTPPLAREIAASLGRFDEGKGGAFVGFDYVFCGKPLRHGHRVYKLVLLHRHRARFLDYNDLDVAHMWEVEGHYQPEVEGGTFVMKGRMGHNDHDTLFHYFDKHNRYSDWEANLREKGLMNDPREANMGMRSLLKRIFQALPFKGPAVFLHTYVFHLGFLDGKVGLDYAVARAMYYWQIGLKSREVRAARKAANEAAQADRVSSVSQSAR

SEQ ID NO: 3563 - protein, 261 aa, Unknown
  Description of Unknown: bacterium sequence
MNGISVLIIAYNESENIVGAIESVRFAEEIVVVDNCSNDNTVEIAEQNGAIVFRTDDNLGYSQAKKFGLEKCNYSWVLWLDADERASLELAEEISNIIKNGEVDSSIAGFYIHRKSFFVRKWMKHCGWGNEKVLRLFRKNCAQISDDLVHESIIIAGQTRTLSNPILHYTAPDFITFFQKQMKYASLSAQQMISQNKSIGLGKIFFNPLATFFKIYFVKLGFLDGLEGFFLSVIQSTYVFAKYVQAYYIKKKMASKNRKEI

SEQ ID NO: 3564 - protein, 311 aa, Unknown
  Description of Unknown: Acidobacteria bacterium sequence
MQDDTSIQECRVSVLIPTFNEEVNLPDSLASVCGWAKDVWVVDSFSADRTVEIAREAGVNVVQHAFEGYAQQKNWALENVPFRGKWVLILDADERVSPELAAEIRRLITADGSGCNGFYLNRKLIFYGRWIRHCGWYPSWNLRLFRRGHGLYEQREVHEHLLLDGQAGYCKHDLIHEDLRDMSFWIAKHNRYSSQEAGELDRLRRGASTAGLQASVFNGSLERKRFIKERIWPHLPGRAFLAFFYWYFFRLGFLDGKHGFLFCQMHAIFEQFTAAKLWELEHYKRDARDGAINSAKVFQSTVTVDAEHSKK

SEQ ID NO: 3565 - protein, 305 aa, Unknown
  Description of Unknown: Microgenomates group bacterium GW2011_GWC1_44_9 sequence
MAKIKISAVVNTRNEAENIFDCLRALKFCDEIVVVDMESEDNTKEIAKEFTDRIYDHKKVGFVEPARNFAIQKALGDWILIVDADERIPKTLAAKLIEIADKNEIDFVRIPRRNLVFGEWLQHSRWWPDYNIRFFKKGAVQWQDEIHSVPVTYGNGLNLEDDAKFALEHHHYRTIDEYFLRALRYSNQQSKELIKSGYVFDPADLIKKPLGEFLSRFFAGEGYKDGLHGLVMALLQYFSMLLIYLKVWEAEGHKPIKERALTPLWQTVFREKFREFRYWVLTAKIQYSGSKTEAFLLKLQRRLLK

SEQ ID NO: 3566 - protein, 250 aa, Unknown
  Description of Unknown: Flavobacteriaceae bacterium sequence
MHKLTAIIPTGNEIHNIEDVIASVDFADEILVVDSFSTDGTYDKALELATKVIRREYEYSASQKNWAIPQATHQWILLVDADERVTPELRSEILEILKQPEDKVAYWIGRMNHFMGKRVHYSGWRNDKVIRLFKRDHCSYEDKTVHAEIIANGPIGNLKNKLYHNTYTSLDAYIIKMNRYASWQAIDYDKKTGMLTPYHFIIKPFWGFFKHYIVQSGFRDGVVGLTIGYIQAYVVFMRYAKLWLLRQKKA

SEQ ID NO: 3567 - protein, 299 aa, Unknown
  Description of Unknown: Candidatus Woesebacteria bacterium GW2011_GWA1_40_43 sequence
MVSKISVVINTLNEEKNISRAILSVKGFADEIVVVDMESNDKTCEISEKLGAKIFTHKKTGYVEPARNFAISKATGDWVLILDADEEIPQTLAKKIKDIVKSPKADYFRIPRKNIIFGSWIEHTLWWPDYQIRLFRKGKVTWNELIHAVPITVGSGADIAAEEKYAILHHNYDFTEQYLERLNRYTSVQSNLLVKDGYNFAWTDLIRKPLKEFSNRYFAGEGYKDGVHGLVLSLLQAFSELTVYIKVWQKSGFKEEKAGILEVVSEMKKGEKELHFWQNDSLYKKTGNIKYRIRKKLKI

SEQ ID NO: 3568 - protein, 312 aa, Unknown
  Description of Unknown: uncultured bacterium sequence
MSNTSNPPLSVVTAILNEEKLLPSFLAHIENFTDEIIIVVDSRTVDNSADIAEKHGCKVLLDKGESKGIVFNNKNWGANEAKNDWVLILDADERMDETLQKEIISIVSGTYPKKADIYQTGFLNYEFGKIFDKSDQKNKPFVRLFRKGSFSYQTARTAEGFGIQSNSLQSPNRLSRLVLKVPLLRTWYLNKMKGIVTLRGHLVHLSHPTISDFVRKIDHYSTREAKILFEKDPSISKPILVLKMIFLPKKEFLYKYFVWKFYKEGTHGFIVSIVYTFYHFLIYSKYFSLIYTDKHRKETESLLKKYGFTEQE

SEQ ID NO: 3569 - protein, 251 aa, Unknown
  Description of Unknown: Bacteroidetes bacterium sequence
MNRLTAIIPAGNEIHNIEDVIASVSFADEILVADSYSTDGTFEKATELATKVIRREYQYSASQKNWAIPQAKHEWILIVDADERVTPELKAEIIETLNNPNDNVVAYWIGRNNHFLGKRVNYSGWRNDVVIRLFKRDYCKYEDKHVHAEIIANGNIDKLTEKLYHNTYTTFDKYLEKMNRYAWWQAKDYDKKTGKLTPYHFVIKPFWGFFKHYIIQSGFRDGVVGLTIGYIQGYVIFMRYVKLWLLRKGRE

SEQ ID NO: 3570 - protein, 289 aa, Unknown
  Description of Unknown: Verrucomicrobia bacterium sequence
MNQPPKVPVSVLVPIKNEAGNLPRCLDSIRWAGEIFVVDSQSTDGSTEIAQQYGAQIVQFQFNGTWPKKKNWALENLPFRNEWVFILDADEVLPPEAEPEFARAIAEAGELAGYWINRRFMFMGKWLRHSYYPNWNLRLFRHSLGRYEKLTDADTRSGDNEVHEHVIVRGATGRLGCEIDHYAFPSVEVFIEKHNRYSNWEARVSADQRLSGSAAQISSGEVGRRRKLKQFSQRLPFRPLLRFLYIYAWQKGFLDGREGYYFARLHAVYEFLSVAKTYELMRTKAAPND

SEQ ID NO: 3571 - protein, 299 aa, Jiulongibacter sediminis
MSSEKSGSKLPITAIILTYNEEKNIRDCIESVYHWLDEIYVVDSFSTDRTLEIISEYPDVKMVQHDFENYSTQRNWAFQNLDIANDFIFNLDADHRAMPELADELRNHFSIGIPQNINGFMASRRTMFLGRWIKKGGHYPVYHAIIFRKGHGECEQKNYDQHFIIHGESIVLKSNVIDIITESLSTFTERHNKWATLEAAEAIAYSKEMEAGRVKADKEGNPMEYRRYQRMKYYSYPIFLRVFLYFGYRFVLKGGFLEGKQGLVFHFLQGFWFRFLVDAKIWEMKYNQELNESKTGVKR

SEQ ID NO: 3572 - protein, 299 aa, Unknown
  Description of Unknown: unclassified Achromobacter sequence
MNRIPVSVVVMTKNEERNIEKCLHALADFDEVFVIDSNSTDRTAELARDLGAIVVPFSWDGKYPKKKQWCLENLPFSHDVVLYVDADEEMTPPLAREIAANLPRFDKGAGGAFVGFNYVFCGKPLRHGHRVYKLVLLHRQRARFLDYNDLDVGHMWEVEGHYQPEVQGDTFVMKGRMGHNDHDGLFHYFDKHNRYSDWEANLRVKGLMNDPREANMGMRSLLKRVFQALPFKGLTVFLHTYVFHLGFLDGKVGLDYAIARAMYYWQIGLKSREVRQAQRAAGQAARSDAVTQSVSQSAR

SEQ ID NO: 3573 - protein, 253 aa, Unknown
  Description of Unknown: Thiomonas sequence
MASLSLIIITKNEAHNIAKCINSTQGIAEEVIVFDSGSTDGTQEICRQLGARVYETDWPGFGPQKNRALQEAAGEWILSLDADEQLSPELKEEIITILNGEHNNAVSYSIPRKSSYCGQFMKHSGWWPDRVVRLFKKSAGKFTDDIVHERVIFSGKLAELKGCIIHNSIVSIEQSIEKMNSYSTSGSMRLTELGVRTSITRAIFKGLWAFFRTYILRLGILDGRMGFILAVANAEGVYYRHVKTWVRQRDQSK

SEQ ID NO: 3574 - protein, 224 aa, Unknown
  Description of Unknown: Candidatus Woesebacteria bacterium GW2011_GWB1_43_14 sequence
WVDEILVIDGGSKDKTVSISKKYGARVVDYREGKDFSDRRNKGMREAKGDWILYLDTDERVTPSLRDEILEVIKIHEFEAFAIPRRNFVLGSELKHGGMWPDYQKRLFRRDKLRGWKGELHEEPQFEGRLGHFKNSMIHLKHDKISEMVEKTNLWSNIEAKLMHDAGHPKMNIPRFGSAIFREFWLRMIKQGAFLDGAVGIIYGLYQVYSKFVSYAKLWEMQMK

SEQ ID NO: 3575 - protein, 248 aa, Unknown
  Description of Unknown: Elusimicrobia bacterium CG_4_10_14_0_2_um_filter_63_34 sequence
MRLSAAIIAQNEEWDLPGCLASLAPLNCEIVVVDGGSRDRTREIVRDAGGVLVERPFDDFASQKQAAVDACSGEWILSLDADERLTPELAAEIPAALEGAADAYDIPFEVWFLGKRLRFGGLGREHHVRLFRKSRGRFKGARLHEGITVDGPTARLKGRIRHEPYRDLAEYREKAAVYTDRAALKRFENGKRFTPLHRLLPAWEFFMRAVLKGAVLDGYPGLLWAWLSAQHTRLKYAKLRELQRKAAR

SEQ ID NO: 3576 - protein, 279 aa, Pricia antarctica
MIRKNTQSVLKIGEHQKISAVIITYNEMGYIEHCIASVGFADEIIVVDSYSSDGTYEYLSAHPKIKVIQHPFQDFTKQKTFALKQASNDWVLFLDADEVVPAGLRKEIIAVTNRPSPHVAYWFYRKFMFKNAHLRFSGWQTDKNYRLFRKSKVAFCQERRVHERLEVEGTSGVLNKRLLHYSYKKYEDYKEKMLRYGQLKALQCHENGKQVLPLKLMAAPIWKFLYNYTIRLGMLDGRKGIIICYLNALSDLERYREFRQLNRKSTELHDTAVLSPVRE

SEQ ID NO: 3577 - protein, 251 aa, Unknown
  Description of Unknown: Flavobacteriales bacterium ALC- 1 sequence
MNKITAIIPTGNEIHNIEHAIESVSFADEILVVDSYSNDGTFKKAQELADRVIRRKYEYSASQKNWAIPQAKHEWILLLDADERVTTELKKEIQEILKSPPKNIVAFWMGRNNHFMGERVKYSGWRNDKVIRLFKRDFCMYEDKYVHAEIIANGSIGKLKAKLYHNTYISIDKYIEKMNRYASWQAKDYDKKTGLITPYHFVIKPFWGFFKHYILQSGFRDGFIGFTIGYLQSYVVFMRYVKLWLLRRKRN

SEQ ID NO: 3578 - protein, 252 aa, Halorubrum halophilum
MSTPVSAIIIAHNEEENLRDCIATLDWCDEVIVVDNESTDSTHEIASELADKTIVREVPPDQESFEILRQYGIDEATNEWILRIDADERIPESLAETLQQIIKREEHDVIKVPRKNFILDSWYEFSWPDYTTTLWKKGTVVVTDRLHQGIVAREDSDVYQLPAIESNGLIHYTHTSYTGFLKKFWNYTGLQAKHTEPSLRGLILEPGYHFIDLFLIQRVWMNGFKNILPALGRILTPPIVAMRSIIRQIQDN

SEQ ID NO: 3579 - protein, 257 aa, Unknown
  Description of Unknown: Candidatus Aminicenantes bacterium sequence
MEISAVIITFNEEKRLEPALKSLAGIASEIIVVDSFSSDGTVKLAKKYTKDVFQRKWTNFSDQKNFANNRASFPWILSLDADERLSPELREEILQIKNEEPDCSAFSMPRQVFYLGKWIRHSGWYPDRKIRLFQKDKARWEGEYIHEKLVVEGNVQKLKGVIHHFTYRNISDHLARVDKFSELGAQKLYTQKKKCRLYHLVFLPIFRFAKSFFLKAGFLDGYAGFIISVLHGYAIFIRYAKLREIWKKGERIESFPD

SEQ ID NO: 3580 - protein, 252 aa, Unknown
  Description of Unknown: Candidatus Ulvibacter alkanivorans sequence
MEKLTAIIPVGNEIHNIEAVIASVDFADEILVVDSYTTDGTFEIAEKMATRVVRRTFDYPAAQKNWTIPQAKHEWILLLDADERVTPELKEEVIEVLKNPPTDGTVAYWIGRKNHFMGQRVHYSGWRNDSVIRLFKRDACRYEDKYVHEEIIAKGKVGKLRSKLYHNTYISFDNYIQKMNKYASWQAKDYDKKTGRLTAYHFVIKPFWGFFKHYFVQSGFRDGVVGLTIGYIQGYVVFMRYVKLWLLRKGRQ

SEQ ID NO: 3581 - protein, 259 aa, Selenomonas noxia
MALNLSVLILAKNEEQNIEDCIRSVSFAGEVVVIDDFSTDRTAELARGLGARVVQRALAGDWGAQQTFAVQEAGCDWIYFLDADERVSPRLAERIKEIVAADDRRYAYANARLSYYFEQPLRHGGWFPDYVVRLLPREGTYVTGLVHPKICHPYQEVKLPKKEYLVHYPYRDWVHYLGKLNTYTTLAAQKSYNAGRRANLADMILHPVWASFRMYFLKCGFLDGRIGFVLAVFHYFYTMAKYVKLYYLDKTNRHTGDFS

SEQ ID NO: 3582 - protein, 330 aa, Komagataella phaffii
MVRTLILVALGLVVVALLVLYLLVLLFSHSPRNPFESELYFITTEKDGSKSAPLPLPVANSPSDGTIELSVVIPCYNETSRLKLMFDDSINYLKETLPDRFEILIVDDGSKDSTDSYALDLAHNTYNLKPGQLRVIKFEENRGKGGAVIHGLQHIRGEYGIFADADGASSFKDMSKLLAQVKNVENKNNDKIPAIAIGSRAHMVNTDAVVKRSFIRNFLMYGLHMLVYVFGIRQIKDTQCGFKLFNKSSIALIFPFMHTEGWIFDVEILIIALRKGISVSEVPISWHEVDGSKMDLARDSMNMAIDLVVTRMAYILGIYKDSVVTKTKVE

SEQ ID NO: 3583 - protein, 246 aa, Unknown
  Description of Unknown: Nitrospiraceae bacterium sequence
MLIPASIAIVTKNEEANIEAALDSVRDAAEIVVIDSFSSDRTVEICKKYTDKVIQKEWEGYARQKQAAVDLAAGPWVFILDADERFTPELKAEIINAIEENRHDGFNVPRKNFFMNRWIRHGGWSPDYTLRLFRKNAGRVEDREVHEKIVVSGSVSYLKNPLMHYTYNSVSDYLKRADTYSTLAAKELKKTGAAPSAPDFLLRPIATFIKMFFLRLGFLDGKYGLVLAVLYSYYTFLKYAKAWEMR

SEQ ID NO: 3584 - protein, 251 aa, Algibacter alginicilyticus
MTKLTAIIPTGNEIHNIEAVVASVSFADEILIVDSFSTDGTYEKALELDVKVIRRDYEYSASQKNWAIPQAKHEWVLLVDADERVTPELKNEILDTLKNPKDHIVAYWIGRLNHFMGEPVHYSGWRNDSVIRLFKRDFCKYEDKHVHAEIIAQGHIGKLKNKLYHNTYITFDKYIEKMNRYATWQAKDYDTKTGRLTPYHFVVKPFWGFFKHYIVQSGFRDGVVGLTIGYIQGYVIFMRYVKVWLLRKNRQ

SEQ ID NO: 3585 - protein, 252 aa, Mesonia mobilis
MKKLTALIPAGNEIHNIEEVISSVDFADEILVVDSLSSDGTYEKAVELADKVIQREYHYSSSQKNWAIPQAKHEWILLIDADERVTPELREEILSILKNPPTDDTVAYWIGRKNHFMGKPVNHSGWKNDKVIRLFKRDFCKYEDKKVHAEIIAKGKVGKLKHKFYHNTYITIDKHLEKMNRYGWWQASDYDKKVGKLTPYHFVIKPMWSFFKHYIIQGGFRDGVVGLTISYIQSYTVFMRFVKVWLLRRDRK

SEQ ID NO: 3586 - protein, 271 aa, Unknown
  Description of Unknown: Acidobacteria bacterium sequence
MRDEISSLSSLIPHPSSLMKITATIITFNEAENIRAACESVSWANEILVVDSESTDRTREIAAECGARVITRAWPGFAEQKQFAAEEAKHDWIFSMDADERVSDKLRHSIEDLLYTNEAQLANGYRIARRAFYMGRWIQGGGWYPDYQLRLYNRSHGHWQGMYIHESVKMKEGARVETLKGDILHYTIPTASYHQRMIGERYAPLAARQMFESGRRTSPARIATAGAAAFVRSYILKGGFRDGLAGYAIARFAAHNAFLKHLMLWEMQKKQ

SEQ ID NO: 3587 - protein, 298 aa, Unknown
  Description of Unknown: Candidatus Woesebacteria bacterium GW2011_GWB1_45_5 sequence
MNKVSVVINTLNEEKNLPRAVASVKDLADEIVVVDMESTDKTAEVAKKLDAKVFSHKKTGYVEPARNFGIGKAANSWILILDADEEIPGKLVERVKQIVKNPKADYYRIPRKNIIFGRFMKHSRWWPDYNIRLFKKGSVSWNEVIHAVPMTAGVGEDIEDREDFAIIHHNYDSIEQYLERMNRYTSQHAILMAKEGYRFNWKDLVAKPSNEFLSRYFFGEGYKDGIHGLILSLLQAFSELTLYLKLWQKEKFADTSPDLREVISVMRDEEKDLHYWQNDSQYKQSGKLTDRIRRKLRI

SEQ ID NO: 3588 - protein, 252 aa, Unknown
  Description of Unknown: Flavobacteriales bacterium 32- 35-8 sequence
MMQKFTAIIPTGNEIHNIEAVIASVDFADEVLVVDSFSTDGTFEIAEKLATKVIRRPFDYHALQKNWAIPQAKYEWILLVDADERVTPELKAEILEILKNPDPNIVAYWIGRMNHFMGERVYYSGWQNDKVIRLFKRDFCKYEEKHVHEEIIANGLVGKLKNKLYHNTYITFDKHIAKLNRYATLQAKDYDKKTGALTPYHFIIKPFWGFFKHYIIKSGFRDGVVGLTIGYIQGYVVFMRYVKLWLLRKNRN

SEQ ID NO: 3589 - protein, 251 aa, Polaribacter porphyrae
MTKISSIIPTLNEEIHIEAAIKSVDFADEIIVIDSHSTDKTIELAEKHNVKIIKRKFDDFSSQKNFAITQAKNPWIYILDADERVTPDVKKEILEAVQNPKEFVGFYVRRSFFFAGKRIKYSGWQRDKVVRLFLKDKCKYQGIVHETIKTDGELGFFKGKIDHFGYKNYNHFISKIHQYGELKAKELHARGKKVNLFHIIIKPTYRIFSHFILKRGFLDGYTGLILSITQGYAVLTRYIKLWILNRGLKED

SEQ ID NO: 3590 - protein, 299 aa, Unknown
  Description of Unknown: Candidatus Woesebacteria bacterium GW2011_GWB1_39_10 sequence
MASKISVVINTLNEEENLPRAIASINGFADEIVVVDMESTDKTVEVSKKLGAKVFFHKKMGYVEPGRNFAISKASNPWILVLDADEEVTQGLSLQIQKILKNPKADYYRIPRKNIIFGKWLKHSRWWPDYNIRLFKKGSVSWNEVIHAVPMTQGIGAELESEEELAIVHHNYDTVEQYIERMNRYTSQHALLRINEGYEFSWKDVITKPSNEFFSRYFFGEGYKDGLHGLALSFLQAFSELVMYLKIWQKEKFAEKDLTISEVNLLMRDEEKELHYWQGDSQFKESGKLADRIRRKFKI

SEQ ID NO: 3591 - protein, 254 aa, Polaribacter sejongensis
MTKITAIIPTLNEEIHIADAIKSVSFADEIIVIDSYSTDKTLEIAEKLHVKIIKRKFDDFSSQKNFAIDQATHNWIYILDADERVTPEVEKEILEAVKNPNGFVGFYVRRTFYFCEKKVNYSGFQRDKVIRLFLKEHCNYKGVVHERIAANGKIGFFKHKIDHFSYRNYDHYISKMNHYAAIRAKELHERGVKVNIYHVMIKPSARFFIHYFIRLGFLDGFTGFLVAKIQAYGVLTRYVKLWLLNNKKHLNGRI

SEQ ID NO: 3592 - protein, 256 aa, Unknown
  Description of Unknown: Calditrichaeota bacterium sequence
MNKISAVIITYNEEANIGRCLQSLQGVVDEILVVDAFSADRTVEICREFQAQVVQKSWEGYSRNKNFGNAQARFDYILSIDADEALSPELAHSILAAKSNLRGAYTMSRLTNYCGRWIRHGGWYPDVKLRLFNRQDARWVGDFVHESLEFVRRVPRIHLKGDLLHYSFHSLADHLQRVNTYSDLAAREILHRNPTGILFKMLFSPPAKFIKGYVFQRGFLDGFHGLCIAAISAFDVFIRYAKVYELQQARKAEEKP

SEQ ID NO: 3593 - protein, 296 aa, Unknown
  Description of Unknown: Candidatus Woesebacteria bacterium GW2011_GWA1_37_8 sequence
MISVVINTLNESARLADAISSVKKFADEIVVIDMESDDRSVEIAKDLGAKVFTHKRMDYVELARNFGISKASGDWILILDPDEQLCPSLSVKLKEEVKNNTADYFRIPRKNIVFNKWLKYSRWWPDYNIRFFKKGSVEWSEMIHSVPITTGRGADVDEREDNAIIHHHYDSISQYLERLNRYTNAQSAERVKKGEKFSWKDLLIKPSNEFLSRYFLGQGYKDGAHGLALSLLQGFSELIVFLKIWEINKFEKQNTPLSNVLTTLKIIEKDFHFWEADSMVKENGGLVYRIRRKLKV

SEQ ID NO: 3594 - protein, 251 aa, Psychroserpens burtonensis
MIKLTVIIPTKNEIDHIESVIASVDFADEILVIDSFSNDGTFEKAQTLATKVLQREFDFYGVQKNYAISRAKYEWILLIDADERVTADLKTEILSILNDGKICHDAFRIKRINHFMGQRVNYSGWQNDNVIRLFKRDLCQYNDRNVHEALQVNGTIGELKHSFLHYSYRSFDLYMQKMNHYANLQAKDYDDKTGRLTPYHFIIKPFWGFFKHYIVQSGFRDGIVGLTIGYIQGYVVFIRYVKLWLLRRNRN

SEQ ID NO: 3595 - protein, 253 aa, Aquimarina sediminis
MIKLSGVIITYNEERKIEQCLASLQGVVDEIVVVDSFSTDKTEEICKKYNAKFVKQKFLGYKEQKNFVITQASHDYIISLDGDEALSPELRESIIKLKSNWVHDGYYMNRYNNFCGQWINHSDWYPDKKLRAFKKGKGEWKGINPHDSYKLYNPKKCGKLKGDILHWNYPTYSAYNTQIEKFSTISAHSYYELGKNATLWKILFNPTWAFFKAYFLRLGFLDGLNGFLICIQTANLTFLKYVKLRELIKKNKE

SEQ ID NO: 3596 - protein, 256 aa, Thermocrinis sp.
MSLSVLILTKNEERNLPRAINSVKDIADEIVVLDSGSTDNTVELAKSLGAKVFYHPWDGYANQLNRGIELCSKDWILVLDADEEVSKELKHSIAEALRSKKADVFMVCRRTYYLGGFLKHAWYPEWRVRLFKKGTVRFEGELHEKTIFKGKAKKLKGDLYHYSYGSLYEQYEKTIRYAKIMAEAYQKEGRRFRVYNLVFNPLWSFFKVFILQRGFLDGLRGFSVAVSSFIYTFLKYLFLLELEMKEKYKEKLWKRS

SEQ ID NO: 3597 - protein, 276 aa, Bacteroides ovatus
MTVIILTKNEEANIERCINSVRGWVERIVVVDSGSTDRTVELAENLDAEVYNHTPFENHGKQFNWALDNLQIDSNWIFRVDADEVVTPELAQEIIESCRLHKDDDVNAFEMRFKVYFLGRFLKHGGAYPFCKINIFKKSKARFNERPLGDNIELSEGRYLQLKNDCLHYDYKNLSTFIHKHDWYADLEVQSYYSKLDNLEANISKAANVRKVLRNGIYYKLPRYFRAKMYYWYKFYIKLGFLDGEAGHVWAFLQAYFYRFVVDAKIAEQELMKNKN

SEQ ID NO: 3598 - protein, 477 aa, Paenibacillus sp.
MPTQHEHIISLIQDLKFAEAETELKQAISHTPLDGQLWVMLGETLLLQSQGQAAKRVFDRAWLLDPQAQWIKPIYKALQQVAQGDNRNDIDELLTVPKITVAAAILTRNEATNISKCILALQGAVDEIIVVDSSTDDTPRIASQYPKVKVIRITWEDDFAAARNKGLQHVQSDWVVWVDADEVLVPEDVPSIREVAGVFQHLDIIPALHIWQVNHVNGIVHHDFSQIRMFPVRRGIRFHGRVHEQVGTNKGIYHNDIYRRAVKIRLNHHGYEPSILQSRRKLERNLRLLKLMIQEEPENPGHWLYYGRESIGVGEQEQAYTALLEAERLGLLLPTFGRMSDVYKLLFQIMMVRKNYSEAEAYCLKSIAHNPAFPDAHYMLSQVRIKQADELLRLAEASIKQSLTCLPNYRGSVSADYQIAEWKAELTLGELAMRSGRLSIAKSIFAKHVKHSGGMYNLKDKLATIEAERQRLNDQSK

SEQ ID NO: 3599 - protein, 262 aa, Unknown
  Description of Unknown: Acidobacteria bacterium sequence
MKISACIITFNEQKNISRAINSVKWADEILVVDSESTDRTREIASELGAKVIVQKWLGFGAQKQFAVEKASNDWILSLDADEEISTKLQEEILFLKNSGPSADAYRISRLAIYMNRPIRHCGWYPDWQIRLFNRNKGRWKDFIIHESVEMQPNSSVEKLRGDILHYTVESLAHHSRMTTERYAPLAAQQMFENGRKTSILKIVTAGPTAFIRTYFLKLGFLDGFPGFCISYFAAHNATLKHMLLWELQNSQNLNKRLSQTGT

SEQ ID NO: 3600 - protein, 251 aa, Unknown
  Description of Unknown: Aquificae bacterium sequence
MLSVLILTKNEERNIERAIKSVQGLAKEVVVVDSGSTDRTVEIARDLGAKVFFREWEGYASQLNYGVEQCSGDWVLVIDADEEVSQELRESIRKELKNPAHEVYMLSRKTYYLGGFLNHAWYPEWRVRLFRKRKVRFEGVLHETPIYTGSVGKLRGDLYHYSYEDLEDQYVKTVRYARKMAELMKGKGKRFRLYNLILNPLWHFVKVYFVQMGFLDGLRGFLVAFSALFYTFLKYKFLYELELKDRKPDLW

SEQ ID NO: 3601 - protein, 250 aa, Oceanihabitans sediminis
MEKLSAIIITKNEIHNIESVIQSMQFADEIIVVDSFSTDGTFEKAKSLNVTVIQREFKYHAEQKNWIIPQAKHDWVLIVDADERVTPKLEEEIIETLNSNPKHIAYWIGRNNHFMGKRVHYSGWRNDKVIRLFKRDLCRYEDKLVHEEIIAQGSVGFLKEKFYHNTYTTIDAYLEKMNRYATQQAAEYDKKTGKLTPYHFVLKPFWGFFKHYIVQSGFRDGVVGLTIGYIQGYTVFMRYVKLWLLRRGIK

SEQ ID NO: 3602 - protein, 314 aa, Unknown
  Description of Unknown: Firmicutes bacterium sequence
MIVRDEEENLPRCLESVRGLVDEIVVVDTGSRDGTAEVARRYGARVLHQPWADDFAAARNRSLDEAGGEWVLVLDADEELGPEGREALPGLLARPEVEGYLVRIVNFLGEGPHPPQEETAGLRLFRNRPEYRFAGAFHEQIAPSILAARPGARLEPSPLRILHRGYQPAVRRRREKHRRNLRMLERMRAEAPDDPFLLYLLGVEHLAEGEAGAALPYLEEACRLAPPDRAWRPKLVKSLAAALAEEGRWADLLAWLGPELERYPDYTDLHYLAGLAAQGLGRHQEAAAAFRRCLALGPAPSPPYGSVDPAAGGA

SEQ ID NO: 3603 - protein, 279 aa, Unknown
  Description of Unknown: Candidatus Amesbacteria bacterium GW2011_GWC2_47_8 sequence
MLSVVITAWNEEKNIGRAISSISRLANEIVVVVDAATTDKTAETAKKLGAKVFPHAHTGIVEHIRNFSISKAIGDWILLLDADEEVPPALAKKIKELIKDSAVDYYRLPRKNIIFGKWITSDHWWPDYVYRLFRRGTVTWEDTVHSIPVTQGRGADLPAKEEFSLVHHNYSSISQYLERIDRYSEAAIPTSFTPADLVTKPIAEFLSQYFARRGYTQGLHGLALAGLQMFSEFIRFLKAWEHQGFAETKFSQADLTHELKSKAREYRWWNSPTWLRRWI

SEQ ID NO: 3604 - protein, 332 aa, Lachancea lanzarotensis
MWDALWSQVRETNATVMLGTFLVVVLSSLYVVVLILSHWPRKPFAEELLYRSNGFQGDEISGQLVSVKDSEENVDGIELSVVVPSYNEVGRILVMLTDAIEFLQKKLENKWEILIVDDGSRDGTSEYCLKLAHSTFKLQPGQLRVIKLGKNRGKGGAVRHGMLHIRGNFGLFADADGASKFSDCEKLLGAIKKSDENGKGAIAIGSRAHMVNTDAVVKRSFVRNFLMYGLHTLVFVFGIRSIKDTQCGFKLFNRPAILQIFPYLHTEGWIFDVEILILALKKQIPIKEVAISWHEVGGSKMELARDSINMAKDLVTIRLAYIMGIYSGKSEC

SEQ ID NO: 3605 - protein, 295 aa, Bordetella sp.
MNRIPVSVVVMTKNEERNIEKCLRALGDFDEVFVIDSHSTDRTAELARGLGAIVVPFQWNQKYPKKKQWCLDNLPFSHDVVLYVDADEEVTPPLAREIAEALPRFEQGLGGAFVGFDYVFCGKPLRHGHRVYKLVLMHRQRGRFLDYNDLDVANMWEVEGHYQPEVEGGTMVMKGRMIHSDHDGLFHYFDKHNRYSDWEANLRVKGLMNDPREANMGMRSLLKRIFQALPFKAPAVFLHSYLFHLGFLDGKVGLDYAVARAMYYWQIGLKSREVRDTLRRAEQAARPSSVSQSAR

SEQ ID NO: 3606 - protein, 596 aa, Nitrolancea hollandica
MPEADNAPLPLAIIVLTLNEERHLRGCLASAAGLAGRLLVIDSGSQDRTPEIARMSGAEVLDRPFTGFASQRNAALDLVDQPWVLFLDADERITPALRREIREAIQQAPDNIAGYWVPRRNWMFGRELQGGGWWPDYQLRLLRHGRARYQTGREVHEVVDLDGDAGRLTEPLRHLNYDSIADFREKQLRYARLRVDVLHAEGKHPRNRTFVGQPVREFGRRFVSLGGYRDGLLGLFLATSMAWYELRSWLWLRQRLAEARIGGSATESEQDRNWAGLGPALDNLDLSLIIVSYNVRDLLIACLESIQAALASSRLRYEIIVVDNASNDGSPASIRQLFPGVRLIENTENLGFAAANNRGLRDAGGDVMVLLNPDTTIPSGTLEALFDYLNEHPDTGIVGPRLIYPDGSTQPSRRRFPTVLTGLLESTIVQDYWPENPAARRYYLADRPDDVTQDVDWLVGACLMARREVFEQAGVLDEAFFMYAEEVEWCHRVRKAGWRIVYLPEVTIVHHEGASSRQNVPARQINFDTSRVLLFERLHGRQIARFLRGYLLATYIARIGIEGSKGLLGHKRPLRRTRVALYWQALTSGLRPGQHR

SEQ ID NO: 3607 - protein, 251 aa, Lacinutrix himadriensis
MTKLTALIPTGNEIHNIEAVIASVSFADEILVVDSLSTDGTFEKAQALATKVIRREYEYSASQKNWAIPQAKHEWILLVDADERVTPELKAEIQTLLNQPEIEHDAYWIGRMNHFMGERVHYSGWRNDKVIRLFKRDLCTYEDKHVHAEIIVNGTIGNLESKFYHNTYITFDKYLEKMNRYAWWQAKDYDKKTGKLTPYHFVIKPLWGFFKHYFIQAGFRDGLVGLTIGTIQSYVIFMRYVKLWLLRKGRE

SEQ ID NO: 3608 - protein, 251 aa, Bizionia paragorgiae
MIKLTAIIPTKNEIHNIEAVIATLNFVDEILVIDSYSTDGTFEKAQTMATVVIQRKFTSYSDQKNYAISQAKHEWILLVDADERVTPELKTEIKSILNLEKIPHTAYRIKRQNHFMGQRVNYSGWRNDSVIRFFKRDYCKYNNKHVHESLIVNGSVGSMKGKFLHYTYRSFNLYMEKMNRYANLQAIDYNDHTGTLTPYHFVIKPFWGFFKHYIIQSGFRDGLVGFTIGYVQAYVVFMRYVKLWLLRKGRK

SEQ ID NO: 3609 - protein, 258 aa, Unknown
  Description of Unknown: Acidobacteria bacterium sequence
MNRLSACLITLNEERNLPRALRSLEGVADEIIVVDCGSQDRTQEIARAYKAKAIIREWTDFAQQKNFAAASASGDWILSLDADEELSHELQQSLLAWKQQEPEFPVYEVARRAWYLGGWIKHSGWYPDYQRRLYQRDVASFQGIVHESLAFQGKAGRLRGDLSHYTMNSLAEHEEKVERYTTLAARQMYEAGKRRWRAAMWLATPWTCFSTFVLRGGVLDGSRGWLISRMAARGVWLKFRKLGDLIETERHGRTIEAP

SEQ ID NO: 3610 - protein, 295 aa, Unknown
  Description of Unknown: Acidobacteria bacterium sequence
QSSFVDLPISVIIPVRNEAQNLPRCLESLHGAGEIIVIDSQSSDETCEVARRRFAQVVQFHYHGGWPKKRQWAIDNLPLKFDWVLLLDADEALTTQLKQEIRAAISCPEINGYWIKLQMHFLGRRLRHCGATFSKLSLFRHGKGHFECRIADQDSSMCDIEVHEHVMVDGQTARLQSAIVHNNVSSLSRYLEKHNEYSNWEARVWTETADNAGSLPPALFGTQAQRRRWLRKHFFMLPGSPLFLFLYRYLFRFGFLDGKPGLFYCALQAIQLFQVKAKIYELRLRQAAPARVEPC

SEQ ID NO: 3611 - protein, 251 aa, Unknown
  Description of Unknown: Bacteroidetes bacterium sequence
MKQKITAIIPTLNEEDFIEDAIGSVSFADEIIVVDSFSTDKTVEIAEKNKVRVIQRKFDNFSNQKNYAISKAKNDWIYILDADERIPVELRQEILNAMENPNDIVGFNIYRKFYFLKIKISYGGWQADKVIRLFRRDRCEYNGNLVHETINFNGAIATFKSKIDHYSYRGYDHYVNKLNLYASFQAQELYENKKRVNVFLITLKPPFRFFVHYVIRRGFLDGYPGFILATLHAFGVFTRYVKLWLLYKNEK

SEQ ID NO: 3612 - protein, 251 aa, Gelidibacter algens
MQKLTAIIPTGNEIHNIEAAIASVDFADETLVVDSLSTDGTFEKAQELATKVIRRDYEYSASQKNWAIPQAQHEWILLIDADERVTTELKSEILEILKNPDPKIVAYWIGRTNIFMGEQVNYSGWRNDKVIRLFKRDFCNYEDKQVHAEIIANGDLGTLKHKLIHQSYTTLDNYIEKMNRYATWQAKDYDKKTGTLNPYHFVLKPFWGFFKHYIIQSGFRDGVIGLTIGYLQGYVVFMRYVKMWLLRKNRS

SEQ ID NO: 3613 - protein, 284 aa, Geminocystis sp.
MELSVIILTHNEEANLPTSLSSLKKLEAEIFIIDSGSSDRTVEIAKEYNCQVFNHPWENYAQQLNWGLKNLPITTPWIMRLDADERLTPELVAEIKEKLPLTPKNVGGYQMKRRVFFMGRWIRHGGYYPTWLLRIWRNGIGICEQRWMDEHIILSEGKIIDLQNDIIDENQKGLSFWVNKHNSYADREVKDMLAMEKAEENQQNILDNSQTSQASQRRWVKKNLYVKSPLFFRVFIYWLLRYTVGLGFLDGIEGMMFHFLQGFWYRFLVDAKIYELKHQSRLTQ

SEQ ID NO: 3614 - protein, 245 aa, Unknown
  Description of Unknown: Flavobacterium seoulense sequence
MSRLTVIIPTYNEIDYIEDAIKSIEFADEIIVIDSFSSDGTKEKAIELGCIVLDRKFDNFSSQKNHAIAKATGDWVLFIDADERVSQKLKIEILSVIKNGKHQGYKLQFPHFYMNRFLYHKVDKVVRLVKNDSISFSGDVHEKLLFKGTVGTLKNFMIHYTYKGLFHLIQKKDSYAWFQANTSFKKGKKATYFHLIFKPFYRFFSSYILKRGFMDGVPGLALASINAYGVFSRYAKIILIEKGLK

SEQ ID NO: 3615 - protein, 258 aa, Unknown
  Description of Unknown: bacterium HR17 sequence
MPLSVIVLTRNEATNIERCLNSVAWADEIVVVDAESEDETRAIAEQMGAKVIVHPWQGAGAQYALGIAHATGDWVLVVDADEEVTPELADAIRCVIVNPDALDGYRVKRVNYVLGRWLRYGGWQEWVVRLFRRDKVISPPTLHPRFQVQGRVGYLPYPLRHYMAPDLLDWWQRSFRLARTEAAVEFLQGVRFSGWALLGGFWKFVRRFIFKGGFLDGWAGFYACLHRFLYIAVKQAHLLELERGKSSRAQRPETAPFK

SEQ ID NO: 3616 - protein, 256 aa, Sugiyamaella lignohabitans
MSVVVPCYNETGRLGLMLDECVPVLNEEFGNSWEILLVDDGSKDGTDQFALKWAMDHKLPPLSLKVTKLEKNRGKGGAVTHGMKYVSGKYAIYADADGASNFSDIKKLLVKIKDDKLGVAIGSRAHMVNTDAVVKRSFIRNFLMYGLHTLLYVFGIRTIGDTQCGFKLFTRDALKLIFPFMHTEGWIFDVEVLILAMKKNIPIYEVPISWHEVEGSKIELARDSIKMAIDLVIMRFAYLLGIYQAHKVTIDNKKDR

SEQ ID NO: 3617 - protein, 250 aa, Tenacibaculum sp.
MTKITAIIPTLNEEIHIEEAIKSLGFADEIIVIDSMSTDNTVELAKRLNVKIILRKFDDFSSQKNFAIDQAEHKWIYILDADERVTPEVQKEILEAVKNPGDYVGFYLRRNFFFMKKNIKYGGCQRDKVVRLFLKEFCRYDGKKVHETIVANGKLGFFKHKIEHFSYRNYNHYIAKIHRYAALRARQYHEAGKKVNVYHMLVKPPVRFVIHYFIRRGFLDGFEGLIFAKVHAYSVFTRYVKLRLLNKGIK

SEQ ID NO: 3618 - protein, 309 aa, Unknown
  Description of Unknown: Candidatus Woesebacteria bacterium GW2011_GWF1_40_24 sequence
MRTSIVIQLGMSSRISVVINTLNEEKNIKRAILSVKKLADEIVVIDMESDDKTREIAESLGAKIFTHKKTGYVEPARNFAIGKATGDWILILDADEEVPQGLIPEIQKILKSSKADYYRIPRKNIIFGRFIKHSRWWPDMNIRLFRKGFVSWNEIIHTVPLTQGVGEDFPEKEDIAIIHHNYDSIEEYLERMNRYTTHHAKIKIDEGYKFSWKDIMVKPMAEFLSRYFYGQGYKDGLHGLALSLLQAFSEFIVYLKVWQTGKFEEQDLKLSEVASLFREQEKDLHYWQSNSFVNEGGGLLDRIRRKLKI

SEQ ID NO: 3619 - protein, 294 aa, Unknown
  Description of Unknown: Candidatus Daviesbacteria bacterium GW2011_GWA1_42_6 sequence
MLKISAALATHNEEKNITDCLKSVQGLVDEIVVVDGNSSDKTAEIARSFGAKITQIPNDPMFHNMKQKAFDLATGDWILYLDADERVSGKLGEEIKMVITMDNTRVDEYQKGLKDKDLFLKHQKILELRDGQIGNGTDEYVAFFFPRLNYFLGKYLRFGGAYPDGVIRLFKKGKAYLPCKDIHEQMVVDGKVGWLQNELLHISDPTFGRYMERNSRYINLIADELRRGKVGKNPWQLLNFFFVKPIWWFLLTQIRHKGVLDGLQGIIFSFFSALRFPRAYFRYLRSKGEIKVLP

SEQ ID NO: 3620 - protein, 259 aa, Unknown
  Description of Unknown: Candidatus Omnitrophica bacterium 4484_70.2 sequence
MSKIAAVVLTKNEEVKIEKCLRCLQSFVDEIIVVDDNSEDKTVEICKKLGAKVIINESGGNFDKQRNIGIEKASCDWIIQMDADEIIPSETAVKIKEAIKNPSDYVAFKLRRKNFLFGHPLRYGGAYNWGIKLFRKGKAYYTGSSVHETLKVDGKVGRIDADIYHYPFTSMRDIFERTNFYTEVESKLFVENKRSVSFKEIKYRLTWKSLKLFWKLYVKKKGYKDGMYGLVWCILNVIGPQIRWLKIWEKALKEKKIEE

SEQ ID NO: 3621 - protein, 320 aa, Kluyveromyces lactis
MEVSKMPFDADLKVLLASCLVGLVLSLYLVVLLLSNNPRKAFANELQYRSIKDGSVVHEPLPNIDDDSSDGIELSVVIPSYNETSRIKIMLEEAISFLQNEMKGKWEIIIVDDGSSDGTSEYCMDLAKNHFKLNDGEFRVVTLEKNRGKGGAVRHGMLHSRGEYLLFADADGASKFSDVAKLLANTKVDAPEVSIGSRAHMVNTDAVVKRTIIRNFLMYSLHALVFIFGIRSIKDTQCGFKLFNRKAAKEIFPKLHTEGWIFDVEILIVALRKNIPINELPISWHEVDGSKMDLARDSINMAKDLVIIRLAYILGIYSDK

SEQ ID NO: 3622 - protein, 261 aa, Unknown
  Description of Unknown: Kiritimatiellales bacterium sequence
MEKKQDSIKPAVTACIVSFNEERNIRRCLESVKWCDEIIVVDSFSSDRTVEIAREYTDKVIQREWPGFRAQKEFARLQGGNEWSLQLDADEEISPKLKAELIEAMKCNDGSVNGYEIPRMVNYFGKWIRHGDWYPDRKLRLYRKERGRVVGGEIHEYVAVEGKVKRLRNPIFHYTYDDLTHHLQTLNRYSTISAEEMYKRNRRTYWPDILLRPFWKFVRGYVFRMGFLDGSAGLVIALLSSFGVWMKYLKLRNLQRGLILS

SEQ ID NO: 3623 - protein, 325 aa, Unknown
  Description of Unknown: Acidobacteria bacterium sequence
MAERSHPFFEAPDHDLRSRALSAEQLPVSVIIAARNEAANLPRCLESLPGMGEIYVVDSQSTDRTVEIAQSFGAKVIQFHYAGGWPKKRQWALDTLPLSFDWVLLLDADEVVTPELSSEMRHAIRDSSVTGYYIGLDMVFLGRRLRHGGAGFYKLALFRRWQGRFECRTQQQDSSMCDMEVHEHVIVDGATRRLNHRLLHHNVENLDRYIHKHNQYSNWEACVWTSADQQESQIRPRLFGSQAQRRRWLRRRFFWMPGSPVFFFLHKYLFCLGILDGIAGLIYCGFQGIQFFHIKAKIYELKHVPSRGRSLPSELSARELTHVRN

SEQ ID NO: 3624 - protein, 249 aa, Unknown
  Description of Unknown: Flavobacteriaceae bacterium CG_4_10_14_0_8_um_filter_31_99 sequence
MTKITAIIPTLNEEIHIADAIKSVSFADEIIIIDSFSIDKTLEIAATYEVKIIKRKFDDFSSQKNFAIDQATHSWIYILDADERVTPEVEKEILEAVQNPKDFVGFFVKRTFYFCGKKINYGGCQRDKVVRLFLKESCKYQGIVHETIVSVGKFGFFKNKIEHYSYKNYDHYISKMNHYGALRGKELFEKGKKVTLYHFLVKPPARFLKHYIIRFGFLDGFAGYIFAKTQAYGVLTRYVKLWLLHKKIN

SEQ ID NO: 3625 - protein, 253 aa, Aequorivita capsosiphonis
MENPTKISALAITLNEAHNIEAYLKGLWFADEIVIVDSFSSDETVALASKHEKVKVYQRKFDNFSSQKNFAISKANNDWVTFFDLDEEITPAVAMEILQVSKKPKAIAYFVKRDYNFMGKRIKYSGFQTDYVIRFFNKNKCRYNSNLVHETIDANGKTEKLSHSVPHHTYKSFDHYTGKLHQYSELQAKMLYEKGKKPTLYHFLFRPWYRFWHQYVIRLGVLDGKEGFILAYVSAFSVFKRYVNLWLLYRKIN

SEQ ID NO: 3626 - protein, 265 aa, Unknown
  Description of Unknown: uncultured nuHF2 cluster bacterium HF0770_13K08 sequence
MNLSVTIIGHNEVDHLRELLPQLKWATEIVYVDCESQDDSLEFARDLGCRVFSRPNNTNLNVNKSFAVDQASGDWVFYMDPDERLPELLVMEIEETLENTVNTAFRLNRRNHYFGHWLRHGSQYPDTQLRLFQRGSASFPNQHVHEKLVVEGSIGSLQNDMLHFPYLNISQFLSKFEFYSGVEAGYLRDADVQVTAGNSIRFLLLKPFSRFLRRYLFKGGFRDGFPGLFCAIFDALNFVVRYFKLWEQTNNPPAKREQQGPDSRP

SEQ ID NO: 3627 - protein, 299 aa, Unknown
  Description of Unknown: Microgenomates group bacterium GW2011_GWF2_45_18 sequence
MNVRNAEDTLERALRSAQALADEIIIMDMESTDRTVEIAQAFTSKIFSHSNLQYADPARNLAIKEASCDWVLVLDADEWLTPSLIEKIQHITQDSHSADCYSFPRKNYIWGKWIQHTGWWPDHQLRLFRNGQAKWQGDIHQKATPLGSHIELEATEENAISHDNYPTVEQFLERLNQYTSIQASQEKKTQSFTSSDALLRFFSEFMRRYFALEGYKDTQRGTSLSLLQGMYELVVALKSAEAKELLDSSEKSDTAQTLHRISLELMYWSHHMQAQQGKSIQKIWHTLLKKLIALFIKFS

SEQ ID NO: 3628 - protein, 284 aa, Unknown
  Description of Unknown: filamentous cyanobacterium ESFC-1 sequence
MFSIYILTYNEEVEIAACIESARDLCDDIVVVDSLSRDRTVEIAQQYNVRVVQHAFESHGRQRTWMLEEVPTQHDWVYILEADERMTPELFAECVQATQSGEDIGYYVAERVLFMNHWIRHCTQYPRYQMRLFRKGKVWFDDYGHTEREVCDGPTGFLKETYPHYTSGKGFARWFDKHNRYSSDEAQETIRQLEKGQVRWGQIFLGQTEVERRRALKDLSLRLPFRPLVRFFYMYFFLGGWLDGSPGFTWCTLQAFYEYMIVLKVWELKDSPESRSTPPKIESS

SEQ ID NO: 3629 - protein, 251 aa, Gelidibacter sediminis
MIKLTAIIPAGNEIHNIEAVIASVDFADEILVVDSYSTDGTYEKAQQLATKVIRRDYQYSASQKNWAIPQAQYEWILLIDADERVTPELKNEILKILQQPDPHFVAYWIGRTNMFMGEQVNYSGWRNDKVIRLFKKDFCRYEDKQVHAEIIAHGAVGVLQHKLIHHSYTTLDNYIAKMNRYATWQARDYDKKTGSLTPYHFVLKPFWGFIKHYLLQSGFRDGVVGLTIGYMQSYVVFMRYVKLWLLRKNRN

SEQ ID NO: 3630 - protein, 280 aa, Leptospirillum ferrooxidans
MIPLNSVGPSVNEDDNASFEKERLSVCLITKNEEQNLKRCLDSLIGLADEIIVVDSGSTDRTCEIAKDFGAKVFQHPFDDFTRQKTRSIEKASSSWVMVIDADERVTPELKAEILQYLIHPETIRSINGFYLNRLNFFLGTPIHHSGWSPDWLLRVFRKESGGLDGRAVHESIVVSGQTMRLHGLLLHDTHPTIERFVTKNLAYARLWAKERSSTRGPSLMGVLFHPPAMFLKMYILKMGFLDGFLGFVLAVLYSYHVFIKYLMLYKVNIPLTDRDGVDS

SEQ ID NO: 3631 - protein, 276 aa, Unknown
  Description of Unknown: Verrucomicrobia bacterium sequence
MISVIILTHNEETNIARCLDSVSWSDDILVVDSFSEDRTVEISKRHGARVIQRAFEDFSSQRNFASEQGNLKHEWVLHLDADEVVTPELRAELARAMFGDKDAYRVSSKLIFCGKFLRHAGLFPWYQVRFGRKQALRFKQVGHGQRETLEPGRIGTLKSSLLHFNFSKGLCDWIEKHNRYSTAEARQNVYGYADDDVRILDLFSITTDRRRRAAKKIFRRLPCRATLRFIYMYLFRGGILEGKAGFTYCRLLAWYEWLIVWKEREIRERARGKTQR

SEQ ID NO: 3632 - protein, 251 aa, Unknown
  Description of Unknown: Microgenomates group bacterium GW2011_GWC1_38_14 sequence
MTISVVLATFNEEKNLEECLKSVKELADEICVVDGTSTDRTVEISKRFGARIIVRENPPMFHINKQKAIDMATKDWVLQLDADERVTPELEKEIREVINDQNYNGYWIPRKNWFLGRFLMKGGQYPDYTLRLYRRGKGNLPQKDVHEQAVVDGKVGYLKNPLVHIADPELKRYLMRWNRYTDIMASDIIKEGKRKDPIFALKNLFILPSWWFVLTYFRHKGFMDFWQGFLFSFFSSIRFPASYIKSWISKK

SEQ ID NO: 3633 - protein, 304 aa, Unknown
  Description of Unknown: uncultured bacterium sequence
MAKVKISAVVNTRNESENIFDCLKSLGFCDEIVVVDMESEDNTKEIAKQFTDRIYDHKAVGYVEPGRNYAIRKALGDWIFVVDADERVPRTLAAKLIEIADKNEVDFVRVPRKNLVFGQWLRHSRWWPDFNIRFFKKGSVEWQDEIHSVPITYGTGINLEEEVGQALEHHHYRTIDEYFLRALRYSGQQSKELIDSGYKFDPADLIKKPTGEFLSRFFAGEGYKDGLHGLVVALLQFFSILLVYLKVWQAEGSKPRNEREFTPIWQAGFREKFKEFRYWFLTSKLENSESKTESFFLKLKRKLL

SEQ ID NO: 3634 - protein, 289 aa, Unknown
  Description of Unknown: Candidatus Amesbacteria bacterium GW2011_GWA1_47_20 sequence
MKISVVINTLNEVKNLPRAVASVKDLASEIVVTDMGSTDGTIEVARKLGAKVFSHKKLNYVEPARNFAIGKAQGPWILILDADEEIPQNLVKKIKQIVGVPEADYYRLPRKNIIFGKWIEHTRWWPDYNIRFFKKGFVSWGDEIHSVPFTQGKGFDLPQKSDFAITHFNYEGIIQYLERMLRYTEIESKELMKNGYVFSWRDLVRKPLGEFLSRYFAGQGYKDGVHGLALSLLQSFSELTLYLRVWETQGFSDQKISRREISLELGKSVKDLRWWIRKEFSWLRFLMSR

SEQ ID NO: 3635 - protein, 251 aa, Arenitalea lutea
MQKLTAIIPTGNEIHNIEAVVASVNFADEIIVVDSLSTDGTYEKAKELGVKVIRRAYEYSASQKNWAIPQAKHEWVLLVDADERVTPELKSEILKILKNPPEPIVAYWIGRNNHFMGERVNYSGWRNDAVIRLFKRDFCKYQDKHVHAEIIADGDVGRLKEKLYHNTYITFDKYLEKMNRYAWWQAKDYDKKTGKLTPYHFIIKPFWGFFKHYILQSGFRDGVVGLTIGYIQGYVVFMRYVKLWLLRKNRQ

SEQ ID NO: 3636 - protein, 291 aa, Unknown
  Description of Unknown: Candidatus Woesebacteria bacterium CG06_land_8_20_14_3_00_39_ 27 sequence
MISVVINTLNNEEEVSRAIASVKGLADEVVVCDMESSDKTVDVAKKLGAKVYNHKKEKYVELVRNFMVSKVEDGERSRTNWILILDPDEEITSKLSSKLKEIIKHPQADYFRIPRKNIIFGKWIKHTNWWPDYNVRFFKKGFVSWNEVIHSVPMTQGKGIDLPEKEEYAIIHKSYKTISNYFEKILRYTDAQRDNLLNAGYVFSWKDLVKKPLAEFLSRYFASEGYKDGVHGLVLSLLQSFSELTLYLKVWEKQGFDDKILKKAEIKKELNKGTSDLKWWLRKKFSWLKFL

SEQ ID NO: 3637 - protein, 253 aa, Polynucleobacter asymbioticus
MPTLSVILITRNEEVNLEDCLASLEGIARQIVVVDTNSADRTLEIAQKYGALIAQPTDWPGFGPQKNRALELATGDWVLSLDADERLTPALRSEIQTAIHHNAHVDCFAIPRLSWYCGRFIRHSGWSPDYVDRLFKRGSAHFSDDLVHERLIPQGQVARLKNPLLHFSFMNFSQVLQKLDRYSTASAEQAFAKGKTSSPLKAVLHGIWAFLRTYVIRAGFLDGTQGFALAISNGQGTYYRYMKLWHLHQEAGK

SEQ ID NO: 3638 - protein, 260 aa, Unknown
  Description of Unknown: Chrysiogenales bacterium sequence
MEPGGIKISAVIITYNEEDRLPDALDSLQGAVDEIIVVDSYSTDRTPEIARQARATFYQNRFEDYGQQKNIAMQKASHDWILNLDADERVSPELKRSISDLKEGNIPIKASAYAIKRKTYYLGRWIRHSGWYPDRKIRLFKKNAATWQGRIHESLKVTGVVASLPGEILHFTYRDIGDHIRRLERYSTFLSEEIISQKKKCLILRLLVLPPVTFLRHYFWRLGFLDGFAGLVIASVSSWGTAMKYFKAIDLKRSAPRQAK

SEQ ID NO: 3639 - protein, 249 aa, Polaribacter sp.
MTKITAIIPTLNEEIHIEAAIKTVSFADEIIVIDSYSTDDTVLLAEKHKVKIIKRKFDDFSSQKNFAIEQAKHPWIYILDADERVTPQVKKEILEAVENPKGKVGFYVRRSFYFAGKKIKYSGWQRDKVVRLFLKEFCKYQGIVHETIKTNGEIGFFKGKIDHFGYKNYDHFISKIHQYAELKARDLHAKGRAVHAFHLVIKPIYRVFSHFILKRGFLDGYTGLILSITQGYAVLTRYIKLWLYNRNVK

SEQ ID NO: 3640 - protein, 428 aa, Xenopus laevis
MFQQISVDEPPPEGCSAFVAVHGMHTCKPSQIKKLLKEAPERPRPYIYKTDHTFPTLTKTAPVAILYAEVGTKDFAKFHKTLTEKAETGEIIYVLRHYIQHPDERKMLLSGYGVELAIKSTEYKAMDDTQVDANNSSPKPDNGIAEEVQGFYFDKLMQMYPDLKENLGEFRKHLIESTNEMVPLKVWELQDLSFQAASKIISTPVYEALKVLRDMSQNFPIKARSLTRVALNQEMKKEIEVNQKHLSETFGIHPGDASLYINGLHIDLDVHNSFRRNLLIWTGNIMSWYFFKCYIISITFIKIHTTHFCFLETIKTEGKTLNGLSALGINNQDLSKYLRIQVHSSDENYALDIRHSSITWINDIETDHMYSRWPSSVQELLRPAFPGVIRPIRRNFFNLVLFVDPVQENAADYVKLAELFYRHNVPLR

SEQ ID NO: 3641 - protein, 288 aa, Wuchereria bancrofti
SDARQYDLAVRLAGYLLEEARVNLLKFALSLRAHSPTVLLFQRLGTERKKSCAAFADVHGTLTCDVNEFKKSYRKGPVPTVYSIDHIFPATKEHNVTLIVYGELATPSWRKFHLTAKALSRSGKVKYVLRHFVKDVRDDKPLLSGYGVELAIKSTEYKAVDDSNAVTDKVAVEESSEEYVDNEEDNYGFNFSTLRRLHSDLKESIGQFRLHLLERDELTPLKVWQVQELSYQAAQKIVQADPQKAINIMVDSSQNFPLAARSLSRQIVRKEFISEVVSNDFYFQNRFL

SEQ ID NO: 3642 - protein, 443 aa, Perkinsus marinus
MLEDLSPTPQELSEVIKNGQAWARAKALPFPAVVVNGRVSGDLSELAVFITEDFGALGSAWYTRVVERQKKKETGLDFDEDEITDVIRELIFPEKRVKFLSAVYHPALFPDEEQPRVLLPIDSLRQVANLEIAPNSGGPRVPLHVLVVVGGTEEELDENFLVVEKVAAALKGRSGAIITVVGVNSEVNAKMIGCVNSLDGLRSFNIDKCSQTPAAVDPNVNEAASRLVRSAHAEDSRGVVLVINGRRTEVDVNESKPILVDLLTSLLAPYEQAGAQEDACVGLDPIACSVAFTLVQSLATTENPHREVIEEGLDNVFDKAPLAGFDVPARGRLIAEITGSVDPLTDAGRRALATINHISEALEGFGARLVLAPQEQYTEYPLKSWHRMVVTAESAEFDLMPTRNTLTLGLDVLPNWQVSSLKAEVDLDNIRLTPVDQERVEAQ

SEQ ID NO: 3643 - protein, 228 aa, Protopolystoma xenopodis
MLRSSCETEVEPTLDLKEPATKQNFYRFVWEPRLFSPGMQAEHSDLVNRASINPFSSSMSFSSQDLDHPDEVLSSAQQKLPRGLFINLPGEPLLTLSLDAPHGWMVTPVQAVHDLDNLRLSEVKPELSNGNMMARVDAVFELEYLLLEGHCAEEGSMKPPRGLQFTLGTRAQPNQYDTIVMANLGYFQLKARPGAWYLNIRSGRSRDLYKITRSALLFSCNFTLSFFA

SEQ ID NO: 3644 - protein, 392 aa, Helicosporidium sp.
GVARGGCALVTNGRAVYFSKGEALVAGDLSLATLFAQSKQFAGSVAALVAGAEENEETEETEETKEAKEAKEKEESEEKENDLLSENGSLAAAQPSRPTSSSVHRVADLILRVSSLLASSPVEESERGGISFFRTLRKLESGMLTFAVPGRTLPGSSENAPGPGSSSPLLIQALLDPLSKEAAYTSALLSWASRELGADVEVTLSPRLSLAAMPLKAFYAYASPPSVFGHLDEEAERRPSDVLGPLNPHAQLLELPQQATLTLGLHVPELWLVGARSAAADLDNVIPAREADLEARFALEALLVTGSAVDLVALEAGPRNSTYPRGVQLELARSAPLADSQDSRVDTLVMSNLGYFQLKALPGTWSLALAPGRSRDLFDVEAAVASAGPAAA

SEQ ID NO: 3645 - protein, 313 aa, Cervus elaphus
IAADEPPPEGCNSFFSVHGKKTCDFDTLETLLLTASERPKPLLFKGDHRYPSSNPESSAVIFYSEIGSEEFYNFHRQLVSKSNAGKINYVFRHYVSNPRKEPVYLSGYGVELAIKSTEYKAKDDTQVKVNTTVIGESDPIDEVQGFLFGKLRDLHPDLKGQLKELRKHLVESTNEMAPLKVWQLQDLSFQAAARILAAPVELALVIMKDLSQNFPTKASLFDILRNEARVMEGLHRLGIEGLSLHNVLKLNIQPSEADYAVDIRSPAISMYNKVRTGERLKVEHVVTVLEKKYPYVEVNSILGIDSAYDQNRK

SEQ ID NO: 3646 - protein, 579 aa, Verticillium longisporum
  MOD_RES (568)..(568): Any amino acid
MTRLCRSPLGLVAILWAAVNVSAGPSVNVHMQAAFPAGPYLLELLETAAGENATSYFPLLDRIASGHFKASSTHKALYDDFLQLLQDDGHVSSPDALSTFKLALSMRLSAPRIEAHYQYYDTAVAPHVTGGKQQDCEIWLQFAGSQYCSPTLEKPEVRVSSIVKLLPFDRVIGTGTDAVLYADPASSAFGAFHQALAQKARNGEISYRLRYRRAVGALQEPLPVNGYGVELALKRTDYIVIDDREAQTDGPQKSIATEVVLDEEEEVADLKPLSTSDLAPLGLKAASFITQSQDPWDALLKLTQDFPKFSSSLATHEVSEDFLAEHDKNRAEMAPSGLNALWMNGVQLTERQIEAFTLIDMLRRERKLIDNIRNLGLTGQQAALLLGHPKVASAKNGDEPPRFDWRDKIEEGKVIIWLNDLEKDARYEDLPSELTSLLQRTYPGQLPSIRRNIFTLVVPVDLTNPGDVTVISNLFTFVERLLPVRFGLVPLTPSDDKAAQTKVVYYLMQNYGPEAMIAYLQQSVEDAKISKPDQIIFDRVVAESVALPEASTASFDDVMQSEEQAERXTFMVPSRRRQP

SEQ ID NO: 3647 - protein, 1343 aa, Electrophorus electricus
MAASSKIRLQTMRTLCFLVTLVQLRYAYSSPKGVTTSLKAKWPVSPLLLETSEFIGEGSDEKFWQFVDTVKELSVYKNGESVRSYYNLILKKAGQFLTDLQVSLLKFALSLRAYSPAVHAFQQVASDEPPPEACLAFVAVHGQHACSTKDMKRLLKTAAGRPRPYLYKNDHRYPGVNGTDLPVAILYAEIGTKTFNTFHKVLSERAEEGKIIYVLRHFVAEPRRESMLLSGYGVELAIKSTEYKAVDDTQVKDSKSATTSEDDDTDEVQGFLFGKLKESHPELQEQLRDLKKHLLEGSNDMAPLKVWELQDLSYQAAARIMSVPKFDSLKLMQDLSQNFPSKARSLTRVAVNQEMRKEIEENQKRLSETMGIHPGDSSLFINGMHIDLDVHNPFSILDIIRGEAKILEGLHNLGIKGPNVSKFLRLPVTSVEDSYALDIRHDSIMWINDIEKDSTYQSWPFSLQELLRATFPGVIRQIRRNFFNLIMFLDPAQEDSAELVKLAELFYKHKIPLRIGFVFVVNTDEKVDGYGDAGVAFFRVLNYITEEYDITQAFLSMISMYNKVDVGDSLSVDAVTAYLKKKFPKANAAKILGVDSSYDDQRKAGGVFYRKTGLGTLPVALFNGIPLSPEEMDPDELETLLLQRIMDATSFFQRAVFMGQISDSMDVVDFLMEQANVVPRINPLILSADRRYLDFTASPVADDWNDSTMFSFLDAKDKTAVVSKRMKYLTKHGEMVYGVTIWIIADLEQARGRKALLGALKHMKSSSSSSRVAVISNPGAKPTEDNSKFYRAIWASLLTQSSKNTLDFTLKLLKEETVQLLTQGTKIKDLLLQGMDQDAFEKKFNTLEVDFLRSQHLFCQEVLKLKAGQRGVVSNGRILGPFEEGEEFSTDDFHLLEKITLSTTADKIRAKVKQMNLPPKKAADLIMKVDALLSAAPKDEARKDVQFAKDKFSVLHLAPREDEVFYDVVAIVDPLTRDAQKLAPLLIVLGRVVNVRVQVFMNCRAKLSETPLKSFYRFVMEAEISILGNDTLSPGPVARFTEIPESPLLTLNMITPESWMVEAVRSPHDLDNIHLQEVNGVVNAEYELEYLLLEGHCFDLSTGQPPRGLQFTLGMRQQPLMQDTIVMANLGYFQLKANPGAWTLRLRKGRSEDIYQIQAHDGTDSPADAGDILVVLNSFHSKIIKVRVQKKPDQVNEDLLSEATENKGLWESITSVWSSLEKSLTGSSSAEEGDSKKEDVLNIFSVASGHLYERFLRIMMLSVLQHTKTPVKFWFLKNYLSPSFKVKCVCVCMCVYPSTSLSCAGADGWGLFLIYIYHSSYYCCIGVSPLGQNKPLTSLVFLA

SEQ ID NO: 3648 - protein, 215 aa, Protopolystoma xenopodis
MVDIAVSQELRDEVKSLHLSLQENYKILPGTNLLSINGLIVSPKVDISSLLDIIWRESWILTRLHRLGIRGPALYSLLSLPLDQVGSEFSSTGIESDGATAQSLFGSRPTSLTVTQPPINLGQHVRLSLTGRFMLDLRGAPLIYLNNLESDPAYAGWKKSVRGLFTMDFISGSSGLKQVAKNLFNVVLVIDPANPNCTDILRFTESFILHRVGIR

SEQ ID NO: 3649 - protein, 569 aa, Neolecta irregularis
MRIFNLAIVLLPLLEAATPVNLHLDATFASPPFLLELLEAAATEKPECYFQLIPHLVSLPRNTDRELYNAALPLISSCLGDPASVELFKLSVSLRSATPKIEAVYQYYDHSEIEKPPCDSWFLIEGTGLCELPKNMPESSRKDRKLLRMDRIYPTLNHEKPAVIYYADLTDPTFLDHHESLIALSRQNKIRYVLRYKSPKIRSVRKVSLSGYGVEMALKKMDYLVIDDREDGGEPRSLPGKDESTSTIQPLRISELAQLGPKAISYIINSENPLNKLLETSRNLPSLTSVLSKYNSSSKVIQEIDKLNGHAYPPGQNMLWINGRQIDSADITIYSLLQFLRYERDMISSLSSLGLSTVKSRDLLTNPAIATYYETISSQRFDFRDSVIIYFNNIENDKLYASWSQSLSTFLTPIYPGQLHTVRRNFHTLVVSINLSDDDEVNGILGRLWSIVQRKIALRIGIILETDTPRSRAFVWIYQEKGLDKALEFLSNVLPDNTSDKKAFENVVGRWGKPKFDDAIVSQNVNDHFSKNNDWLSRFSFQHGGVFFNGRFIQKSDVFPCGYIAEIDI

SEQ ID NO: 3650 - protein, 553 aa, Necator americanus
MFWRFVHEVASRCSRLDWKNADEEQKYEFAVDVASQILTESSFDMLKLSLSIRMFSPAVQMGAEYTVACTAFFDVHGITGCSVEELENAVNSEQKRDVPELLPIDHIYGKETVPKTVAIVYADVGSPEWLQLHIKASELVSARKIQYVLRHYVKETDAHTLSLSGYGVELAIKNTEYKVVDDSFVKNDSDETDLHGFNFRLLRLGKVMFIKTVVCILLLLVFFLITRALYPDDSESFDGFRMHLKDIEELTPLKQWQVQDLSFQVSPIVVFMSIARETVSRELRDEIEGNQKDHLSGAGLDPGESMLFLNGINLDIDSLDMFQLVDVIKQEERVACGFFNMGFKREYLSILVGMDFPDDKTKYAIDYRDAYPMASFLKKKKSFRILFLNNLDTDRRYQHWRNSVKLLLEPYYPGMIRPIARNLFNLVFIVDPADRESRNLMKIAHSFFKHEIPLRIGFIFVVSNDENVTGVNDSGVAILNLFNFLAIDTSYHEALRIVNEMLDHYRVQDKIEPVDIKSWFESNYGDADYYDVFGPKSDYDNGRKVNFASHYFS

SEQ ID NO: 3651 - protein, 436 aa, Blyttiomyces helicus
LIGPIPLEKELTVSDFQLISKIELQNRVSNLAEKVVKLADAVKSRREINDEWYSNTILKLSSFVGVAVAGSKSAAGGGAADAGNVRLPADAFDPLARAHTAISLGNATTAVIRVTAIVDPIAEATQKTAALLAVIGTFDGVHLDLILIPSEEAESGGEQLPIKRFYRYVLQAEPAFDKITGDLVPPTASFLQIPVAPLLTLGTDVAGSWLVFPTESIYDLDNIKLSNLDRAAQKEGVRAEFALQNILVEGHARDSRTNGPPRGLQFTLGTQATPSLVDTITMANLGYLQLKANPGVWDLRLREGRSRSIYEFEAVVDSHAAQYRRRRRDNNTDLLGDAGARVVVNSFEGVTLYPIVRKKAGMEEMDVLEPDVEHGKESGGIWNQIKTNIFGGEAKSEPTINVFSVASGHLYERFLSIMMLSVVKNTKSGLGVDMMC

SEQ ID NO: 3652 - protein, 446 aa, Jaapia argillacea
MLLRRIIVLPWLLVATRAANSPPLKVSLRTSWSAPPFLLEVIETIAIENPASFFPLVDALTDPSLPPPSSPEATYHLALQTALKDGWLTDPSAKEMVEINMALHAATPKLEAMFEWYRDTQSRSWEGGDVDVDKECGSWVDWYGERLCEVEELVRLAGHETIDAPSSGSQISGTSSSKPKPKILPFDHIHPKTLARPPHTAILYTSPSSSNFRALHSYLYSLSSEVNPRVEYILRWAPPSSKDGAGAEERSYLSGYGVTLDLKKTDYLALDDRRSGSKSSDTESGGRAIDESSEEVVDSIMELIESYPVPENYTRDSSHPLVEDELLAIGIQATQLITSSTNPLTTLTKLTQNFPSYASLLARRVVVDQELDQEIRNNQVGKVQGGISAMWLNGGVVGEGEVNPFGLLRLLHRERPLVLSLTSEPLSLTPRQAITLLTHPTIATAQ

SEQ ID NO: 3653 - protein, 377 aa, Oncorhynchus mykiss
MWQHCALLLSLSLLPVVSGGADSKGVTTSLTTKWASTPLLLEASEFLAEESQEMFWDFVEANQNIKGEHDDTDQAYYDLIVKRASALLSTVQLNMLKFALSLRAYSATVQSFQQIASNEPPPSGCSAFFNVHGEKSCDTEKLTALMETAAERPKPYLFKSDHRFPGSNPDIPVVILYAEIGSSEFTMFHQLMLSKANKGLATYVLRHYLASPSSHRVYLSGYGVELAIKNQEYKAKDDTQVQGAEVNATLMGENDPVDEVQGFLFGKLKTLYPELKEQLKELRKHLVESTNEMAPLKVWQMQDLSFQTAARILAAPSSDALNVMRDLSQNFLPRLGPSLKQWSALRYVKRWKRTRSSLRELWDCSLETLLSSSTDYT

SEQ ID NO: 3654 - protein, 807 aa, Colletotrichum higginsianum
MMRLSRLPMGFALTLWAAGNVIAVPSVTVDMKAAFPSGPYLLELLETAAGENATAYFPLLDRIAGGYFNEAKTDKEVYDRFLHILNDDGHITAPEALSTFKLALSLRTAAPRIEAHYQYYRTAVEPKLGSDAPDGCEVWAELGGKQYCTPALDTPKESSLDGAKVLPFDRVLGSGSETILYADPTSSAFGPFHSTLVQKARSGEIEYRLRYTKRAGSYEEALPVSGYGVELALKRTDYIVIDDREAHHDESQKVVNAEEVLDAAGEVADLKPLAKSELQELGLKAASFVMQSQNPFEALLRLTQDFPKFSTSIAAHNVSSDFLAEHQLNRQQLVPSGMNVLWMNGVQLIERQIEAFTIIDLLRRERKLIDGVRDLGFTGGQAVSLLGHPKVAESKADEEPPRFDWTDDLEEEKVIMFLNDLEKDERYKDFPDQLMSLLQRVYPGQLPPIKRDIFNLIVPVDFSKIEDLNVVAQLNSFIQRKLPIRFGLVPLTPTENAVGISKVLYYLLDNYGLEAFIDYLDAAMQDSKTEKPDQSVFEKATRDREALPDSKLLPFDDVLRSEELDNVVKFAEKWAKRLNANTPIPPVFINGIPVPRENNWLQAMSMKATNDLQSIQRAVYLGMIDEEGWVPDFFLEKAVKRRNTYIYPEDDKSLKILDVNKIYTEHDSLFGKVPVIEAFAESTKENWAVLTVVGDFTSDEGANLLVSALAFRRSNPGVRLDVVYNPLTPASASAVNAALKNGGDKFTEAESLPEIRSILDNAAGEPDGIFAAALNEFLSFAAIKPGSNVLILNGRVVGPFTEAEPFQ

SEQ ID NO: 3655 - protein, 603 aa, Friedmanniomyces simplex
MKTPSCRLALIAGLTSLLLGVSAVPSVDVTVRTAFAAPPYLVELLETAADENATCYFPLLDRIADGYFDQALTAQELYTVFRSLLQEDGHLTQAEDLSSFDFALSIHSAAPRVEAHYQYYRTAVKPVLEFEDDGDCSTWAHVPFSGQGYCSADMVASSAHEMGRPSAELHQLPFDRILGAPDSDRPSVLYADIDSTSFRQFHKTMRQTARDGKTSYRVRYRPAKESTNKSLAVSGYGVELALKRTDYIVIDDRQADEGKADDAALAAEGTLSEEEVSDLRPLSSSELVRLGLKAASFVMTSDTPFDMLLRLSQDFPKHSSAIAATNISTAFVQEHRANRDLLLPPGFNVLWINGLQIMPRDLDAYSLLEYLRRERKMINSVRELGLSGPEAINLLSHEAITASAVDQEAQRYDWRDDNEGGNIIMWMNDIEKDKRYMEWPSSISALLQRTYPGQLPPVRRSIHNLVITVDFSNYADVVTVIESLQNFVKRKVPIQFGLVPRFASDAGRQQAKTVYYLLDRYGLGAALAYLTNSVAGAGRKFSAPQEKYFAQAIEGRKLRRDKTVMSFAHVPSDATLDERLLSAQAYVRRLGAGQATPPILING

SEQ ID NO: 3656 - protein, 405 aa, Miniopterus natalensis
MFQQVAADEPPPDGCDAFVVIHKKHTCKVNEIKKLLKKATSRPRPYLFARDHKFPTNKENLPVIILYAEMGTRSFGKFHTVLSEKAQNGEILYVLRHYIQKSTSRKMYLSGYGVELAIKSTEYKALDDTQVKTVTNTAVEGETETNEVQGFLFGKLKERYSDLRDNLTAFQKYLIDSSKEMTPLKVWELQDLSFQAASQIMATPVYDALKLMKDISQNFPIKARSLTRISVNQHMKKEIQENQEDLRSRFEIQPGDACLYINGLRVDIDAPDPFSILDMLKLEGKIMNGLRNLGMSREHMTEFLKLNSRVWNNNYILDIRHSSIMVSAHVITVLKPLVDLRLNIKPDIVRLSNKFKEFERGCIAELRRESKNTDSSPLTLVSSFPILVFSAFPHENPYSLVQYPF

SEQ ID NO: 3657 - protein, 357 aa, Limosa lapponica
MGKCRRGGKLKFLESVMESEFLSEEGQEKFWNFVEASQNIKTSEQDGSNYYHEMLKVACQSLSPLQQNLLKFSLSLRSYSATVQAFQQIAADEPPPKGCTLFFAVHGEKTCEFDSLGNLLQAASERPKPFLFKGDHKYPVSNPESPVVILYAEIGSEEFYRNHKRLVSKAEAGEITYVLRHYIANPSKEKVYLSGYGVELAIKSTEYKAKDDTQVKDVNATVIDENDPIDEVQGFLFGKLRQLYPDLTEELKELRKHLVESTNEMAPLKVWQLQDLSFQTAARILTAPPVDALMVMKDLSQNFPTKARAITKTVVSSELRAEIEENQKVLIVDPTHETTAELLNVAEMFFSNHIPLR

SEQ ID NO: 3658 - protein, 417 aa, Necator americanus
MKTSSSRVAAKKINVALDPDTNSHVTASRWFARFASGYERRSQRRCSLPSELNDDDAMNVANILPGQRALVANGIIVGPFDEAEEFLASDIELLEKIVETRGAAVISSHIKNWNIRTENGFSSDVVMRSFALISKYAVSRKRTWIVLGENEKSTVTLVAEDPNRPVVDVVVVVDPLSRTAQKLAHILDLLRKTINCDLKIVLNPKPKLSELPLKRFYRFVAAPELQFDKSGKVVATQARTKTSPTSFDKVGVEIMEKVYDTKGHLTVKWDKCVDGVISRIKMQKPLIIELFYSPSAWMIENVFAEVDLDNIRMELAPSNVFAYFSLEHILLEGHCFDEVSGSPPRGLQFVLGTRANPTEFDTIVMANLGYFQLKANPGAWLLQLRDGRSKDIYQLSNYGSIEESTNDSVRVLIGDRS

SEQ ID NO: 3659 - protein, 572 aa, Orbicella faveolata
MMQTGPIQHAVFSGAIYRYSNVYEYVMSQPNVVPRVNSMIQSMERPYIDLTGSHRMPDVEINDPEAFGTLDSSQMASVIVKDLKYFTKQGEELTLKPITNWVIADLANKEGRALVKAALQQMKSSSSARVGLIHNPAVTQTDHQPEALHIARTVEAVLASKSHVTPAMLTFMEKLLDESNDFEKLSSDSKAMEDLLAKASGLKAEAIKAKLIDSNAFKGKLFSHQAFCKRVVNLQPGQAAVITNGRVFGPLFGNTLFTEDDFKLLENFDMDLYARKVRDQIDEMSFEGLSADDDTSEFRSDVIMKVSSALISREKRSRQEIVFKGSEHSVMNIKPNVDGPSFDVVAVLDPLSQAAQKIAPILAVFQEVTNVNIKLAMKSREKLSELPLNRFYRYVLEPEVTFDDAGSMAEGPLALFSDMPQSVLFTMNMDTPLGWMVEAVYSPHDLDNIKLQEVENQVMGKFELEHIFIEGHCSDFHTRQPPRGLQFTLGTPRNPGMFDTIVMANLGYFQLKAYPGAWSLRVREGRSSEIYEIESVSGSVKEGDTHFTVVVDSFIGKLMKVKVRLGLASVLC

SEQ ID NO: 3660 - protein, 449 aa, Verticillium longisporum
  MOD_RES (356)..(356): Any amino acid
MTRLCRSPLGLVAIFWAAVNVSAGPSVNVHMQAAFPAGPYLLELLETAAGENATSYFPLLDRIASGHFKDSSTHKALYDDFLQLLQDDNHINSPDALSTFKLALSMRLSAPRIEAHYQYYDTAVATHVTGGKQQDCEIWLQFAGSQYCSPTLENPEARVSSIVKLLPFDRVIGTGTDVALYADPASSAFGAFHQALAQKARNGEISYRLRYRRAVGALQEPLPVNGYGVELALKRTDYIVIDDREAQTDGPQKSIATEVVLDEEEEVADLKPLSTSDLAPLGLKAASFITQSQDPWDALLKLTQDFPKFSSSLATHEVSEDFLAEHDKNRAAMAPSGLNALWMNGVQLTERQIEAXTLIDMLRRERRLIDNIRNLGLTGQQAALLLGHPKVASAKNDDEPPRFDWRDEIEEGKVIIWLNDLEKDARYEDLPFELTSVSKDLSLRNQKPG

SEQ ID NO: 3661 - protein, 1168 aa, Symbiodinium microadriaticum
MHASSCIDGRRFIPHVSRSCLHEFQQRSIGVGVQCPPPLPGGMSKSGVVKNWVEDKGFGFIGPDDGSEDLFCHTSCLQGCKGLGKGDKVRFDAEYDDRKGKMRAVNVSLEGGGGGGGGGRGYDRDDRRGGYDRRDDRRDDRRDRRDDRRDYDRRDDRRDDRRDDRRDDRGGGGKGKGGKGERFGGDNRGDDISNGGNRHLTAREIFMRHQQEKGGRDDRRDDRRDDRGGGGKGKGGKGERFGGDNRGDDISNGGNRHLTAREIFMKLAFLTLSFKHNRSEKEPAPFFAGVLTAIPVAQTYLLAALASHLLAPSRDVSSGQAYTSHLAVLVDESGPVLTQLGACVRGLMKLKAPDSEPEEIRSIHRLPYLGWAVSAPMAAHELLARLESQPSFAELHVDASLSRKDLLEQVAGAPKSRQLRLWLDNGVFQSATELAELLQACYEHLGAVARREKLPIFEDMSVLPNLGAGSGRAPPCQFRGEKFDHVVLGGTFDRLHVGHKVLLTVAAVMAQRGLAIGVSGPPLLREKAGASILQDWGERAATVVDFLAVLRPDLQVRVEELEDAFGPALWPEMGALVVSAETEAGGAAVNARRQEKNSPQLHVVAVPLVASAGGKVSSTTARELDSLAAAIEACWAMVPEAGRARRWLPLLLALARQAVQGERDLAQSLTALGAAKASGPSARWAAAARCLELAPPGLGLLQALAADLGWDESTVTRIRHELGADVPSRLQKLSFLKFLGLALPTALRADPDLSAGRVEELCRLAVEKKLDLQLRPTAEASLASGAAPEERQLLASLTSEGSVPAAVWVCNGRRIDLQDTGPPISARHVHALELLEGQYDIAKPEQGDPEDEEEPAAGKEPDQTRALSDWLASDEQSAALPASAYGLVAALRSEVLSHAKHDRFTQPAKIFNRAPAAFQVKIPPAKPDAASPITVYGILDPLSTTAQSASTALALFGMAFNAEVNLVLNPALKLSEYPLKRYYREVVRWPQHLADGRTLAELKDGVAVGGGRAEFTLATEHTLTAAVHVLPTWLVTAQEAEHDMDNLRPVDVLQRGSNCDTTYVLRQLYVEGQAMILGDEGWPVAMAKGMQFEITGTGALEASDDTIVMGNLGYFQVRGNPGFYQASLKPGLSNETFQLAVSEDLEAVGKGGYPSNGAARVALVFRSR

SEQ ID NO: 3662 - protein, 501 aa, Cryomyces minteri
MRVGLWSIGPEALLLLSALQPFHASAGPEVDVALKASFNSAPYLVELLETAAEENSTAYFPLLDHIADGYFDHASTDESLYNTFMRVLQDDGHLTTPEALSSFQLALSIHSAAPRIEAHYQFYRTSAEPSSEKSEQGECDTWVSFDGKQYCSPELDSAKGLIQDQKKVKLPFDRVLGASPGKVEFILYADITSTSFRRFHQVISRTAKDGASTYRVRYKPSLGLATKPLLVSGYGVELALKRTDYIVIDDRHAEKGEEGKESEENVAAETALQDDDIADLKPLSSSELLKLDLKAASFVMNSEDRLDVLSKLSQDFPKYSSAIAAYNVSSDFLMEHLANRRIMLPPGYNVIWINGVQVQTRELDAFALLEHLRRERRLVNGVRGLAFSGPEAINILSHSAVAEAQADDEPQRYDFRDVSEGGNVIMWLNDIEKDKRYSDWPVVLNSLLQRTYPGQLPPVRKDVHNLVVPIDFSDYKDVLMVAENLQNFVKRKVPIRFGLVP

SEQ ID NO: 3663 - protein, 644 aa, Odocoileus virginianus
MAGIHHQMLHDVHKTSKNSASPVKLNLRKRGARRNLFGKPRERRVSAAHWRSCCRLRHCPAPPRRCRRCRRGPSAAPGMGWKGDESGACAAAARPVTGACRKMGLLTMLTGLWLFSSVKADSKAITTSLTTKWFSTPLLLEASEFLAEDSQEKFWDFVEASQNVGSSDHHGTDYSYYHAILEAAFQFLSPLQQNLLKFCLSLRSYSATIQAFQQIAADEPPPEGCNSFFSVHGKKTCDFDTLETLLLTASERPKPLLFKGDHRYPSSNPESSAVIFYSEIGSEEFYNFHRQLVSKSNAGKINYIFRHYVSNSRKEPVYLSGYGVELAIKSTEYKAKDDTQVKGTEVNTTVIGESDPIDEVQGFLFGKLRDLHPDLKGQLKELRKHLVESTNEMAPLKVWQLQDLSFQTAARILAAPIELALVIMKDLSQNFPTKARAITKTAVSSELRAEVEENQKYFKGTLGLQPGDSALFINGLHIDLETQDIFRSLDFIQKYFKGTLGLQPGDSALFINGLHIDLETQDIFSLFDILRNEARVMEGLHRLGIEGLSLHNVLKLNIQPSEADYAVDIRSPAISWINNLEVDSRYNSWPSSLQELLRPTFPGVIRQIRKNLHNMVFIVDPTHESTAELINTAEMFLSNHIPLR

SEQ ID NO: 3664 - protein, 576 aa, Mesitornis unicolor
MKEETVGWQEDGCIDTAIEFVAIQKAGATFYKKSGLGPLPQALFNGVPFNREEMDAAELETVILQRIIDATRFFQRAVFMGLLNDHMNAMDFLMDQHNVVSRINPTVLGAERRYIHFRSTSVPFDAEDFSTFSFLDSQDKSAVISDNMKYLTKKDEDALYAVTIWIIADFDKPSGRRLLSNALKHLKTSSHTRLGILSNPSSKIKEDNTAIARGILAAFLTQNNSNLKSFLSKLSKEETAKSLAAGTKIVKFLVPGMDDDTFEKKYNTLGVDLIKTHQMFCQEVLKLLPGQMAVVSNGRILGPLFYAEDFNLLEKITYSTSAEKIKAIVKEMGNSSKSGSDLIMKIDALLSSLPKTEIRQDAELLKEQYSVVKVGPQQNEPFYDVIAIVDPLTREAQKMVHLLIVLKDVINMKLRLFLNCRSKLSEVPLKSFYRFVLEPELTYGINKRLPSEPMAKFTELPESPLLTLNMITPESWLVEAVNSSCDLDNIHLQDMKGTVVAEYELEYILLEGHCFDVTTGQPPRGLQFTLGTKSNPVMVDTIVMANLGYFQLKANPGAWTLRLRKGRSEDIYQVFS

SEQ ID NO: 3665 - protein, 1130 aa, Thermomyces dupontii
  MOD_RES (121)..(121): Any amino acid
  MOD_RES (124)..(124): Any amino acid
  MOD_RES (182)..(182): Any amino acid
  MOD_RES (223)..(223): Any amino acid
  MOD_RES (271)..(271): Any amino acid
  MOD_RES (458)..(458): Any amino acid
  MOD_RES (498)..(498): Any amino acid
  MOD_RES (505)..(506): Any amino acid
  MOD_RES (556)..(556): Any amino acid
  MOD_RES (594)..(594): Any amino acid
  MOD_RES (635)..(635): Any amino acid
  MOD_RES (674)..(674): Any amino acid
  MOD_RES (820)..(820): Any amino acid
  MOD_RES (972)..(972): Any amino acid
  MOD_RES (1048)..(1048): Any amino acid
  MOD_RES (1084)..(1084): Any amino acid
GSDSSVNVALQASFDAGPYLLELLEAAAAENASSYFPLLDRIAEGVLDDAVTEKELYDRFLTIVQDEGHINDAADLSSFKFSLAIRSAVPRVEAHYQYYNTSVEPRLGTAQDAACPVWVHXDGXQYCSPTLERAQQAVSADLEARDLPFDRKLGDPTAPLAILYADVASPAFGEYHRKLSAXAKEGQVSYVVRYRPPPSASFRPLFLAGYGVELTLKRTDYIXIDDREAEESNEKQTNKRKVGSPSADELEEESPPDLKPLSSSEVARLGXNAASFILDSPDPFATLTKLSQDFPKYSSAVAAYNVTQEFLDEYYANRAASLPGGRNVLWINGLQIDSRQVDAYSLLEHLRHERQFIGQFRKLGLSNIEALDLLLHPNLTDGQSDAETQRYDWRDEVEGGDVIIWLNDLTKDKRYSDFPSDIDALLQPTYPGQLPAVRRDVHNVVIPIDLTNEDDVYXVVQHIQTFIKRLIPVRFGLVPLVHSEPAKSQAKIARYLQXTHGLAAXXKYFQRALEKDKLARPDQALFDETIASARVLRGKAQSFEEALSSTTLEEVXDKTGRYIKRLDLGGRSPPVLANGVLLGRGDNFLQELSXRVAIDLQLIQQSIVQDAVEEDTWLPSYFLSQAALTRNELIXPQDPSKIRIVNLVQVAESHDLTSLLRISAEGPGTNSLLXAVVGDFDSEAGLNLLISALKFRLAHPEIEVVPLHTSDDETNTHVSSQLYQLLRTERVDASEILEKIQIIKSTSDIGATATSKELAYWAQTKQLAADLGYPSGTRGVLLNGRAVGPVPSTSTLAEDDLEILLAYEFSKRLGTVAKVXKDLNLGHKVAGSVEFAKLTSLVALSTTSDIPEGIFESRSKYRQSAIKTWNGAHSAITVSHSDDASINIVATIDPASERSQRWVPILRTLSKLNGVNVKIFLTPVRILQELPIKRFYRHVLEPEPSFDEHGALNRPGASFSRLPEDALLTLGXDVPPSWLVSPKESVHDLDNIRLSSLREGSDVDAIYELEHILIEGHSTDVTTRSAPRGVQLLLGTDKNPHFADTIVXANLGYFQFKARPGFWKINLKPGPSQRIFNLDSVGGXGYQPKPGDETNEVALTSFQGRTLFPRLSRKPGHEEDDVLETGPKPG

SEQ ID NO: 3666 - protein, 471 aa, Ustilaginoidea virens
MLLLPTSWLLIAFWAIAKHASAAPAVRIGLTAAFDGGPYLLELVETAAGENSSAYFPLMDRIASGYFTTASTDVELYQSFLQVLQDDGHITTPQALSTFNLALSLRSATPRIEAHYQHYVAAVEPFIELKNCATWILLNGKQHCRWDLGTIVKDRSLSSVVKSLPFDRTLGVGREAILYADPTSVEFRTSHQTLSQAARDMKLKYRIRYRSSGAHVREPLSMSGYGVELALKKTDYIVIDDRQEGNGDGKGCFRSEDVLDGESETFDLKPLSSSELAGLGIKAASFIQKSEEPFKKLVKMTQDFPKYAAFLATQNISHHSLSAYQQNLAEKVQGGINFLWINGAQLIDRQIEPFALIDKLRTERKLVDGIRDLGFDADQAVALLGHKALSSAKADEEPLRYDWTDRQEKGRAIIWLNDLEKDDRYSSYPKSLSSVRLPPDILSRFILTAIDSSYNGHFPVKFLRLEGIYSM

SEQ ID NO: 3667 - protein, 1164 aa, Rhizopus stolonifer
MHSWTQQQVYDKAVERVSFLDKDGIDLFKLSLSLHEAAPRIEAYNQYYHQAVVPSLTQYDDQCDVWVQIDNKQICSLQALIDAVKHVENPAAVDLLPFDHIIRPVKKDTTQEATLVLYTDTFSPKFKEFYTWLKSIAEEREIFFVIRYRPSTTNSIRNSLYLSGYGVEMALKKTDYLVIDDRDVQDDKSKSGIKEKISSIGKKLNHVLFDASEKATIEPLISSEIETLGLKAAQYIAKSSDPLETMSHLAQDFPKYAKSISDVVVDEEFKQEILKNHQMSFQGGSSAVWLNGKALEMSQVDPFHISRVLRSEKKLIKSIQQLGFSSKEAIELISDSVLSGGDDAKDTVSDVFDVRDTPEAPFITWWNDLEEDSRYDGWPSDIMEILKPTYPGQLHPIRKNIYNLILVEDLASQDSLSRITNEIRTMIKRTIPIRFALVSFFSEDNSVSALAAQALHHINQNIDKDTGMDFLETMLDLMVSNGLTRATDEVVEIAFNHILSSSNDLEQKLSLGEVNELHKPFTDATRSFITRMGIKEHNPKEGAMFFNGKLLEYSEEKPWAHTLMPHLNEQTRVVQTMAYNNEINTEFDFYNHVLSQPNVATKRNPFIQSSHINPLRIKVFDTTSTLKELRYFQSDENIIPSTNLWIISDFNTFNGLKLALEAVLFAEFNPKTRIALVHKSYTTDQQVIENKIGPKFSDVLCKLIYSDETTLATLKEILQHTNIIPETENDNDVLPGEITTQSNNEFEPIPILPGTPVVEIDAREQSKRWSVIDKALQEDGLETDFFGIVINGRIIGPLSSEDNLQFTKQDFDMLFEYEKTNRISLIEQTILHREKVLPKETTADVIMKLTAIVENDKAQVIQDVMEDHLPVNRNRVYENTVATNYTKIVINERSDNTFLEIGLIINPLNEMAQKLAPIVQTLSKLEGVSVVIHLNPISELEELPLKRFYRYVFDKEPHFDSQSGEQQIPTAYFANLPMEPLYTLGVETTNSWHVTVKEANMDLDNILLSSISEDQPTVSAVYELQSILVEGHCIDSLTKSPPRGLQFELASHSGTDKGDTLVMANLGYFQLKALPGVWSLGLREGRSSMIYSIQDVGANGKWNWNADGAGLQSDVLALTSFEGMTITPLVRKKPGMEREDVLEPAQPKENENSKTGLWSSINQK

SEQ ID NO: 3668 - protein, 276 aa, Piromyces sp.
MKYWNIFSIFIYILIVLNVKCENSKKDSPPVKISLQTPWDNTPLILEAIEFISKEKPSAYFSLLSKVSKEENFPKTTFGQYQYIMKLPEVAELEIESLLKLSLSLRSEAPLIQSHYHYYNASVIPSHKVNSNFDTTCQNWLDWYGSQFCDLEKFKNVAQISLVDGKYSMKESGKKSPIPIPTDHVKKPNSGKENGLVIFYGDILSKDFDKFLTELLKMNEEAGLSFIVRYKKSLDKQYNNNPITISGYGVEMAIKNTEYKVIDDRKLKKNGTNLLL

SEQ ID NO: 3669 - protein, 209 aa, Ensete ventricosum
MQSSLVDLPLKSYYRFVVPSLDDFSNVDYSVNGPKAFFSNMPLSKTLTMNLDVPEPWLVEPVVAMYVACRHDLDNILLENLGDLRTLQAVFELEALLLTGLALILGTKRGSHLVDTLVMANLGYWQMKVSPGVWYLQLAPGRSADLYALKDSGDGSPGNRSTKLITINDLRGRLVHLEVAKKRGKEHEELLNASDDQLLEKRKVCGLNT

SEQ ID NO: 3670 - protein, 269 aa, Emiliania huxleyi
MLAVAALSRGAQAAAAAGGALELTAVLDPLSKEAQRAAPPPLGLSVTLHLNPSLQIDKFPLESFYRYVVSLEPSFDNAGRSLSPQLDRALFSSLRTPQVLTLHVDAPEAWLLECTEAAYDMDNLRLAELGERRRPSRRRDGDRRTVSAVYELASLLITGSCEDVGSRHPPNGLQLLLGTTAQPHATDTLVMRRRTGEPRRRPSVGWTVFTLRTAPALLAAGHSTRAFRGGMQRIDPATLTDAAAVRVTMADFTGANILLLAQKRPGLES

SEQ ID NO: 3671 - protein, 1215 aa, Rhizoctonia solani
  MOD_RES (176)..(183): Any amino acid
MRSLSALGTLGVAASLAAAESAFSPPVKVSLTTSWAAPPLLLEIIETAAAEHPGRYFEILDALADRSSAGFLGPITDPFHKPQYVYSTALALLQARGFLIEPNALSAFEKNMALHSATPKIQAFYQLFGDSSKAPDCESWIEWSGKQACTPEEASKILAETSSGSHIQTFPFDHIXXXXXXXXALRATLSSQNFHGLHLYLRSKSETSGFCYVLRYAPPKDAVIAGEHSRNTLSGYGVALDLKKMDYLALDDRGLREKGGINDDTTEESAQWEDYVSSLLSEHPHEDLDLTTPLTEEEISSLPLRATHLVMSSEDPLKALSHLSQNFPKHAVSVARRWDPGRTEDLKAKHESVEAEVQANLHMVAGAGNMVWLNGVALPETDMNPFGLLRLLRREHQTVSSLLKANLNSEQAIHVLTDPAIGKASTASGPTDGVFDASDREEGGGAIVWLNDIEKDQRYARWPTSLTVLFRQLYPGQFPTIRRNFLNVIATLDLSRTSSISFIAQLANNLVSRMLPFRFGYVPLTETAESRQVARLMKWMIDAYGLEKASQYFSMALTPEDTVNFKALEGAYLQFTAQIPPPSGIVPDFSTFAADPLQIQVVGHEFVPDEELQPAAAYAKRLRLGAQDGAGKGHVFINGKHLAYDDNFLRHLQTEMGAQINFLQEQLYTGALADAPETDISVFMYDLPTTAKRRNKFIYPSGNMKIYALDNLFDSVGATKQLKDSFIYPAGENPTPLTIWIIGDMDNGETLTLATEGLRGMSDDAKYRLGFIHTPSVDPSNVPSTQQPLVPPMLARLAATGNYAEFPPSELAQILEEAKQLVVDAAELNIQDNPVLLNLNNRLTGITNEGVDLEELKSTNAASNALAKAVGLKSGERAIIINGRVIGPLAGSDFVAEDFGALVNYEAAKRVTPVVAALTTVREDLAELDRPTYADLVAQVSSITSSVSVPDPSEEGLFQSKSLARQRPYNELNGKDCTFEIGDNSTALFHVGLLLDPLSESAQKWTSIVEWLATVPQTYIHVRLNPAITLTEMPLKRFYRYNIQSRLAFDQDGFESRKPVEFHGLPVEPIYTLAMDVNPAWLVRPYISEVDLDNIHLASLSDPKAGVDAIFHLDHLVIEGHAREENNAPPRGVQLQLASLDGTPTADTQVVANLGYFQFRTGPGAFRLEIRPGRGCDVYTIESAGNEGWNSGHVNITGTEITLTSFEGHTIYPRL

SEQ ID NO: 3672 - protein, 268 aa, Piptocephalis cylindrospora
MLISPTLALTGWLFLLGLPGGSGTGTTPVHTSLRASWPTPDILLEIGEFIHQEHAPSYYPYLSAISPHLAEATTQEERYRLALDLIQSKHLLPSFSPTLRSLLSLSLSLHTVSPAIEARLQQYRLLEASRPLRVAQCDSWVEWSGGEGKVACDLDSLSSILDNLPSHSDSSSPILLSTDRVYVATGAQEGKEAKAHPPLFILYSSLSSSSFPSFHEALMKMADTGAIRYTLRYKPSLTTSPSPRMPMAGYGVELALKNLEYLVVDDRG

SEQ ID NO: 3673 - protein, 226 aa, Cryptococcus neoformans
MSSNDSLKALTHLSQDFPKYSAALARTVEVPENILAKGRSIAVRGQGTQAIYINGKPFGTDLNAYSLLKTLREERQLTFALTSLGLTPAQAVTLISDPDIGSAQVGEDVGEGFVDASDRTEGGDVVVWWNDIEKDHQYRNWPSHLQGYLRPLYPGQFHTVRRNAFNLIFTLDISQISSLEIIAGSLAQMVQRGIPIRFGIVPVFEPGTNDLCECHEREIWDHADDR

SEQ ID NO: 3674 - protein, 499 aa, Diversispora epigaea
MAKNILECSTIRNLWQLVEEFLKQGLFSSKLTNYEIYKSALDIIEKKKFLYTPTTKSLFEFGLSLHKTAPTIQSYYHYYNSTIIPTRNSSSEEFNPDRDVWVDWYGNQACNAESLTKFIDTKLDISNPTPNLLSFDHIRKSKIYPPKDNQESLYLSGYGVELALKNTDYIVIDDRKVEAETDNVDKEKESINDSEASNDHLFDQNISEIKPLKAGEIKSLGVKTAQVILESQDPLKTLTQLSQDFPKYSHYISQVPLSYPLGKEIEMNQEHSHLESNLFWLNGLVMNPLSVDPFSLLKLLFRERQTISSFLNLSLNPGQAIGVLSLPIISEAQSLQDSSRGVFDVHDISPNSNVIVWLNDIEKDSRYSSWPNRIHDLLRPAYPGQLRMIRKNIFSILFILDFLSPDNLDIITDQVKTFISRNIPLRFGLIPLFSKDQPDAIAISRIFYYIVDQFDSSIVMKFFEMISEIRKSSKIEFLKIFEQEFNPRMRNWLIHLKKS

SEQ ID NO: 3675 - protein, 201 aa, Ancylostoma ceylanicum
MAMIYFASFVREVLGASSGQRAFVANGLVVGPFDDEEEVIDSDVELVERIVETQGAGVIASHIDKWDVKKEDGYSSDVVMRSFALVSKFAVSRKRTWIVVGEDEHSTVTLVAEDSNRPVLDVVAVVDPLTRSAQKLAPILDVLRKTVNCDLKIVLNPKPKLSEMPLKRYYRYVVAPELQFDKAGKVAANQARYLFSFFNWI

SEQ ID NO: 3676 - protein, 476 aa, Trichoderma harzianum
MNAAFPAGPYLLELLETAAAENSSAYFPLLDRIAAGSFASASTDAALYSEVLNVLQQEGSISSSEALSTFKLALSLRSAAPRIEAHYQHYTTAVAPAVDDSECVNWVLLEGNQYCTPELDKVNRDGLLSLQAKHLPFDRTLGTGKEAILYADPTSSTFGEFHKALSKAAREDSLSYRIRYRRTEATHAAALPMSGYGVELALKRTDYIVIDDRVHDDAAHPESPISSTNLDDSEDVADIKPLATSDLSSLGMKAASFILQSDEPLGTLIKLTQDLPKFLTSVVAQNVSTQFEEEFQNNGIKGVPDGVNALFVNGVQVNERQIDPFALIDRLRQERKLIDGFRTLGLSGKQAVSILGHQAVSMAKGSNEPQRYDWTDRLEDGRVLIWLNDLENDEAYEDYPKTLAAVGHKRMHGERPKANVTSCYEEHIPDNSPLLQKMSSLLWRLSIFQTQKTYRSLRNYYHSFHVALLSDLVSFL

SEQ ID NO: 3677 - protein, 821 aa, Paxillus involutus
MDYLVLDDRDQHQGDSAAHDTSSGDNVEDADKRPSSEEIISCVFDSLPYIDEEAEARARTGEPLSSEEIANLGLKAIQFMMSFSSRPQAGPLYIHQCWDNHHQVPFPAVDLFSTLSTSFPLYATSLARKIKVLDELRDEVHENWAKAAPGVNMVWVNGRVINENEGSAGSIFGLLRTLQRERGLVKSLVDLGLTSSQAIELLMYPAHSATQNPSIPLETPRKGTTRGSAKAFVVQDDGVEIAEKKTFAISPKFTEFLDGLIDASDRQEGGGVVLYWNDLEEDQRYAAFSPSLQGLLRVHTMSLFSPMLRIRLNLVNVIFVLDLSETRSLSLLGSLSETFVARGFPVRWGFIPDFQGDSLKMARLVYYLKQKYGRDRMMAFIQGISHTHAERRLSSLSWQIVHETFNTLSAGDDFAAIARGDVPIIHEATGEDVLVRAQRYARRLGVGLQGATGKGHAFVNGRYFPVDDNLFRQMSTEVMAQLQILQEMVYTGEIMDTDASLMSTFFYDLPSTFSRRNPYIFVKSAPGGGHLLDAMGLRMFNLPELFSKAGFEEKDGSFILPSDSDALPITMYVIADFDSPEGLELAKEALRFVTNSVRTRVTFIHGPGEMTTGVVSTFISTLVHSGRLSEVPPSRMLEVLADRLDEQLGAFKDELMAGKQLTNAKLFRILQTNRLVARELGLKPGQRCILVNGRLVGPFESGSDFDAEDFEMLEGFEIKQRVGRVMEAIDAVLDGGDALDVFRRAHLVSMASSIIYADQQPDPSEAGLFDSAPKPRTQNYRSLSAGYTWVSHSVTLQRVHASRLAHPFSPCQVSERAEGIK

SEQ ID NO: 3678 - protein, 285 aa, Gymnopilus dilepis
MKLAFTLLGAATAVLQASAGTSPPVRAALRSSWPAPPFLAEILMLLTTENRETVALEHPNGFFTYLEALTAPSSHISPSLSPEALHQAALQAAADNGLLNEPGSLEMVQMQLAMHAAAPKLEAFYNYYADQHNGSSGTQCGSWVDWYGEVVCDVEALAQLAGKEAIDAPDAPPPQPRPQILTFDHIFPPPQDILDRPPRTAILYASLTSKNFRELHTYLLKLTNRPDSHVEYVFRHIPPPSASENKEKNYLSGYGVALDLKKTDYLAVDDRQLGRFDSYFWTALC

SEQ ID NO: 3679 - protein, 612 aa, Beauveria bassiana
MSRNITALPFDRSIGAGKHVVLYVDPASPHFRKFHAPLRIAAEAGEYNYRVRYRRPINASNKALHVSGFGVELALKRTDYIVIDDRASQSDAKAQKPLDTEAIFEEQELTDLRPLSTSELATLGMKSSSFIQSSKTPFETLVKLMQDFPKFSASISAHNVSANFSEEYQRGHIQRVPRGINALWMNGLQLIERQIEPFALVEMLRDERKLIDAVRNLGLNGDEAISLLGHESIAATQSDAGGTMRFDWTDKPEDGQAIIWLNDLENDDRYDQYPDDLSSLLQRTFPGQFPPIARNIFNVVTAIDPSDADDLTILGQLMALIGRGIPIRFGIVPAASSPASSNLAKIVYHLIRTYGFESLRNYIESVGQEPNAALGEAKFSQIINGLTPVAGNHPLKFLEVMENNDFNSQLEMAGRWISRLKATDKSSPIFFVNGVSTPRVANWLQRMSMQVSEDLQTIQRGIYHGVISDDVWVPGIFLEGALLRRNEYVSIDDAHPLRVLDVSKLYGDHKDLFGIIPVRNCDPQTERESWAAVTVITDAMTSRGVQLLISALKFKQSRPGVRLDIIHNPATTERASDLNKSSRAEASLLGLGMSEECERRRRVPRPVHMPLP

SEQ ID NO: 3680 - protein, 335 aa, Punica granatum
MKTPLRSGFCLVIVLVCLGLLVGVHGETRRPKNVQAAVRAKWSGTPLLLEAGELLSREWKDLFWEFVEVWIQNEEDHTGSYTARDCLKKILSHANSLLSDSLAPLFEFSLYLRSASPRVVLYRQLAEDSLSSYPDAEEISSGDYGPGVTGKFDNTESRKVDSLLVGKNPESPRGKCCWVDTGASLFFDVADLKSWLHGHSKHDGDVAGQPELFDFDHLYFDANIASPVAILYGALGTSCFKEFHLTLAEAAKKGKVRYVVRPVLPTGCETKAGVCGAIGAGDPVNLGGYGVELALKNMEYKAMDDTTVKKGITLEDPRTEDLSQEVRGFIFSKIL

SEQ ID NO: 3681 - protein, 242 aa, Lithobates catesbeianus
MEHKRKKQHNVLTRSMMIGESSVIERPRPYLYKGDHVFPTLTKTAPVVILYAEVGTKAFATFHKTLIEKAESGEITYVLRHYIQTPSSRKINLSGYGVELAIKDTEYKAMDDTQAAVTNSTTSSYEGIDEDVQGFYFDKLIQMYPDLKNNLVEFRKHLIESTNEMLPLKVWELQGTFFLIFSNITGHLTSFYILTLLCCYLPNLKLPCKVTYQLLSLCLLAVHYIFYTVPSFTMHQRELTAL

SEQ ID NO: 3682 - protein, 268 aa, Paroedura picta
MAVLVPALLAGALLLSVAPRAIQGSPRKRVAARLAAKGPATPLLLEASEFIAEESNQQFWQFLETVKELSIYKESADEPPPKGCAAFVVIHGKSTCKANEIKKFLTKAAARPKPYLFKGDHKFPTLSETGPVVILYAEMGTKDFAKFHNVLSEKAQKEEIIYVLRHFVQKPSSKKMYLSGYGVELAIKSTEYKAVDDSQAKAASNVTEEEENKESDVQGFLFDTLKQNYPDLKDNLTELRKYLVESTDDMEPLKVWELQGGYSEDESP

SEQ ID NO: 3683 - protein, 211 aa, Apostichopus japonicus
MHALLTALITFRSALERHPSLASELGQFKQSLLDASDAMAPLKVWQLQSIAFQAAQRVLLAPEADRLKVLQDISQNFPLLAHSLVRTQVKPEFRNEIQKNQREFAMNYGLDPGDCMVIINGLVIDADIADPFMLFDLLQSEGQLMEGLHALGLHGNALNQALKTKIAKSEGDFALDIRDNAVLYVNDLETDPQYRGGNRTSKNYCVPSFLE

SEQ ID NO: 3684 - protein, 234 aa, Coniophora puteana
MLCVPGYRPSVRGFGNVNTRDLNCSPPPPLALPLFRPSIAFLDGGALSSEMTLSGLYAAAPRLAVGAQRHEERFQQEASGRFAGKRCTSWIDWYGEVLCDAEELKEKGSSSPGNSDYAAFKPLPFECAHAIPPSLNEPPFKIVLYADHMADSFAPIHAALLLLEPGVEYALLWARTARSGEGKGSLTDGYGVALDLKKTGYLVIGDRAHRSDDAASSTGNEDAGGNNNPHKSLP

SEQ ID NO: 3685 - protein, 346 aa, Drosophila persimilis
MLRLLCVFVLLQSAAPILANAESSQSYPITTLINAKWTQTPLYLEIAEYLADEQAGLFWDYVRGVTKLDTALNEYDTESQMYNAALETGSRLIENNTRTVVLYADLGSAQFRSYHKLLEQEANNGKIRYILRHHLAKKEKQPVRLSGYGVELHLKSTEYKSQDDAPKPEAGSTLDEDLDNESDVHGFDFKVLKNKHPTLKRALDQLRQRLLQGNDEIAQLKAWEFQDLGLQATAAIAEIQGDETLQILQYTAHNFPMLARTLLAHKVTETLRAEVKHNTDTFGRSLNVAPPDGALFINGLFFDADTMDLYSMGGEPCASEMRVLESLHSNNVRGRAWPSSLLAPGS

SEQ ID NO: 3686 - protein, 414 aa, Poeciliopsis prolifica
SEFLAEESQDKFWDFVEANQNIEGEHDDTDQAYYELIVKKASALLSSVQLNMLKFALSLRAYSATVHSFQQIASIEHPPSGCSVFISVHGEKSCSPESLATLLKTAMERPKPYLFKGDHRYPGSNPDTPVIILYAELGTPDFQKFHQILTSKVNEGSAAYVLRHYVAKPNENKVYLSGYGVELAIKNQEYKAKDDTQVQGAEVNATVIGENDPVDEVQGFLFGKLKTLYPELKEQLKELRKHLVESTNEMAPLKVWQMQDLSFQTAARILAAPAVDALNVMKDLSQNFPTKARSITKTVVKSEIRKEIEENQKFFKGTLGLQPGDSALFINGLHIDLDTQDIFSVLDVLRSEARVMEGLRSLLIETPYIHDILKLNVQPSDSDYAVDIRNPAICWINNLETDHRYSSWPYNVPP

SEQ ID NO: 3687 - protein, 280 aa, Ancylostoma duodenale
MASNERELLSTDHIYGKETSPKRIVIVYGDIGSKEWLQLHTKASELASLHRVQYVLRHYVNDRANPNPLSLSGYGVELAIKNMEYKAVDDSNVKKDSVEPDLHGFNFKLLKELHPDASDSLDAFRMHLKEIEELAPLKQWQASQRIVSEGAYNAIETLKELSQNFPTHARSIARETVSTELREAIELNQKEHLSDTGLDPGESMLFLNGISLDVDSMDMFQLLDIIKQEERISSGFLNMGLKREYLSILSGLEFADEKTKYAVDYRDAYPMASLFSLMFL

SEQ ID NO: 3688 - protein, 207 aa, Poeciliopsis prolifica
SEFLAEESQDKFWDFVEANQNIEGEHDDTDQAYYELIVKKASALLSSVQLNMLKFALSLRAYSATVHSFQQIASIEHPPSGCSVFISVHGEKSCSPESLATLLKTAMERPKPYLFKGDHRYPGSNPDTPVIILYAELGTPDFQKFHQILTSKVNEGSAAYVLRHYVAKPNENKVYLSGYGVELAIKNQEYKAKDDTQVQGLYSLRNS

SEQ ID NO: 3689 - protein, 534 aa, Sphaerobolus stellatus
MRVINLHSLGVLGAALSLAWLGNASPPVKVRLRSSWPAPNILLEILETAAVEQDAAFFQILDTLTAPESFSKSSASLTNAKVYETAIDTLLKHGYLSEPGALDTFELSLALHTASPNIEAYYEFYGDNALSETPLSEGEEPERCTGSWVDWYGRRVCSVETLRRLVGVADEDSASEFQNVKLLSFDHVYPPASGSLNPPPRTAILYGNLTSPNFRSLHDYLYKLAMETPSRIQYVFRHIPPENAQAEPSYLSGYGVTMDLKKMDYLALDDRKTGREGGSSSSSNNAKTEEVEQAYSVLDVLGVDDTVDLLTALTEEEIANISIQATQLILQSPEPLKALTDLSQNFPKYATSLARRVTVDEELHKELQGNHHKVQDGFTAVWLNGLVLQNTDVSVFGLLRLLRKEREIIGHLKALGLSAPQAIEFLTHDVLISSQAGNPITEGLFDASDRREGGDTIVWWNDIEKDTRYSRWSPSLQTLLQPTWPGQMPSLKRNAFNTILVVDFSERTSLAWNAGPIATIIQRAFPWRFGVVPI

SEQ ID NO: 3690 - protein, 209 aa, Merops nubicus
MANSFLFLNSEFIAEDGNEKFWQFLETVRELTVYKQGDSEYSYYNLILKKAGQFLSNLQVNLLKFALSIRAYSPTIQMFQQIAADEPPPEGCSVFVVIHGKHTCKTNEIKKLLKKATKRPRPYLFKGDHKFPALKEDGPVVILYAEMGTKDFVRFHKILSEKAQREEIVYVLRHYIQKPSPRKMYLSGYGVELAIKSTEYKAVDDTQIK

SEQ ID NO: 3691 - protein, 246 aa, Fulmarus glacialis
MFQQIAADEPPPEGCSAFVVIHEKHTCKTNEIKKLLKKATKRPRPYLFKGDHKFPTLREDGPVVVLYAEMGTKDFVKFHKILSEKAQKEEIVYVLRHYVQKPSSRKMYLSGYGVELAIKSTEYKAVDDTQVKGANETKEEEEEEEEESDVQGFLFGKLKQMHPDLKNNLREFKKHLIETTNNMEPLKVWELQDLSFQAAARIMSTPVYDALKVMKDIAQNFPIRARSLTRVPVDKKMRNEIEENQK

SEQ ID NO: 3692 - protein, 407 aa, Nematostella vectensis
YNSILQHARKLLSSNGLSLLQFSLSMRYYSPKIELFNKVSKEVSGISECSSFVQIGEKVTCNTEEAEHLITSAEKVSAPDSYPFDHHYTDSDSNDITVILHGLIGTSDFNAFHDMLVAKAIAGKVHYILRHYVQKPLEKKVRLSGYGVELAVKKTEYKAVDDTKVKEDSSHSKITSKKEDDDEVEGFLFGKLKKLHPHLTEQLNQFRSHLKDNFREMAPLKVWQLQDLSFQAAQRVVSSDPRSALKVLRDLSQNVPKLARSLVKTKVKPELRKEVLQNQKLLLKVGVDVGDSALFINGRMVDIDDLNAFELLDILREEWTVLDKLASLGAKGEPLTALSVMSLSEERDSYVLDTRDDSVVFVNDLENDRHYASWPSHIQEILRPTFPGMLRYIARNIFHVVMFVDPV

SEQ ID NO: 3693 - protein, 304 aa, Mesitornis unicolor
MQLPPTERADQTQRHKGNLLGKGEGLTKVTGMPQRYQRNSPSLTTEFIAEDGNEKFWQFLETVRELTVYKQGDLEHSYYNLILKKAGQFLTNLQINLLKFALSIRAYSPVVQMFQQIAADEPPPEGCSAFVVIHEKHTCKTNEIKKLLKKATKRPRPYLFKGDHKFPALKEDGPVVILYAEMGTKDFAQFHKILSEKAQKEEIVYVLRHYVQKPGSRKMYLSGYGVELAIKSTEYKAVDDTQVKANDTKEEGDDDDDEESDVQGFLFGKLKQMHPHLKNNLEEFKKHLIETTNNMEPLKVWELQ

SEQ ID NO: 3694 - protein, 1513 aa, Rachicladosporium sp.
MAPTWIWGLGLVLGVAAVPSVNVALHASFGAPPYLVELLETAAEENVTSYFPLLDRIAEGHFDAAKNDEELYKRFRQTLQDHGHLSRPEDLCSFDLAMSLHSTAPRIEAHYQHFQTAARADAEHEVDCEAFIDVPYSAYRFCSPTLDREKAIYMGGAGQDARALPIDRVLGSAEAKSSILYADITSTAFRKFHGTLSKLVKDGKSTYTLRHKPRKGATPKPLAVSGYGVELALKRTDYIVIDDRKDDASAEESAAQSAETTLKEEELSDLRPLSSSELRRLGLKAGSFVMGSEDPFETLLKLSQDFPKHSSSIAGTNVLEDFLSEHYRNSEQMPPGYNVLWINGVQIMARDVDAYALLEHLRRERKMVNSVRELGLTGPEAIDLLTHEAITAAQTDTDVQRYDWRDEIEGGNVIMWLNDIEKDKRYEEWPETNTALLQRVYPGQLPSVRKDIHNLIIPIDFADFTDLGLIVESIQNFVKRKVPIRFGLVPVVKSPASAEQAKVVYHLFDTYGIAAALSYLEQSFEGSGRKHSLPVEKYFAAAIEERRTRKGRSIQSLAEVSEDTEAALRISATQAYLVRLGGGSGPASILINGVPIARSDEWLQVMSQRVAADLRVLQQAVYEETVGEEDHLPDLFLAQATARRNIRMVPEDDKTVRHIDIGDLPFNALKPTLPSSPDTIESELVHLTLVLDLQATGSLQLIAEAAAFRDEHDNVEISIIRIVGDGQDERQSLSAHGVELSSEMIKEIRDHKKPTSGQAAVGETASEGSIPDPDMKYGSLSSIPNGLPANDIAEAIGMTAGQKAVVLNGRIVGPMNASVPVTVDDFEALLSHERKKRLLPASAAIKALGLSAKASTPLAFAKISNLIALSLVSDIPEGIFEAAPTVRSAVYKKWTLDHTAIKVGSAETATIQIIASIDPASETAQRWVPIIKVLSELEGVYTAIYINPKDRIEDLPIKRFYRYVLDSKPTFDQTGAVQGQSAHFAGLPAEALLNMAMDLPPSWLVAPKESVHDLDNIKLSAVKTGADIEAVYALEHILIEGHSRDVTLGPPPRGAQLVLGTESEPHFADTIVMANLGYFQFKANPGVYNLTLQKGRSEEIFNIDSAGNQGYTSVSGDTSTEIALISFRGATLFPRLSRNAGKEEEDVLELPKSAVSSLASQADKLLTQAGLSRSGHAASKYLSKAAKLTSGIFSTPETTSLAQQPHADINIFSVASGHLYERMLNIMMLSVMKHTNRTVKFWFIEQFLSPQFKAFLPSLAAEYGFRYEMVTYKWPHWLRAQKEKQREIWGYKILFLDVLFPLDLDKVIFVDADQIVRTDMYELVQHDLKGAPYGFTPMCDSRVEMEGFRFWKQGYWKNFLRGLPYHISALYVVDLKKFRQIAAGDRLRQQYHQLSADPNSLSNLDQDLPNHMQMNLPIHSLPQEWLWCETWCSDESLKDAKTIDLCNNPQTKEPKLERARRQVPEWNVYDEEVAALARRIKGKREGVEVGESIQERLQAEDAERERGKVRDEL

SEQ ID NO: 3695 - protein, 1607 aa, Saitoella complicata
MLIRWAKALAIAAVFGHALAASPPINVELKAYFGSSDLLLEILENVALHNTSAYAHLLDAIIASPVQLSTPAEIYDYAFALIREGGLLDDNQITNVEFNLALRSASPRVEAAREVCRGKKGIWSEGDDVVVTVAGKKSNHDLASDYYAYHSGHIASLILDESDSASQLEPTDRTLGQAVDGKQTAVIHASSILSDTFRKWYEVLRKLNKEGAANIALRYCPGPASAGESVDLSGWGVELALKKTDYIVIDDRSVASADEPSTSEEETFETSDITPIPSSAIPNLALLATHEITHADDPLSRLVELSQNFPMLAPALAQKKVTGLQHTVREVKRLGQELRLPAGHSQFWINGKSVPETEVWGHKLIEMMREEGNVMKSLMKLGLSPAQAREILAHPKFVEAAEEAAPIRFDFRVEADENDNSPIIWLNDLEDRTHEYYGRWTRSVQTLLRPLRPGQIHPIAKNIHTAILPVDLENPADLAILGREIGTYIQRGLPVRWGILPYNHGPITKVWKYLREEVSDAAAWAWVRTIVLEGVKADASLYKQIVQGKPDAKKFDDIVKGCVSSFASAEWMEKLGINHDIDSTSANIVIANGRVVPRDEAWPGRMYGYIQEDVARLMEAIAEGWINDETDVVDYLLQGSFKTRNTRIFPADESGVVNVNQLELEERLSVAGVSPSSLPTIRASEYDGPVCSHTVIYVIADFLSGQGWAHALEAQKFIRTVSEESEGSRALVRLVHNPYPTNPHGSASADWLSALQSLGVELESTDTTASDWKLTSGFVNKLGLKRGQAAVVINGRVIYGDETEILHLVADEDGNWVKQPWFSEEDFDTLYSVELSKRIEPTRDVVDEMGLSHEIVPAISSIIAKTSAPKSASAMFGPQTPDIRGRSYVNVNGTLTTFDTGNMETAMYEIVAVMDPLSQTAQKWSAILKVLSEMKGVYVKVILNPNTKLTELPIKRFYRHVLEARLNFDGNGNIVTPSADFSDIPTDPLLTLGMDVLPAWHVTPKISEHDLDNIRLASLSSSQTARGVEAVYELRYILIDGHARDVTTNTPPRGMQLVLGKEGDLGVEWEQDTMVMANLGYFQFKARPGVWRLGVKEGRSQEVFDIESVGGEDGHDKVVMASLEGRTLFPRVKRKAGMEKEDVLAEPEKSLTQQLTNIVKGWFDRGGNKVSKKKQATINVFSVASGRLYERFLGIMIRSVLDHTEETVKFWFIENFLSPSFKDFLPHLAEEFGFEYELVTYKWPHWLRGQSEKQREIWGYKILFLDVLFPLDLDKIIFVDADQVVRADLKELIDIDLQGAPYGMVPMGDSRAEMEGFRFWKQGWWKSHLRGKPYHISALYVVDLNRFRTLAAGDRLRQQYQTLSADPNSLSNLDQDLPNNMQHQIPIYSLGEEWLWCETWCSDETLRRAKTIDLCNNPLTKEPKLERARRVVGEWVELDERVAEVARKVREGGLNVEKEGHDELQGPAIPMSVKVRARFLVLRASTWRQPRKYPAARKNWEMVVEGFLSGALAGSVFDLIYCVCFETVCGVVYEPRRTLPGTREPLILFRTTHRVSRHLRTHHWGHTSIRLALAKSWAMSQVKVMRVLLCVLCGYEFGCGSGLRGIG

SEQ ID NO: 3696 - protein, 1513 aa, Nannospalax galili
MAQTRAMKALRLILGYSALWLVLFLCNSAAASKAVTVQLAAKWPDTPLLLEASEFMAEESNEKFWQFVETVRELAIYKQTESDYSYYNLILKKAGQFLDNLHINLLKFAFSIRAYSPTVQMFQQIAADEPPPEGCNAFVIIHKKCTCKINEIKRLLKKATSRPSPYLFERDHKLSTKNENLPVIILYAEIGTRAFAEFHRVLFEKAQNGKILYVLRHYIQKPSSRKIYLSGYGVELAIKNTEYKALDDIQIKTVTNTTIEDETEADEVQGFLFGKLKKIYSDLKDNLTIFQKYLIESSKEMMPLKVWELQDLSFRAASQIMSTPIYDAIKLMKDISQNFPIKARSLTRIAVNQLMREEIQENQKDLQNKFEINPGDAHLFINGLLVNMDVYDPFSILDMLKSEGKMMNGLRNLGLNEEDRSKILKLSSPVWDSDYILDIRHSSIMWINDLENDGLYVTWPTSCWEFLKPVLHGTIPSIRRNFHNLVLFIDPAQEYTLDFISLAELFYYNEIPLRIGFVFILNTDNEVDGTKDAGVALWRAFNYIAEKHDVSEAFVSMIHMYQKVKDQNILTVENVKSVLQNKFPYADILDILGTHSKYDGSRKAGTSFYKMTGLGPLPQALYNGEPFDHEEMSTEELKRAVFEKMMDAFIYLQRDVFMGTLNDRLNAVDFLMSKNNVVPRINPSILHAEPQHLNLIPSSVTADIEDFSTFSFLDSQDKSAVIAKNMHYLTQEDDIISTVTLWIIADFDMPSGRKLLLNALKHMKTSVHSRLGIIYNPTSKINEENTVISRGILAAFLTHKNHLLRSFLGKLAKEEIATAIYSGYKIKTLLSTEMDKNAFEKKYNTIGVNIFRTHQLFCQDVLKLQPGEIGVVSNGKFLGPLNEEVYKEDFHLIEKITFSNSVEKIKDIAESMEFNSKSISDLIMKIDSLVSSLPTRASRYNVSLLKENHSVIKINPQENDVFFDVIAIVDPLTREAQKMAQLLVVLGKIINMKIKLFMNCKGKLSKAPLESFYRFVLEPELMSGTDNNPSHGPVAKFLDIPESHLLTLNMITPEGWLVEIVQSNCDLDNINLKDIERTVTAEYELEYLLLEGHCFDMTTEQPPQGLQFTLGTKSKPVLVDTIVMANLGYFQLKANPGAWILRLHKGKSEDIYEIVGHEGTDSEPDVGDVIVILNTFKSKILKVQVQKKSDKIKEDILADENENKGMWDSIKRFTERLHKDDRKENGVLNIFSVASGHLYERFLRIMMLSVLRNTKTPVKFWFLKNYLSPTFKEVIPHMAKEYGFQYELVQYKWPHWLHQQTEKQRIIWGYKILFLDVLFPLAVDKIIFVDADQIVRHDLKELRDFDLGGAPYGYTPFCDSRTEMDGYRFWKTGYWASHLIKRKYHISALYVVDLKKFRKIAAGDMLRGQYQVLSQDPNSLSNLDQDLPNNMIYQVAIKSLPQDWLWCETWCDDESKQRAKTIDLCNNPKTKEPKLEAAARIVPEWAKYDTEIRKLLDHLENKKKSTISVHDEL

SEQ ID NO: 3697 - protein, 1452 aa, Paroedura picta
MRLPGSRQQAGSGSKSVRDRRRRSGWSRKGAWRWLTGAAGAQAQAGRRRVCPAVLPPPSVPGTERYFYSKAVTTSLTTKWFSTPLLLEASEFLAEESQEKFWNFVETCQDFGSSNHDGTAYSYYNAVLMAASQNLSPLQQNLLKFALSLRSYSSTVQAFHQIAADEPSLKGCSTFFVVHGEKTCEFDKLKILLQTASERPKPFMFKGDHKYPVSNPESPVVIMYAEIGSEEFSRYHRKLVSKARAGEITYFLRHYIDNPSKEKVYLSGYGVELAIKSTEYKAKDDTQVKGADMNTTVIGDNDPIDEVLGFLFGKLRQLYPTLQEELKEFRKYLVESTNEMAPLKVWQLQDLSFQTAARILAAPTVDALMVMKDLSQNFPTKARAITRTVVSSELRSEVEGNQKFFKGTLGLQPGDSALFINGFQIDLDTQDIFSLFDVLRNEARVMEGLHSLGIVGQSMHNVLKLNIQPSDSDYAVDIRSPAIYWINNLEVDSKYSSWPSSVQELLRPTFPGIIRQIRKNFHNFVLIVDPSHENTVELLSLAEMFLSNHIPLRIGLVFVVNDSEDVDGLQDAGVALLRAYNYVAQEVDHNYAFQTVLSIYNKVSTGEKLKVEHVVSVLEKQYPYVEVTSILGVDSAYDQNRKEGHGYYKQTGVGPLPIVLFNGMPFQKEQLDPDELETVTMHKILETTSFFQRAVYLGELSNDQDVVEYIMNQPNVVPRINSRILMADREYLDLTATNNFFVDDFARFTFLDSKDKTAAIANSMTYLSKKGMAQDRDVLKLKKGQRAVISNGRIIGPLEDGELFNQDDFHLLENIMLKTSGQKIKTHVQELGVEEDLASDLVMKVDALLSAQPKGETRMENLFFEDKHSAIKLRPKEGETYFDVVAVVDPSTREAQRLAPLLMVLSKVINMNLVVFMNCQSRLSDMPLKSFYRYVLEPEITFTPEKLFIPGPVATFLDMPQSPLFTLNLNTPESWMVESVRTTYDLDNIYLEEVDNVVAAEYELEHLLLEGHCYDITTGQPPRGLQFTLGTSTSPVVVDTIVMANLGYFQLKANPGAWILRLRKGRSEEIYRIYSHDGTDSLPDASEVVVVMNSFKSKIIKVKVQKKLDMINEDLLSDGTSENESGFWGSLKWGFTGGQKKEELKQDKDDVINIFSVASGHLYERFLRIMMLSVLKHTKTPVKFWFLKNYLSPTFKEFIPYMAEKYSFQYELVQYKWPRWLHQQTEKQRIIWGYKILFLDVLFPLAVDKFLFVDADQIVRADLKELRDFNLDGAPYGYTPFCDSRREMDGYRFWQSGYWASHLAGRKYHISALYVVDLKKFRKIAAGDRLRGQYQGLSQDPNSLSNLDQDLPNNMIHQVPIKSLPQEWLWCETWCDDSSKKRAKTIDLCNNPMTKEPKLEAAVRIVPEWQDYDQEIKHLYSRFLKEKVTGEPSKTNETKQSSQEGVSAHIEL

SEQ ID NO: 3698 - protein, 1576 aa, Papilio xuthus
MNSTGLIISLIVILVHVFVFVSTDTDPPKRDEKKAKGVTTFVTAKWESTPIVLELAEYLSGESSDLFWSFVDGVNSLKSPLQDLATDKDVYDACIGIASTLLAPAQLRMAKLALSMHLTSPAVRMFDEIAAQNGAKDVQCEEYVHIASRKICDTDTLRDILKVYKEHDPEEHRLETYLLDHSYPSSDNKTLTAILYGELGTVEFAKKHKILATYADMGAVNYVVRWNVKSRGGPKLRLSGYGVELQLKSTEYKSQDDTTPKEADAGEAVEPSIEEDENDPQNQIDGFNFGRLKNLFPALRTPLERFRRHLSESSEELAPLKVWQMQALSMQAAAAVVDANDAGGDEALKVLTSIAQNFPMQTKSLIHVNVPRSFRDEVLYNQDVWASSLGLRAAEPLLLVSGAQYDAEEVDVMALLAALREDVGPMNTLHALGLPKNLINSLMSLELGEAYTWEEYGLDIRDSAVTWLNDLETDDRYRRWPSSFMELLRPTYPGMLRNLRRNIYNYVIVIDPTSTLSGPPLKLGETLLKHATPVRVGLVLAPGSDAALSAAIRSAFNYIAQDKNSNKEAFYFLTQLISSCENDEMTLEHVKKQLKKYASSGTNVDEIVYEDSEYNFGHQLAEEFLFKIASEKYPLVLINGVPLWDDGSPTPATSSVELLEEALVSALARHTARLQRAVFRSELSDTDDAVDHLMKQPHIMPRLNRQVLASEPTQYLDLSGVPSSPELFTEERLHRLMHLTGRDALATALPILKYFLKSGKPEKITQTIWVVGDLNVKESRDLLRNAITFMKETGGVRVAFVPNVEGGSADQSLNKVVLAALATLEAPKATKYVTTLLEDEGCHERQDCDILPELVPVLNKLEWVLKATRVLCARGMRLRAGARALVHNARLIGPFEDKLGFSMDDFLLLDRFSNQVYGDKIAEVLLKKKTTVENDVFDESITVDIPELSADEYLKVISVLASRSSKSRTALPQGLRTEHSLVNLPPQYPDEAAIEIVAVLDPASTAAQRLAPLLLVLRRVVNCRLKLFLNPQDKNSDMPLKSFYRYVLEPELQFTAGGALSGGALARFSRLPQAPLLSLELRTPPNWLVECVRSVYDLDNIRLADVDSLVHSEFELEYLLLEGHAWDTTLGTPPRGLQLILGSRDQPELMDTIVMANLGYFQLKANPGAWTLRLRPGRSEDIYEIVGHENTEMTAGNSDIQVLLGSFRSHVVKLRVSKRAGSQHLDLLADNEDANAGGIWNSIASSFGGGGGGGEEAEGAEETINVFSVASGHLYERFLRIMMLSVLKHTKSPVKFWFLKNYLSPSLKDILPYMAQEYGFEYELVQYQWPRWLQRQRDRQRTIWGYKILFLDVLFPLHVKKIIFVDADQIVRADLKELVELDLGGAPYGYTPFCDSRTEMEGFRFWKQGYWRNHLQGRSYHISALYVVDLKRFRRIAAGDRLRGQYQALSQDPNSLSNLDQDLPNNMIHQVAIKSLPQEWLWCETWCDDNSKQYAKTIDLCNNPMTKEAKLSAAMRIVPEWREYDGEVRALQARVRRGLYQHTDTDQEQHPHHAGNTNTRTQSYTPTLASQYLHSN

SEQ ID NO: 3699 - protein, 1589 aa, Crucibulum laeve
MKYALSRALGIALAVLASKAASPPVKVSLRSSWSAPPLLPEILETVALEHPDAFFTYLDRLTDPETLTLPGKLSPEAIHLAALEVAVSNGLLQAPGSLTAVEMNLALHAATPKLEAFYQHYEDHHNNSAGTKCGSWVDWYGEVVCDVDTLAKLAGVETIDPAEKLLSDSSYTRPTILTFDHIFPPQDHILERPPRTAVLYGSLDSPNFRGLHTYLLSLANRPDPHVEYVFRHVPPTTREDKRNYLSGYGVSLDLKKMDYLALDDRYAHKSKDEAEISNNETEEIFDPILSLIHAHPENTSAPDAKTPLTSDELTVIGQQASQLIADSENPLTILTLLSQNFPKYASALARRVVVNESVITELHANSLRAQGGINMFWLNGASIDVKDAGNPFTLLRMLKKERSVMQSMTGLGLERTQAFEILTHPSIAASQKDKGMLDGLFDASDRPEEGGVVAWWNDIEKDGRYAKWSPSIYSLIRIYPGQLPSVKLNLFNVILVLDLSQSTSITFLAGPMASIIDRSIPFRFGVVPIAETEESKKMAKLFYYLRQTYGRKKTMTFIKQLREIVPETSATVPWSAVRSAYDDLFELEESSETPPASLDDIVNGNIPAAPLGKVAAYTERLGATLAASPFGHAFFNGKHFDMGDDFLRQLQMELGQQLQYFQEKVYSGEIKEDSATDMENYFYNMPTTAKRRTRYIYPSTGGGSLRIMNLPELFEKTGLRLSPSSYIYPADTESVPMSVYVVADLDSEVGLELVKEALGSITKDSRTRLSFIHNPTDPAVSDRGKPASSRLFGHLMSTHTLSNASPNILLSALGLNPLTLTGDSAQAPITQEEALNQVTGGVESNAFSMEAYADYTKSSRLVVRDLHLTPGQLALVINGRVVGPIDVGEFHSADFRALEEYELRKRTEPIVAALKSVVPDVVDGDRASFANLVAMTSSIIASTQQPDPSEIGLFDAPQRPRQRNYQLLDSKYTAFEFGSNATALYHIAVLVDPLSETAQKWSSILRWLANVPDVFIQVYLNPARYADVPLKRFYRYNILPSLTFDNSGYEVPAQAVFENLPIDPIYTLAMDVPSPWLVRPREALYDLDNVQLGHLSPGDTSVDAVFDLDYIVVEGHAREIDTNGAPRGVQLELVASDGTSIDDTQVVANLGYLQFKAKPGVFKLEIREGRGRKIFKMDSVGNEGWESPTVEEVGSDITVTSFEGLTLYPRFSRLPDMEAADVLQEDDSPPGGFFEELGSKLMSMFKHKKEEAKTALTPAKQQAEINIFTVASGLLYERFVSIMILSVLRNTNSTVKFWFIENFLSPSFLEFIPHLAEKYNFQYELVTYKWPSWLRAQTEKQRIIWAYKILFLDVLFPMDLKKVIFVDADQIVRADLKELVDLDLRGAPYGYTPMGDDNYDMEGFRFWKTGYWKDFLQGRPYHISALYVIDLVKFRQMAAGDILRGQYQALSADPNSLANLDQDLPNNLQKEVPIFSLGEDWLWCETWCSKDRLHRAKTIDLCQNPLTKEPKLARARQIPEWEEYDAEIARFARQLVEEGKIHSRMATADANVLAGGNGAVAETESSTPELTEEVVEVTEEEDVPGRDEL

SEQ ID NO: 3700 - protein, 1542 aa, Ceratitis capitata
MPLQIVCRVLALVFLVSASFKESGASSAPSQSYAVTTLINAKWQQTPLYWEIAEYLADENPALFWDYVNDILSEQKSIKEYASESNQYLAAINVVRNRLTSLQLPLLKLVVSLHSLTPRIQTHLQISNDIYNKSQCDVETFVQIGSDVICTIDELEKKLNSKTDVHEEVVTYSFDHIFPGSKNDSQTVVLYGDFATDTFSAYHKLLSNEALSGNIRYITRHFIPSLTNRKTVRLSGYGVELHLKSTEYKSQDDAPKTNDDIVKDNTTEDFEVKGFDFKILKSRFPSLSHSLDQFWYNLLKGNEEITQLKAWEFQDLGLQAAAAISEVQGDEALQILQFIAHNFPMQAHTLLHHKVSDALRSEIKHNIDVFGRSLNIIPPDGALFINGLFFDADTMDLGAIVETVRSEVHVIESLHKNNIRGSLATALLALDLSGASGKEFAIDIRDTAIMWINDIEADAQYRRWPSSVMDLLRPAFPGMLRNIRKNIFNLVLVVDPLKPASRNLIKLAESFVIHQAPVRLGLVFDIRSANKDSLKDYHSLICAYNYVTQNKDGRSALSFLTDVFAAADAAENVRHQHIKSQLKKAFSNLSGSKIDDILDEDSDYDYGKQLAQEFIERLGFASSPQALLNGVPMQQSILSSDSEFEEAIFSEIIQQTSTFQKSVYKGDLTDSDTVIDYLMNQDHVMPRLNQRILNADATKFLDFTGNEYKDLPNVRDLIQLSNRDMTAVLLGNIKYFGGKHATERIGNAKLNFLTIWVVADVEQPEGRELLANALRYLKSGSSVRVGFIPNIEGLSVSNKLNLNRLVWAASQALPPVEATDLVLKWLKNPDKINEVPDSFNDILTSTELHIKMLRVYAQRVLGLPKEGRLVIGNGKIFGPLSTGEQFTIEDFGLIDRFNAFQYGDKIRKVLQQNSDSDEDTSADSAITSDTLLKLYASLVPRQSKTRFKIPDDIKKHNSVVTLAPKMPSMPHFDISAVVDPASRSAQKLAPILILLRNILNCKMHIYLTPVGQHSDMPVKNFYRYVLEPEVQFESNGKLAEGPQAKFTGLPVNSLLTQNLQVPENWLVEAVHSVYDLDNIKLSDIGGPVHSEYELEYLLLEGHCFDSNSGAPPRGLQVTLGTQKSPAIVDTIVMANLGYFQLKANPGVWELRLREGKSTDIYDITNAEGPNTIHQNHLTKVVISSLRSHVIKLRVTKKPGKQNADLLGDDEEDSTSGLWNSIANSFGGGSAASAPGNVGDEDSQTINIFSLASGHLYERLMRIMMLSVLKHTKSPVKFWFLKNYLSPQFTDFLPHMAREYGFQYELVQYKWPRWLHQQTEKQRTIWGYKILFLDVLFPLNVRKIIFVDADAIVRTDIKELYDMDLGGAPYAYTPFCDSRKEMEGFRFWKQGYWRSHLMGRRYHISALYVVDLKRFRKIAAGDRLRGQYQALSQDPNSLANLDQDLPNNMIHQVAIKSLPDEWLWCQTWCNDNSFKKAKVIDLCNNPMTKEAKLTAAQRIVPEWKDYDQEIKNLMIKIEDHENIDHHPVIATNEHDENLKHEEL

SEQ ID NO: 3701 - protein, 1632 aa, Moniliophthora roreri
MLPWLLLVASTALAASHPPVEVSLRTSWSAPPFLVEVIETVALESPSSFFPFVDAVTDPSTLELPQNSPPEAIYRASLEVAVVNGYIADVSAISAVEMNLALHAAVPKIEAFYHHYNTTNHGRQINCGSWVDWYGTIVCDVETLARLVRVETIDPTEKPASTSTYNRPKILPFDHIYPPSRAGRYPPRTAILYASLSSPNFRELHEYLYKLAKNTDGVPLVEYVLRHVPVKESNSKTYLSGYNVALDLKKMDYLALDDRHVANNGRDEDSTNSEDLDTPQEEDVVLSLIKEYPEPAISTDGAPQELDEEQQKAYLSSLGAQAAQLIYDASHVNPIKILSGLSQNFPKYLPLLGNPQSQTPRIPISPELEAELHANQLRVQGGVNAMWLNGITVSESDTSPFGLLRLLKKERDILKTLTTLGPLASDGSRWLGNGQALDLLTHPKVAAAQNDGVNSVVDDLVDASDRVESGDDKGGKVVVWWNNLESDTRYANWQPSLHAILRPLYPGQYPSVKLNLFNIVLVVDLSQTSSINFITGAVGNIIQRNFPFRWGVAPIVGSSSDDSTKMARLFYYLVQNYGRKKTMDLLKKVSQIQVPPHHQTPSIIWDTVRSAFAELIADDDKAVDLDAILKGTAQGEDDALSHVEGSIEKARAYAQRLGLEGKGQGQGFAFVNGKYFDMSDNFLQQMQLELRNHLQYLQEALYEGRITPPSLDEAAHPDKPFSMTYHFYDLPTTAKRRNKYIVPPSNDKLKLVNLAEVLENSAFQIANGGYLYPESEDDVPLTMYVVSDLNSRDGLALVKEALLSIEGNPLARVSFLHNPVKAEIPEILKSPPVSALFAHLILNEELGSKESRMLLGALGHQTEAPGSGEQVPLTQPDYLRAVLGGMKPSSLDYTNHTKYVDMGRKFLSEVDMKPGEKGIIVNGRVIAPLGTDDFHAEDFKALQSYEMRKRVQPVVDALEEVATDMKKMDRTTRTHVISMTSSFIAAIQLPDPSEVGLFETSQRPRQRTYRSLEGTYSCFEFGDNTTALYQIGVLLDPLSETAQKWSSLLDWLSNVPNVYIEVHLNPAQYTEVPLKRFFRYNLRPALTFNENGEENRAEILFEGLPVEPIYTLAIDTPSSWLVRPREALYDLDNIQLRNLSPEDTSVEAVFELDYLVVEGHARDTLTNSPPRGVQLELVSGRDDNLVPVDDTQVVANLGYFQFKAKPGVFRLGIREGRGRDIFEMESVGNEGWDSPSVKEVGDEITVTSFEGLTLYPRLRRKKGMERADVLSEDDEDDDDGGFFGNIMDSIKSIFSSDDTEDSLVPKNGQAEINIFTVASGLLYERFVSIMILSVLRNTKSTVKFWFIENFLSPSFLEFIPHLAEAYNFQYELVTYKWPSWLRAQKEKQRIIWAYKILFLDVLFPMDLKKVIFVDADQIVRADLKELVDLDLHGAPYGYTPMGDDNYDMEGFRFWKTGYWKEFLQGRPALYVVDLVRFRQIAAGDILRGHYQALSADPGSLANLDQDLPNNLQREVPIYSLHEDWLWCETWCSKDRLHRAKTIDLCQNPLTKEPKLSRARQIPEWEEYDAEIAKFARKLAQEGKIKSRIATADANVLASAGSTSKPETSADASPPLEPTHHDGAADDQPRDEL

SEQ ID NO: 3702 - protein, 1321 aa, Trichoderma gamsii
MLYRHNKHLSFDRVTGTGREAILYADITSEGFGDFHKALSNAAAEGSLSYRIRYHRTQTTPYAALPMSGYGVELALKRTDYIVIDDRLQNEEPRHENTGTGAGLDGSEDVADIKPLTASDLSSLGLKATSFILQSDDPLETLIKLTQDLPKFLTTIVAHNVSTQFEKELKLNSLQGVPDGLNMLWLNGVQLIERQIEPFALIERLRQERKLIDGFRALGLNGKQAVSILGHQDVSAAKEGSEALRYDWTDRLEDGRVIIWLNNIESDDIYEEYPKSLKSLLQPSYPGQLPPIGKNIFTLIAPVDFSNLEDVSYIMQLISFISRGISIRFGLVPLISTPEAIVKAKIAYHIFENYGVKGLFAYLGQLEDAPQLVNEELFSRITGDHALLVDSDQMSLAEVLEADTYEQQLGLAQQWIKRLKVDTPTRQVFFNGLPILRDENWIQELGMQIGEDLRVVQKAVFLGMITDDDWAPGIFLSKAISRRNDYITPDDEGKSLTVLNVNKIYIEHADLFSNVPVIDFVAESPKEDWSAVSVIADLTTTSGKGLVLSGLEFKRRSPGARIEIIHNPVSSDGAASINAALLANQGLLSDIQDISKLTDLIQTPSKDESRDSYFGALERFLTASKVPLGAQMIMLNGRMIGPISEDSEFDADDFQQFLEVEQARRILPVYKAVEELGLGDKLSTPLDAAKITSIAALSTISDFPEGIFESATSARTSLYDQWPATHTIEKGDPETASVHIVGLINPVSEQGQRWAPILKVLSELHGVHLKLFINPPEKIEELPVKRFFRYVLKSQPTFNDKGEVAGLRATFNGLPSEALLTTAVDVPPAWLVAPLLSIHDLDNIKLSAVKTDIHATYELKHILIEGHSREGRGAAPRGAQLVLATEKDPLITDTIVMANIGFFQFKANPGVYSIQLKEGRSTEIYEIESIGAQGWNPVPGDNGTELALIDFQGVTLYPRLQRRKGMETEDILQEKDVQDNNIISKGIKLAEGLFGGKSKKKSPSEQEHAEINIFSVASGHLYERMLNIMIISVMRHTNHTVKFWFIEQFLSPSFKEFIPHMAEQYHFKYEMISYKWPHWLRQQKEKQREIWGYKILFLDVLFPLSLDKVIFVDADQVVRTDMISLMNLDLEGAPYGFTPMCDSRVEMEGFRFWKQGYWANYLRGRPYHISALYVVDLRRFRELAAGDRLRQQYHTLSADPNSLANLDQDLPNHMQFNIPIHSLPQEWLWCETWCSDESLSEARTIDLCNNPLTKEPKLDRARRQIPEWVTYDEEIAALHQILKVEERLSNDDEETAEAGTEDKNTKSRRLESDETHTKDEL

SEQ ID NO: 3703 - protein, 1518 aa, Dufourea novaeangliae
  MOD_RES (1261)..(1261): Any amino acid
MWSTIPFYLLLLCITHLEADKRVNKYVTTLIDAKWKETPLVLEAAEYLNDENPIYFWKFVDTFSNNDFRNATERDNYNAIIAFAEKYLSSSEVALLKLGLSLRIYSARVEMFTQMAENKNISNFECYNIADIGGTYTCSLEELETLVNQETWSNPDTYSVDHRYHTSPQTERIVILYGQVGTPNFSDFHNKLKELAETKGFNYILRHYLKDRIDKNVQLSGYGVELQMKSTEYKATDDSDIKDNAGKDSESASDSMEEIDGINFVTLKNLYPDKQAELDRLQTHLLETSHEIGALKVWQFQELSHQAAERIMNSPMSEAVNVLTDISQNFPMQAKSLIRTKVNSEMKKEMKLNQAIFTSNLNIQPTDTALFVNGLFFDLEAVDVLSLLESLRNELRVMESLRKIGFSNTQMSKLLSLDLSTNMDKQEFAIDIRDSAIIWINDIEQDSTYARWSASLTELLRPTFLGMLRNIRRNLYNLVLIIDPLSTESTALINLAQSLYLHAAPLRVGFVFVTNYDTTITGLTDPSVAVNNAYHYFAEVKGSEHALQFLIDLRNYIGPEGATVEDVKKAIKAQDASANVNYILGEESEYDVGRHLASDFVKRSGFKKFPQALMNGVPLSPDQLNADSFEEAVLSTIVSQTPALQKAVYRGEIAEQDDVVEYIMNQPNVMPRLNERILKAEKHTWLSLIGTVPSDEDYTKWSPQDFSTWLMNRLQYLFVPRRSNVHHLYTFWVVADLQTSAGRMLLRESLGYIESNADIRITIIINPTTDTNDMDSATDINRIALAGLNSLPAEKAMHFVRNVIQEDVANTIASGSFNIEEEAVREQLKKQIDELRVHRQYVKTVLSLERGARAIVCNGRLIGPLNDDEEFTSDDFSLLERFSQSNYGDKLFKKLIKERLLEDDEYEKNEITDNMIMKITSLLVSHPQTRSRFDVPFYGDDYSAIKIPAAHPDEVAFSLIAIVDPVSRGAQKLGPILKTLQQSLNCNIKVFLNCLDKNSDMPLKSFYRFVFEPHLQFSIDGRINGAMAKFTKLPTSSLLTQYIHAPENWLVEVVRSVYDLDNIKLDNVAIGVHSEFELEHLLLEGHCFEAVIGNPPRGLQFTLGTEKQPLMVDTIVMANLGYFQLKANPGEWVLRLRQGRSAEIYDFTTVGGQDVIQNGNDVKVVISSLRSHVLKVKVSKKPEKIGMDLLSEDDKSSGLWNSISRTFATGDDSDDQDEKLNIFSLASGHLYERFLKIMMLSVVKHTSSPVKFWFLKFRLLXDFLPYMAKEYGFEYELVQYKWPRWLHQQTEKQRTIWGYKILFLDVLFPLNVKKIIFVDADQVVRADLKELATMDLGGAPYAYTPFCDSRKEMDGFRFWKQGYWRNHLQGRAYHISALYVVDLKRFRRIAAGDRLRGQYQALSQDPNSLANLDQDLPNNMIHQVAIKTLPQEWLWCETWCDDTSKNYAKTIDLCNNPMTKEAKLQAAVRILPEWVGYDDEIKALQQKLDNENRQTEKEEHETFEEDATDGDSAKHEEL

SEQ ID NO: 3704 - protein, 1489 aa, Trichoderma arundinaceum
MKQHRWRPWNLTLGLMLALQAHSSPSVNVGMNAAFPAGPYLLELLETAAAENSSSYFPLLDRIATGYFASASTDAALYAKFLDAVQEDGSLSSPEALSTFKLALSLRSAAPRIEAHYQYYDTAVASAIQDAANPDCLNWVLLEGKQYCTPELDEANKDGLLSLEAKDLPFDRTFGAGEEAILYADPTSTTFGSFHRTLTNAARQGSLSYRVRYRRVETTSAATLPMSGYGIELALKKTDYIVIDDRLHDDGSHVESSSSSTSTNLDDSEDVADIKPLATSDLSSLGMKAASFILHSEKPLATLIKLTQDLPKFLTAIVAHNISSQFEEEFHSNGLNGVPDGMNVLWINGVQLIERQIEPFALIERLRQERKLIDGFRALGLSGKQAVSILGHQDVSNAKEGNEPLRYDWTDRLEDGRVLIWLNDLENDDIYEDYPKSVASLLQRAYPGQLPPIAKNIFTFVAPVDFSNTEDVLFVMQLFSFISRGLSIRFGIVPLVSSPEATARAKTVYHLIENYGIEGFSAYLGLLRDASATTTDEERFIEVTKDHKLLDDSDKMLFAEVLETDIYEQQLRLVQRWIHRLKVDTPVRSLFFDGLSIPRDENWMQALGMQIGDDLQMVQRGVFHGILTDDDWAPGIFLSRAVTRRNSYVTPDDERKSLRVLNINKIYIEHADLFEVIPVVDSIQGSRKEDWAAVTVLADFTTTNGKGLVLSALGFKRHNPGVRIDFIHNPATTIGAASVNAALRTNQGLLSDIQDIGELTDLIQNPSEEISTDGYVEALGKFLSASKVPAGAQIIILNGRMIGPISEDSQFDIDDFQQFLEVEQTKRILPVYTAIEELGLGDRLSTPLDAAKLTSITTLSTISDLPEGIFESAPSARTSLYDNWQSTHTAIEIGDQETASIFIVGLVNPVSEQGQKWAPILKVLSELQGVHVKLFINPMEKIEELPVKRFFRYVLESQPSFNEEGGVEGLTATFNGLPSEALLTTGVDVPPAWLVAPLISIHDLDNIKLSAVKSDVHATYVLKHILIEGHSREGKGSAPRGAQLILATAKDPLITDTIVMSNLGFFQFKANPGVYYIRLKEGRNAEIYEIESIGAQGWNPVPGDNVTELALIDFQGVTLYPRLKRRSGMEQEDVLQEKESQETNIISKGIKLAEGIFGGGSKKKSVSAQEHAEINIFSVASGHLYERMLNIMIVSVMRHTKHTVKFWFIEQFLSPSFKEFIPHMAKEYGFKYEMVSYKWPHWLRQQKEKQREIWGYKILFLDVLFPLSLDKVIFVDADQVVRTDMMSLMNLDLEGAPYGFTPMCDSRVEMEGFRFWKQGYWANYLRGRPYHISALYVVDLRRFRELAAGDRLRQQYHTLSADPNSLANLDQDLPNHMQFQIPIHSLPQEWLWCETWCSDESLSEARTIDLCNNPLTKEPKLDRARRQIPEWVTYDKEIAALNQLYREEAGIAGRERLPGDGERSVPATQDKNTKSRRLEEQVSHTKDEL

SEQ ID NO: 3705 - protein, 1693 aa, Phellinidium pouzarii
MRTPRRTRAAVWAWLGIAGCVHVAASPAVRVDLRTSWSEVPLLLEVIESISAEEPGTFFPLLDALATSDALPPLDTLSPEAIHQATLQTAVALGFLQEPGALASVELQIALHAAAPKVQAFYQFYRYADQRGGPSFSSEAGREAGEEKGKKGESSLDPNCVSWVDWYGERVCDVETLARLAGHDTIDADGEHIFNSTFVRPKLLSFDHIHPDPERTLTPPLRTAIFYASPSSPNFRVLHAYLYKLANAPEPHVEYVFRHVPLDGQATRRKNYLSGYGVALDLKKTDYLAVDDRHSASSDYAGDDAPSEGSYIEDDIVSYLIDQYPESVDADVSTPLSEEELISIGIQATQLITNSSNPLETLTQLSQNFPKYAASLARRVALNESIVEEVANNHMKAPAGVSAFWINGLMVHEGDITPFGLLRVLRKERAIVRSLTAAGLEPAQAVDLLTHKAIQVAQTEGGGVLDALFDASDRYEGGGAIVWWNDLTKDSRYARWNPSITGLLRQVYPGQMPSVKQNLINVVLITDLSQMASLNFIAGPLNNIISRGVPIRFGVVPGVETEDGRKMARLFYHLIDTYGRAKTMGFFAQIAQIQMPIHLLGPTVDWALVSRAFIELQRLNPRDTETESNLNIISIDAIINGGDEETKEDVGDEVDGGTEVSLADHVKRAHAYALRLDATPASCPTGHAFVNGKHYDLDDLFLKLLQTELSTQIQYLQEKVYLAELSDADLGSIDTYFYDLPEAYIHRNRYIFPSPAKPGVGSASGSGDLRVANLPEVFRKMGFAPASGAYLYTEGRPDSDEALLTTLVVADLDSESGIALMKEALLSLDIGNSSRVTFIHNPAPLDTASPAPHRRVSPIFSHLIMHGLLAQVSQKELAVVLNPEITLLDDSEGFGEQVTLSENSVVYQLLRDVGVVMDRLGESKVHTHYVGACGLAAREFGIAPGEIALVVNGRIVGPIEPYAFASRNFASLRSYEMRRRVEPVIKALTNLTITPDSFDKSAYIDLVSLASSVIASVQVPDPSEQGLFNNPPLQRQRTYSQISGNFTSFSFGDASTAAYHIGVLLDPVSEAAQKWTALLKWLSTVPSVYIQVYLNPGRYSEVPLKRFYRFNLSPSLSFDENGNEIDAQTVFDNLPIEPLYTLAMDVPPSWLVRPREALYDLDNIQLSMLAPEDRERGISAAFELDYLVIEGHARDALTNAPPRGLQMQLTSLDGVPVDDTQVVLNLGYLQFKATPGVFRLELREGRGRDVYALESAGNEGWHSENVSIAGDEITLTSFEGLTLYPRLRRRAGMEKADVLDEFVVGEQQQRSLLDNLASRVASYFRPKEAAVKTIAPRQADINIFTVASGLLYERFASIMILSVLKNTDSTVKFWFIENFLSPSFLEFLPHFAEAYNFDYELVTYKWPSWLRAQKEKQRIIWAYKILFLDVLFPMDLKKVIFVDADQIVRTDLKELVDLDLHGAPYGYTPMGDDNVDMEGFRFWKMGYWKEFLQGRPYHISALYVVDLARFRQIAAGDILRGHYQQLSHDPNSLANLDQDLPNNLQREVPIFSLPEDWLWCETWCSKDRLHRAKTIDLCQNPLTKEPKLVRARQIPEWEEYDAEIARFAHTLADTGKIQSLIAAADANSLASAGSGGLVGMSAKIASVDEGDGKTDDGTQYRSEPAAGPAEPADTEHALGGNGESAIIHSKDEL

SEQ ID NO: 3706 - protein, 1182 aa, Manacus vitellinus
RAITKTVVSSELRAEIEENQKYFKGTLGLQPGDSALFINGLLIDLDTQDIFSLIDVLRNEARVMEGLHSLGIEGLSLHNVLKLNIQPSDSDYAVDIRSPAISWINNLEVDSRYNSWPSSVQELLRPTFPGVIRQIRKNFHNFVLIVDPTQETTAELLNVAEMFFSNHIPLRIGLVFVVNDSEDVDGLQDPGVALLRTYNYVAQEMDNNYAFQTVMSIYNKVKTGDQLKVEHVVSVLEKQYPYVEVNSILGIDSAYDQNRKAARGYYEQTGVGPLPVVLFNGMPFQKDQLDPDDLETMTMHKILETTSIFQRAVYLGELSNDQDVVEYIMNQPNVVPRINSRILTSDREYLDLTGMNNFFVDDFARFTMLESKDKTAAVANSMTYLTKKGMSSKEIYDDSFVRPVTFWIVGDFDKPSGRQLLYDAIKHQKSSNNVRISMINNPSEDPNSQNTVVAKAIWAALQTQTSNNAKNFITKMAKEETVKALEAGADILEFAVGGMDTNIFKEAFESPKVDFILSHAMYCRDVLKLKKGQRAVISNGRIIGPLEDGEMFNQDDFHLLENIILKTSGQKIKSQIQQLGFEEDLASDLVMKVDALLSAQPKGEARIEYHFFEEQYSAVKLRPKEGETYFDVVAIVDPVTRDAQRLAPLLLVLNQLINMNLRVFMNCQSKLSDMPLKSFYRYVLEPEISFTAENNFAPGPIAKFLDMPQSPLFTLNLNTPESWMVESVRTPYDLDNIYLEEVDSVVAAEYELEYLLLEGHCYDITTGQPPRGLQFTLGTSTSPVIVDTIVMANLGYFQLKANPGAWTLRLRKGRSEDIYRIYSHDGTDSPPEASEVIIVLNNFKSKIIKVKVQKKLDMMNEDLLSDGTSENESGFWESLKWGFTGGQKNEDVKQDKDDVLNIFSVASGHLYERFLRIMMLSVLKHTKTPLKFWFLKNYLSPTFKEFIPYMAKKYNFQYELVQYKWPRWLHQQTEKQRIIWGYKILFLDVLFPLAVDKILFVDADQIVRTDLKELRDFNLDGAPYGYTPFCDSRREMDGYRFWKSGYWASHLAGRKYHISALYVVDLKKFRKIAAGDRLRGQYQGLSQDPNSLSNLDQDLPNNMIHQVPIKSLPQEWLWCETWCDDSSKKRAKTIDLCNNPMTKEPKLQAAMRIVPEWQDYDQEIKLLQSLFQKEKEMGTPAE

SEQ ID NO: 3707 - protein, 1529 aa, Pneumocystis murina
MKLNIFRKAWCIIFIYFLGIFFQLCLGSPVINAYLTSSFKAPPFINIFLETVSTYGETYFFELLDIISKIRNVTLTELNLDNYNYLRKIVYDNEIIKDNISLSLLDYELGLQLLAPRIESYYHYYNYTVIPEMMNKNFILECRNWILFNGQQYCDLEEFLKAKDCRYEEIESVVLLPFDHIFDTHKNYDSPVAVLYADLDSDDYKTYHSFLFAEAKAGNLKYVFRYKPGNSGSHLLYLNGYGVQVSLKKTDYLVIDDRNIVDDLNEKTFMGNHNLNVDSDDLLSDIQNDEIKPLTNAELKRLGFSIVQFVNYSKTPLETLNSVLQDLPKYASYLSSIKVTRNLMEKLELNHQYIDPGMMLFSINGVEIDPSKINGFSLSKYLRNVYDFVMSLQKLGLSAKEAKFFVNESIYNIFNKFFDNRFDFRDKYENSMAILWLNDIENDPNYSHFSNDIYKYFDDVPFQQLHMVRRNLHHIIIFLDFSGKVDFLLLRTMLLLIRSSYPIRIGVVPIWDDSEDMFMVKLFYLLYDIYGINVAFEYLSYIDSGTRKNRNVLYRNYKIISSKYSFGKNIQYLDIDEIMKFKKLNKYVLKTKEWVLRLNIKNDNYIIVNGKFVEKKNWQYSILYIFPNDVNIIRKKIIEGSFTNNANILDYLLEDAIFTRKFYMYPTNKLIKSQNLIDFIKSYENMEFSSINENLNTEQSIWLIADFDTKKGIKYLKSALKYIIKHPYTSLRFLHNPRVNNKGEFDHFSSFLFLLKERDIDVAHPTLNYVRKIFNNYDSGGIDKKIEYPHFILNTYNSTQLALSSVKARLYWKKIGNLLNKFGFLPGEFGLLINGYIVGPMSEFDDFLLDDFESLGNFCNLSMVSKLKVIVNELSIKNSEKLKIFFPLLSSVILSYLVLEKHDDFGYSSQDKRSNLQNFFRELSPSFAYGDENDCLFNVKAILDPLNEISQKLVSILKVLKQMESVCLKVYLNPLREVTDLSINRFYRYVLHSSLKFDSNGNLIYPNAVFEELPKLHLYTVDYDILESWIVTQKESIYDLDNLLLQDLSSKKISKVRIVYELKHILIQGHAEDITLKNVPAGIQLALKTKNNSFVSDTIVMNNYGYLQFRANPGIFKIDMIKSHSSIFKISKISEKFESNDNKFSKEIILDSFEGLTIFPKLVRNPGKENVSIFEVKDLDSDNFTPNTVLNSTNSQQTDEFKLNSFMQKPYAEINIFSIASGHLYERFLYIMTLSVLKHTKHTVKFWFIENFLSSSFKNFLPYVANEFGFQYELITYRWPHWLRPQKEKQRQIWGYKILFLDVLFPLDLDNIIFIDADQIVRTDLKELVDMDLKGAPYGYTPMCDSREEMEGYRFWKKGYWESYLNGKPYHISALYVVDLKRFREIAAGDLLRQHYQTLSEDPGSLANLDQDLPNNLQHLVPIFSLPQNWLWCETWCSDETLKDAKTIDLCNNPMTKESKLKRARRQIPEWNKYDKTIADLIARVLEQRKTNESGEYVVDNIAIPVDMMQNIQFNFDEKNKKKDTHDEL

SEQ ID NO: 3708 - protein, 556 aa, Acropora digitifera
MRIKPTHDGPSFDVVVIVDPLTKAAQKIAPILTVLQNVTNVNIQIAMNSREKLSELPLNRFYRYVLEPQLTFDKDGGLSEGPLALFLDMPQSVLLTMGINTPLGWMVEAVYSPHDLDNIKLQEVEKQVMANFELEYIFIEGHCSDFDTRQPPRGLQFTLGTQRNPTMFDTIVMANLGYFQLKAYPGAWSLRVREGRSAEIYDIESVSDSREEEDKHFAVVVDSFVGKLLKVKVRRKPGMEGKDLLGDSDSQSGGIWDSLSSIVGSDSKEKTAQDETINVFSVASGHLYERFLRIMMLTVIKNTKNAVKFWFLKNFLSPSLTVFYSLSFCCCCCLYEIYEVCHTVRYKILFLDVLFPLHVKKIIFVDADLIVRADLKELNEIDLHGAPYAYTPFCSSRSEMDGFRFWNSGYWRSHLGGRPYHISALYVVDLDRFRRLAAGDRLRGQYQGLSQDPNSLSNLDQDLPNNMIHQVPIRSLPQEWLWCETWCDDASKSAAKAIDLCNNPMTKEPKLKSAVRIVKEWQDLDNEVRRLQESVAAANKTESKQTDTAREEKDEL

SEQ ID NO: 3709 - protein, 575 aa, Emiliania huxleyi
MAFRPESLGCGAACVQLAGSGPGKALELTAVLDPLSKEAQRAVPILMALHESLGLSVTLHLNPSLQIDKFPLESFYRYVVSLEPSFDNAGRSLSPQLDRALFSSLRTPQVLTLHVDAPEAWLLECTEAAYDMDNLRLAELGDRRTVSAVYELASLLITGSCEDVGSRHPPNGLQLLLGTTAQPHATDTLVMSNLGYFQLKAAPGVWDLSLAPGPSSEVFTLRTAPALLAAGHSTRAFRGGMQRIDPATLNDAAAVRVTMADFTGANILLLAQKRPGLESWWSGGEKGDASETVHVFSLAHLYERFLKIMLQSVLQRTKRHVKFWFLKNFLSPAFIGSLPAMAAALGIERGRGHALGFEYGLVQYQWPSWLHKQTDKQRIIWGYKILFLDVMFPLSVVNADVGELWDMKLPGRAAVAMTPFCQADANPDTTGFRFFAQGYWRDHLQGRPYHISALFVVDLHKFRRRAYGDQYRVFYDSLSKDPNSLSNLDQDLPNYAQHVVPIHSLPEEWLWCETWCGNTSKPRAKTIDLCNNPLTKEPKLSQATRVIGERWSALDAVAKGIEEAESPAQPSRDEL

SEQ ID NO: 3710 - protein, 1674 aa, Trypanosoma vivax
MHRLTPRGGVLLEAGMTSRMLRVFFVLYVTVIALVAPPAEARGIRVQLLAPWNETPLLQEGCEWASRSHERAASSSSEYGFYDCLRGVWSIAEATNRTGGAQELTQKVQYDLLLDTMRAAGQPSNRVALLKMSLASRLSSPAVEAHWQLARRAIRRVGGCADVGRPFVLLSGRAFCEEAPLKGALLKISGTGHDSDTEEVEEETQSDELALVIPSFDHIYPHSGGRVVVFLYGIVGDSRTMRLWNLLEPYAESVRLIFRHLPVTGSRWENALAVQGYGVTVDVKSSEYKVVDEKSNAGYATRRGGVAAPDDDGEERQTISGFNATRLQERYPDLKVKLDDFFSVLEEAAEKVKVDLHNWEKESMGLAAVQYVMDATEGHLDALLDLLSRFPARATRISRASATILSRIGDETIAALNGIANAVGQGQLGMFLNGCRVSPEEMNLFHVLHKIEEYEQLLGGLSNVLTSHSPPSDRGEDATYERAEALRFGVDGLTKLLTEKASLFGSRGKGMPRIWLPKEDVFWLSNVETSPFLQRLPRSLQALAQMNAYGNIMLPRRNLFHVVVVVDLTTTAGQETLGLLVNHLQGRQPFRLGLVLADPKWAPTVGLANDGAGFAATPSASKAVMGTSAAIWEILRADPEDVQPIVQLLRGLMTRMLQSGAITDLDAHEVVQTVLSGEGKRTMGDIMADPDFVMYYQKTQEMVHTVGLDGSLTLVNGDIYPQGLMYALQRGIVSEIMYVRQLIVDGVLRDDDENLYDSIMDAAGAKRRYLASLYNESIYMDWGSKSVLSFLQNRWFFLPPQAADTLPLISAVLALHHPVTVQSLQAVVTASESLLSCSEGGKNCGRVRLAVLTCGGHMRTERPTLMRDLERLQWHIFEGDKLSNERRLGLLHEFVRAIVKHSDEQRHLNDPDVYEGILKHVQLPEDIRKLITSPLPESETREGSSSRLQASLAQGFCREMNRGADASSDAIRVHAGKVYYYFNGRRLEYKEQFTEKDFETAALQELEVAEKVWYLLEQIDIMKLNPRLDGSEVGNDFYASRVAAVASLLHRDAIHNDRSEEQKRGFPISPGPASFVAGPVAGREARHRLLVSLDPTSRESQQAAAICDYVSRAPIGATCIVYLNPSRKMQASVRNFHNFVSTTELSFDVSGDVVPPRALFHRLPANHLLTVGVVEPEQWTVFPMEAECDLDNIVLSKLPSETNYIGATYRIHSILLTGSAVELGTSSPLSGLPLQLRSSPHNTIRFRNNGSVESTEVTRDTLVMAIKAYFQLQAAPGLWYLTIQPGDIARAFYISHINKMLLRDSANRAKDNQHDYASGQNVPVMISSFTGAFISVGVSKVAGYEATHIRELIASSIESSRIQWPPSGPRNKRPDRPTLNIFSVASGHLYERFLRIMMKTVMDSSFDVHGANTTRIKFWLIENFLSPHFKEHVMLLAKHYGFEVGFVTYRWPWWLHKQTEKQRTIWAYKILFLDVLFPLEVDRIIFVDADQIVRGDLHELYNMDIGNAPMAYTPFCREYPNTATTNFRFWDRGFWMTHLRGKPYHISALYLVDVAQLRTALGGDKYRAIYSQLSQDPNSLANLDQDLPNFMQDDLPIYSLPEEWLWCETWCAQESKSRAKTIDLCNNPLTKTPKLDNVRRIIDGWDEMDSNLETLVQRLLKEKQEGESVQNNMT

SEQ ID NO: 3711 - protein, 891 aa, Homo sapiens
MDRNNVVPRINTLILRTNQQYLNLISTSVTADVEDFSTFFFLDSQDKSAVIAKNMYYLTQDDESIISAVTLWIIADFDKPSGRKLLFNALKHMKTSVHSRLGIIYNPTSKINEENTAISRGILAAFLTQKNMFLRSFLGQLAKEEIATAIYSGDKIKTFLIEGMDKNAFEKKYNTVGVNIFRTHQLFCQDVLKLRPGEMGIVSNGRFLGPLDEDFYAEDFYLLEKITFSNLGEKIKGIVENMGINANNMSDFIMKVDALMSSVPKRASRYDVTFLRENHSVIKTNPQENDMFFNVIAIVDPLTREAQKMAQLLVVLGKIINMKIKLFMNCRGRLSEAPLESFYRFVLEPELMSGANDVSSLGPVAKFLDIPESPLLILNMITPEGWLVETVHSNCDLDNIHLKDTEKTVTAEYELEYLLLEGQCFDKVTEQPPRGLQFTLGTKNKPAVVDTIVMAHHGYFQLKANPGAWILRLHQGKSEDIYQIVGHEGTDSQADLEDIIVVLNSFKSKILKVKVKKETDKIKEDILTDEDEKTKGLWDSIKSFTVSLHKENKKEKDVLNIFSVASGHLYERFLRIMMLSVLRNTKTPVKFWLLKNYLSPTFKEVIPHMAKEYGFRYELVQYRWPRWLRQQTERQRIIWGYKILFLDVLFPLAVDKIIFVDADQIVRHDLKELRDFDLDGAPYGYTPFCDSRREMDGYRFWKTGYWASHLLRRKYHISALYVVDLKKFRRIGAGDRLRSQYQALSQDPNSLSNLDQDLPNNMIYQVAIKSLPQDWLWCETWCDDESKQRAKTIDLCNNPKTKESKLKAAARIVPEWVEYDAEIRQLLDHLENKKQDTSSTRSMAASASGEASRSFYSWWKAKQEQVSYIGGTGPRERRGRCHTLLNNQISH

SEQ ID NO: 3712 - protein, 1519 aa, Nothobranchius furzeri
MKRVVVLSLVLLSVHPGASTPPKGVTASLKAKWSMTPFLLETSEFIGEDGNEKFWQFVDTVKELTVYKHGESVRSYYNLIIKKAGQFLTDLQVNLLKFALSMRVYSPAVHASQQIASDEPPPEACPAFISVHGQHSCSTKDIKKLLKGAAGRPKPYLYKNDHTYPGANRTDVPVVILYAEVGTKKFNSFHKVLSEKAEEGALLYVLRHFVAKPKPQNMLLSGYGVELAIKSTEYKAVDDTKVKDSKTVISAEDDDNDEVQGFFFGSLKKSHPELQEQLGELRKHLLESTNAMAPLKVWEMQDLSFQAAARIMSVPKFDALKVLRDLSQNFPSKARSLTRVAVKKEMRKEIEKNQKYLSETIGVHPGDGELFINGLHIDLDTHNTFSVLDIIRTEARILEGLHNLGIKGEHQGKLLRLPMSTVGDSFALDIRQPAIMWMNDIENDPMYRNWPASVQELLRATFPGVIRQIRRNFFNLVLFLDPLQEESVELVKLAELFYKHKIPLRIGFVFVVNTKEEIDGFSDAGVGFYRLLNYIADEYDLSQAVMSIVSLYNQVEEGQMLSAEMISAYLKRKYPKVNPEKVLGVNSEYDYGRKDGALFYRKSGLGALPLGLFNGVPLNPDEMDPEDLETIILQRIMDTTPAFQRAAFMGQLTDSSDVVDYLMEQANVVPRMNPLILGTDRKYLDFTRTPALDDWEDTNMFSFLDSRDKTAVVAKRMKYFTNSDEDGVAAVTVWIVGDLEKISGRKLLLNALKHLKSSRGVRVGVIDNPGEKPSEDNTVVYRAVWASLLTQKNKAAAAFVQKLLKEESIQLLLQGTKMKDLLLQGMDVDAFEKKFNTLEADFIHSQQLFCRDVLNLRPGQRAVIGNGRILGLFEEQEEFTMEDFHLLERITLSGSAEKVKTKVKEMGMKPKHASDLVMKVDALLAAAPKGEVRRDFHFKDANSVLQLAPRENEVFYDVVAIVDPLTREAQKISSLLIVLSQVVNVRLQVFMNCRAKLSEMPLKSFYRFVLESDVTFLANETVSSGPVARFTELPESLLLTLNMITPESWMVQAVSSLHDLDNIHLQEVKGVVAAEFELEHLLLEGHCFDLSTGQPPRGLQFTLGMSRDPLMYDTIVMANLGYFQLKANPGAWTLRLRKGRSEDIYEIITHDGTDSPADAGDVIVVLNSFHSKIIKVKVQKKAENINEDLLSETSESKGIWDSIVSITGGGARKDDGDKKEDVLNIFSVASGHLYERFLRIMMLSVLRHTNTPVKFWFLKNYLSPSFKETISHMAKSYGFQFELVQYKWPRWLHQQTEKQRIIWGYKILFLDVLFPLAVDKIIFVDADQIVRADLKELRDLDLEGAPYGYTPFCDSRREMDGYRFWKSGYWASHLGHRRYHISALYVVDLKKFRKIAAGDRLRGQYQALSQDPNSLSNLDQDLPNNMIHQVAIQSLPQDWLWCETWCDDSSKATAKTIDLCNNPKTKEPKLMAAARIVPEWVEYDNEIKELLGRVQGEAGATHNPSPSQHHKADTRRDEL

SEQ ID NO: 3713 - protein, 1597 aa, Neocallimastix californiae
MKFLNIFNIFNIFISSLIVINVTCEEIKKNSPPVKISLQTPWDNTPLILEAIEFISKEKPDVYFPLLSKISKEKDFPKTTYGQYQYIMKFPEVSELDIEALLKLSLSLRSEAPLIQSYYHYYNASVVPSHQINSNFDTKCQNWLDWYGTQFCDMENFKKSAQISLVEGKYSMNKSDKQAPIPLPIDHIKKSDVENGVVIFYGDVFSKDFNSFLNELLKINEEVGLTFIFRYKKSLDEEFNNKPITISGYGVEMAIKNTEYKVIDDRKLKKDEKENIQKSQKKIPNIPSKEFGLDKLSEKFPKQKDDFSAFNDLLQQQEIPVLKKLLANETEDIGTKIIQYITTSSNPLYVLSQLSSNYPKISHIINQMPLIEEYSKEVKFLQRLFYAPDFNSVFINGIEINAKDLNPFNVLRIFSSENRAITKLNSLRFSNKDAVNLLNSATDDSDNGKNGDTEYYDVRDDIVSWWNNLESDSRYNKWPKNIKEILQPLYYQGQMHRIAKNIYNSLFVVDLTKKNVLEALSEIFIFVERGVPIRFGVVPVVDTENKTELSTSVGVIFKVFIKEYSKKNAKNFIVKLFEASAKGEITKEKLTKITEDILSDNKLKILDDDVLLSTYDDILEYGIKKYYNSLKEFNEKFAITSDSQALFVNGAYSEFSKDWKQSMMTSIVSEMDNIQRKVYYGEITNKDNVYDKILDSPNVRKRKNIYIYPSDENPIKFIDILSIKNLDDMKYFSNAGKLGSHDSIWVISDLSTHNGIKLALEGLRFIDGKSSQNSRLSIVDSADNDKKNAIVLRNIINQVAMVTVPKDTDYTVSGYLVELLEARLAMDEDANEELILKKAYEINEKYGNLMIQKDVDYINQKPAVDFKQIVELTINNKKNTQAIVINGRLIGPWDENVSFTQEDIKLASDFEYEHRIRMLIGKVRAYGKAQEWGDIPIREWYSNLIMKTSYIVSSCDTAEKVKTEFNDSTKERTGTGYIKKFKSSLTTFKYGDIENAKYQFTAIIDPTSKTGQKISSFLMIISKMKDVYIEVQLYSPKPNEDVPELDRFYRYVFDIDMTFDEDKNEILPMAEFENIPIDPLFTVGIHAPQAWLVTPVVSIYDLDNICLKSVEDSGVNAIFELKNILIEGHARDMRLNTPPRGVQLILGTKSYPSMVDTIVMANLGYFQLKANPGVWELQLRSGRSSELYQIINVGNNIHSWLEDRNEDLVKIYEENGITIALTSFEGSTVFLRADKKKGMEKEDVLSEEGDVTKKDKEDDKIWGKLKKKLGMGNSSSTNSSETKKSADKINIFSVASGHLYERLLSVMTLGVMKHTQTPVKFWFIENFLSPSFKKFIPHLAKEYGFEYELVTYKWPHWLRAQSEKQRTIWGYKILFLDVLFPLDLEKVIFVDADQIVRADLKELVEMDLHGAPYGYTPFCNSRKETEGFRFWKTGYWEKHLHGKPYHISALYVIDLVKFRQMAAGDRLRGEYQMLSADKNSLANLDQDLPNNMQDTIPIFSLPQEWLWCETWCDDESLKTAKTIDLCNNPLTKEPKLDRARRLLPEWSVYDNEVAEFEKKVEAMLNGEQINDNVTSKQETVAQSKPESDDKTKEKDEL

SEQ ID NO: 3714 - protein, 1558 aa, Musca domestica
MMWLNNKMGKALIYYLASCYLLVLAHSGNAETAKSKSYPITTLINAKWEQTPLHLEIAEYLADENPNLFWDFVKDAADLDTPLTSYDTESQSYNAVLKLVRKGLTEIQLPLMKLVVSMHSLTPRIQTHFQIASDALAKGSCPETTTFVQLDRELICSFDELRQKLSTANEKPPVVSVETYAFDHIFPGSENNTRTVVLYGDLGSSAFAQYHYLLSAKALSGNVRYLTRHYLPEKQRDARKRVRLSGYGVELHLKSTEYKSQDDAPKPADGSAEDASSTTGEMEVQGFDFSVLKERFPTMAHSLDKLRQSLLQGNDEIAQLKAWEFQDLGLQAAQAIAEIDGEEALKILQFTAHNFPMQARALLSHKVSQQLRDEVKHNTEIFSRSLNIVPPDGALFINGLFFDADSMDLNSLIETLRTEVRVLENLHNSQVRGRLASTLLALDFSGSGSKEFAIDIRDTAISWINDIEKDMQYRRWPSSVMDLLRPTFPGMLRNIRKNVFNLVLVVDPLQPSSRNLIKLAESFVLHLAPVRLGLVFDARKANDGSQEDYLALTCAFNYLVQKKDARSALSFLTDIFANVDAKQSVKRKHIKSQMKKTFEKLSGSKIDAILDEDSDYDYGRQLALEFVERLGFSDSPQALLNGVPMPSNILSSDSDFEEAIFSEIIQQTTTLQKAVYRGDLTDSEEILDYLMNQPHVMPRLNQRILGNNENAKFLDLTGTPHNDLSNVKALALLSNRDMTATLLKNIKYFEGKHSYETIGDSKLHFLTLWLFGDLEKANGRELLKNALQYVRAGASVRVAFIPNVEGSDVARKDNLNRLVWAAQQTLKPKEATDTVLKWLKQSSDKWEIPKAVSEFIASTELHMKILRVYSQRVLNLKTSERLVIGNGKIIGPILDTELFGIEDFGLIDRFNAIQYGDKLRKSLTSNSHELEEDFNSDTLLKLYASLLPRQSKTRFKLPEDAKHAHSVVKLKPNRDDLPSFEINAIVDPASRSAQKLAPILILLRNTINCNMQVFLTPVTQHSDMPVKNFYRYVVEPEVQFLPSGEMAEGPFAKFTGVPANSLLTQNLQVPENWLVEVVRSVYDLDNIKLSDINGPVHSEFELEYLLLEGHCFDSSTGAPPRGLQVTLGTRENPVLVDTIVMANLGYFQLKANPGVWTLKLREGKSADIYDITYAEGPNTVHKNENTQVVISSLKSHVIKMRVTKKPGMSQMDLLEDDNSQQQSGIWNSIASSFGGGGGGSAGDEDSETINIFSVASGHLYERLLRIMMVSAMKHTKSPVKFWFLKNYLSPQFIDFLPHMAKEYNFQYELVQYKWPRWLHQQTEKQRTIWGYKILFLDVLFPLSVRKIIFVDADAIVRADLRELYDMDLGGAPYAYTPFCDSRKEMEGFRFWKQGYWKSHLMGRRYHISALYVVDLKRFRKIAAGDRLRGQYQALSQDPNSLSNLDQDLPNNMIHQVAIKSLPDEWLWCQTWCSDSSFKNAKVIDLCNNPMTKEAKLTAAQRIVPEWKDYDSEVKQLMARIEDHENVEHDELQTTLPSSKETTPTPAAAAADGAKHSEL

SEQ ID NO: 3715 - protein, 1509 aa, Epicoccum nigrum
MRGSAPLLGAKALLALSAISRIGALADSNINVALKASFSPAPYLVELLETAADENATAYYPLLDRIAEGWLDDLDTEQKLYNKFVDILQSDGHITDPETLASFNLALSVRSAAPRIQAHYQFFETSVEPSLFGDQGRSCGVFVTLNGEQYCTPDTNDGDPRGKVGNEHTDELPFDRVLGNSSALPTIVYADITAPRFKLFHRTVSKSAREGKTSYRVRHRPSMWASSTPLVVNGYGVALQLKRTDYIVIDDRQEANSGNDASQKPLATELDEDTSDLQPLAKDDVADLAEKAASFVLQSDQPMDTLLKMVRDFPKYTSTIAATNATSDFLTEHYSNRELLLPTGYNVIWINGVQIPARDVNPYALLAHLRRERKLINGIRSQGLSGPDTISLLSHSAITQGQTGDEPQRYDFRDEAEGGKVIVWVNNIEKDSRYQSWPEELRALLQRTYPGQLPNVRRDIHNAILPIDFTNPAHVSTVIDTIVGLVRRGIPLRWGLVPQTPTASAEEQAKVVYYLQHTYGLSAVTKYLFTSSEAKKLAAPDKASFETAVKAGTLRTDREGNARETLEFEDILVSGALGEKVEQAKHYLDRLAANKPNAPAFVNGVPVALGDNWLSELSQRVSTDLRQIQQAVFEGNLKEDSWVPQQFLLQAASKRNPLIIPENEKEVKLVNMADFEDKHGKVFAQYPRVEAEKTASKSEWAHLTVFGDFDTESGATLLKSVVQYRQANPNVEIVMLQNSDAGQSGISDKLLDAYVNAKSQLDSNTLLEILSEQVEKSPTTERSTLLRKSSGALFEYLDLKTGQLAVLINGRLVGPIPEDKVFSSEDIEALVSYETNKRIEPLSKALADLQLAEMIATPFDAAKIQSLVALSTISDVPEGIFETASTLRTSVFGNWSADHTAIIKGTKENAIFHIVASIDPATETAQRWVPILNTLSEMEGTYLKLFLNPKQTLQELPVKRFYRYLLGSKPRFNADGSVDNFKAQFKGIPKKALLNLGMDVPPSWLVAPEESIHDLDNIKLSSLPAGADIDAVYGLESILIEGHSRDTTNGGQPPRGAEVVLSTEKNPHFADTIIMANLGYFQFKANPGFYKIQLKNGKSQDIFSLDSAGAKGWAAQPGDESNDLVLMSFQGTTLFPRLSRKPGQEDADILAEEGSVVSELATKGTEKVNKLLGKMGINFNSEKVFKKGAELLAGSKPASTQADINIFSVASGHLYERMLNIMMLSVMKHTKHTVKFWFIEQFLSPSFKQFLPHMAAEYGFEYELVTYKWPHWLRQQSEKQREIWGYKILFLDVLFPLDLDKVIFVDADQIVRTDMYELVTHDLHGAPYGFTPMGDSRTSMEGFRFWKTGYWANFLRGKPYHISALYVVDLVRFRQLAAGDRLRQQYHSLSADPNSLSNLDQDLPNNMQFNLPIHSLPQEWLWCETWCADEDLATAKTIDLCNNPQTKEPKLDRARRQIPEWNVYDEEIAALARRIGGEKETVQQVVDVQAEEQVREKQEKDEERKRDEL

SEQ ID NO: 3716 - protein, 1591 aa, Ramazzottius varieornatus
MDNTWMLLVCFVVLVSCCSCADDERAIKLKPVTAALHTQWAQTPLIMEAAEFFYDENPGMFWSFVDRLRDVIGTKSRTWTEKEQHDVAISIGLQLLSPVKQNFLTFAMALRYYSPRIEMYRQILLSEVSTPKGCKDVLVDFGGGLVSCGVKEFADTLQTFDASKTSDRKNPKVISVDHQYPGSSSSATTVMVYGNLLSPVFYQVHELIMSENTDFRFVFRHHLDAISSSHYSKVRIPGYGVELAIKSTEYKAQDDRKIKEGKAGDQAKPEEEAVDDELDTDIEGFDFGKLKSRFPQKKDQLEQMKSFFLQSTGTELQQLKAWQFQDLSLQAAERALKVAALHTGSATDALRTVRDISQNFPSQAPTLLRIPVQELVKAEIERNREYFAHYHNLEHGSAALFINGIQYDTDLLDTFALFDKLREENRLMESLHSFGIRGSDLSAVLELDLRPTESAKYGVDIRHPAVVWINDLEKDKRYADWPSSPRELIRQSFPPTLLKPIRRNFYNLILVVNPANVSDSRDILKLTESFYVHRLPIRMGVIFVTNSDAKIDGTTDASVAIYNSFKHITEQKNGATALSFLTDLYTKAVKDGQVVADEVVKYFKQKYPQENPDAIFGPDSVYNSGRNDGRQFIEKLNIGEPPLVLLNGVQLDKSKLTADEFENEVLQNLVGVYSVLQRDVMSGQLTDHSNVIEYLMAKPHIVPRLNSLILDPPEFRFLEFGGKSLDPEKYTFSYFEALKAEDRTATMVATSFYLVKHEEEEAHPVTMWVVADAETPAGRELMYNMVKHSKTSKNVRVAFIFNPSETESIEKGMQLTKAIQVALETQSMSLARNFITKLLKEENVAEIATGTKIWEDFEVNGMDMKAFTSGLKELSSDFLKIHGLFAREELNLSPGENVLIANGYIVGPVKSDFGMDDIALLEKYIESYGATKLSNELHRLNIFRTADQLSDAVMMTSTLLSGLGSQEEAKKRTKVQYSEMAHSVINIEQRDTDSPSFDITFIVDPVSREAQKIIPVLMVLHEALNCRVRVFFNCKDKLSEMPLKSFYRMVLEAKLTFTENGSIAPNYALARFPALPQTALLTMNLQAPDNWLTEATSAVYDLDNIRLTELVDGWGIHGGFELVNLLLEGSAKDAATDQPPRGTQFVLGTRNQPEYMDTIVMANLGYFQLKANPGAWILKLREGRSHEIYSIASAEGAEKEGSDEEQQRVVIGSFNTKMMKIYVKKRPGMEREDVLSEKKDAVESEAGIFNSISSYWSKDEHKSASASDDVINIFSLASGHLYERFLRIMMLSVVKNTKTPVKFWLLRNYLSPQFKEIIPYMAEHYGFEYELVEYKWPRWLNQQSEKQRIIWGYKILFLDVLFPLSVKKIIFVDADQIVRTDLKELRDFDLEGAPYGYTPFCESRQDMDGFRFWKNGYWASHLGNRKYHISALYVVDLARFRKIAAGDRLRAQYQGLSQDPNSLSNLDQDLPNNMIYQVPIKSLPQEWLWCETWCDEASKAKAKTIDLCNNPLTKEPKLASAMRIVPEWNTYDQEIKRLIDEFYAVRQLTGENAGEPVLREAVPEDTFGGNDADNEIPVHSTGHTHEHGDEL

SEQ ID NO: 3717 - protein, 1431 aa, Hirundo rustica
MGGAGGAASKSWKEKHPGSKPFTIAAAVCMEDGNEKFWQFLETVRELTVYKKGDSEYSYYNLILKKAGQFLSNLQINLLKFALSIRAYSPTVQMFQQIAADEPPPEGCSAFVVIHEKHTCKTNAIKKLLKKATKRPRPYLFKGDHKFPALKEDGPVVILYAEMGTKDFVKFHKILSEKAQKEEIVYVLRHYVQQKPNSRKMYLSGYGVELAIKSTEYKAVDDTQVKGANETKEEEDEEEEEESDVQGFLFGRLKQMHPDLKNNLMEFKKHLIETTNNMEPLKVWEMQDLSFQAATRIMSAPVYDALKVMKDTAQNFPIRARSLTRVPVDKKMQNEIEENQKVLFVDPVQEDTGDYMKLAELFYHHDVPLRIGIVFILSTKEEIDGNEDAGVALWRTFNYIAEESDTSQAFMSIINMYHEVKGGNVLTVDDVKHVLRSEYPHADVQSILDVHSEYDEGRKAGATFYKKSGLGPLPQALFNGVPFPREEMDAAELETLILQRIFDATGFFQRAVFMGLLDDHVNAVDFLMDQNNVVSRINPRILGAERSYIHFRSTSVPFHVEDFSTFSFLDSQDKSAVISDNMKYLTKKDEDALYAVTVWIIADFDKPAGRRLLSNALKSLKTSSHTRVGILNNPSSKIQEDNTAIARGILAAFLTQNNSNLKSFLSKLSKEETAKSLAAGTKIVKILIPGMDGDTFEKKYNTLGLDIIKTHQMFCQEVLKLLPGQMAVISNGRVLGPLDENEFSAEDFNLLEKITYSTSAEKIKAIVKEMGNSSKSGSDLIMKIDALLSSLPKTETRQDVELLKEQHSVVKVKPQENDPFYDIIAIVDPLTREAQKMTHLLIVLKDIINMKLRLFLNCRSKLSEVPLKSFYRFVLEPELTYGINKHLPSEPIAKFLELPESPLLTLNMITPESWLVEAVNSSCDLDNIHLQEIKGAVTAEYELEYILLEGHCFDVTTGQPPRGLQFTLGTKKNPVMVDTIVMANLGYFQLKANPGAWTLRLRKGRSEEIYQVFSHEGTDSVADLTDVIVVLNNFRSKIIKVQVQKKPDKVNEELLTDGTTGKKGSVESVARFSEEIPADEKKKESDILNIFSVASGHLYERFLRIMMLSVLRHTKTPVKFWFLKNYLSPTFKDVIPHMAQKYGFRYELVQYKWPRWLYQQTEKQRIIWGYKILFLDVLFPLAVDKIIFVDADQIVRSDLKELRDLDLNGAPYGYTPFCDSRREMDGYRFWKSGYWASHLGKRKYHISALYVVDLKKFRKIAAGDRLRGQYQALSQDPNSLSNLDQDLPNNMIHQVAIKSLPQEWLWCETWCDDKSKKKAKTIDLCNNPQTKEPKLKAAARIVPEWVDYDSEIRNLIQQIEREKKNLTSLFQKEYLNTLQNSIRVVTLLVNSSCSILGKPCSPLVPFAIVSKNLSSKQKESMNSNHALIIFY

SEQ ID NO: 3718 - protein, 1508 aa, Madurella mycetomatis
MIRLSQLPWSLAATILAAACLSSTPAAASPSVNVALKAAFPSPPYLVELLETAAADNTTAYFALLDRISKGHFAEAKTDKALYDRFVEVLRDDGHMGAEALSTFKLALSMRTAAPRVEAHYQYYETAVEPSLSGAQDACEQWFLVDGKQYCSPSLDAAHGEVKQSSQERTLPFDRKFGTGSRDIVLYADITSQDFPAYHEAAMEISRKGEGSYRVRYRRSRAHPSEPLTVSGYGVELALKRTDYIVIDDRDTGAGKAPGDEAQKPLGSSEVVLDEEEEITDIKPLEKSELAALGMKAASFIMQSESPFDTLLKLTQDFPKYSTSLDAHNVSAEFEAEHRGNRALLVPEGMNVLWMNGVQLIDRQIQPFGLVDLLTRERKLINGVLDLGLTGQQAISLLGHEKVAQAKSGEEEPRRFDWRDQTEEGRVIIWLNNLEKDKRYEDFSPSIWSLLQHFGHGLPQIRKDIFNLVVPVDFTKPEDIKLITTQLLAFMKRLIPVRFGLVPLTPTGEAVDQAKVVYHLLENYGLAATAFYLEKSLELKKTAKADEGVFNQAIKDRALRPESTPLPFKDIFTSEEHEKQIHLAKRWVERLRADGEVPSLFFDGFAIPRDDNWLKAMNQRLMMDLQAIQQAAYFGMVNDDIWIPGHFLQNAITRRNTFIFPEDSKQLTVLNVNKLYTEHHDVLSNIPVIEADKESAKEDWAALTVVADLGSIEGQKLLFYALQFHQEQSGVRLDIVHNPKDLSRSPSQINARIKMQGGSLSTVSRLLDLETILESGEAEADPAFDAALADFLASTNLKAGDNVLMLNGRIVGPILSADHFKKEDFEQFLEAERTSRILPVYKAIEDLGLADKVSGPLDAAKLTSVTALSSISDLPQGIFDSASPIRIAAYREWNSTHTSFQVGDASTATIFFVAVINPASEVGQKWAAVLKVLSELEGVHLQVFLNPVDGIGELPVKRFYRYVLESSPSFDENGKVKALSASFERVPPDTLFVAGMDVPPAWLVTSKISVDDLDNLRIKDIKAKRGTDQIKAVYELENILIEGHSRELPTGQPPRGVQLVLATEMDSHFADTIIMSNLGFFQFKANPGVYNIRLKEGRSSDIYSIESVGARGWTPVPGDETTEIALMDFQGTTLYPRLRRKPGMEEEDVLGEAKAETSGGAAMDFVSKGLKFAEGILGRGNKPTETKSLSDTEHAEINIFSVASGHLYERMLNIMMVSVMRHTNHTVKFWFIEQFLSPSFKDFIPTMAAEYGFKYEMVTYKWPHWLRQQKEKQREIWGYKILFLDVLFPLSLDKVIFVDADQIVRTDMYDLVQLDLKGAPYGFTPMCDSRTEMEGFRFWKTGYWANYLKGNPYHISALYVVDLARFRELAAGDRLRQQYHALSADPQSLANLDQDLPNHMQFQIPIHSLPQEWLWCETWCSDETLADARTIDLCNNPQTKEPKLDRARRQVPEWTEYDEEIAALAKRRREQQQQQQEQEPEETVQKNTKSRRLDEGGAAETGHVIDEL

SEQ ID NO: 3719 - protein, 1557 aa, Lobosporangium transversale
MRPLGSPLRTSVLALALVTLQVMTHADHSPPIQVSIHTPWAAPPLLLEILEAVAVENRTSYYPLMRQLTSPDFLKTVSSPQDLYGKSLEIIQSQGHLHRQAISSLKWSLAMHTTAPWIEAHYHLYNSTIVPDRASKGGFDPNCNVWVDWYDHQVCTASELEAIVAKGLDQYSKKASSKPTTMDLDHVQSSRNDPSLFTILYADVYDGEFTKFRKYLDTLAIEHGLQYSIRYRPSVTNASERPLSLAGYGVELALKNTDYIVIDDRDLGHNDDDSAFGQTVFSADTEQILFEGEGPPSVEPVSEQDLPSLDQLTAQFVLQSEDPLKALVAVSQDFPKYQRKLSKITLNETLSRAFYKNMETASGQNSPKIWLNNQPVPHHKMNPFNLIRLLRRERDAIGSFATIGVSTKKAVDLLTDFTSAAKGDSGAEVPTGVFDVRDKSEEKDLIVWLNDLEKDQRYRGWPGLEALYRPLYHGQFHQIRKNIINSLLVLDLSSPRSLEVIGFEIFNFIQRMVPFRFGVLPLVKSDNGEDVKMAMLWRHLVSRHGVRGGIEFVKQTIILHVQAGDDIPSAARKAFEASSKLPKLKTSETPELMYDEVIAPDSIYRVWLKSVRAMEEQIGITAPSHFVNGKFFAWHEDHSQHLMSQAPRQTGFLISRLMQGELNDSVDVYEYLLTLPGVHPRRNPYVFVSDDAPPKIIDLVQGQKSPFVDSLSYFTADGSTDQALTLHIAADFDSKQGLAIGLAALSALEANEYPVRLAFIQNGQYSEETLPSLANFVRQSCIDRKILPLGFWRTLLQGINDGQPFSESFVIASGDHPEIAAIAFEGTKGLEEQSDRARHLFLKDTLKANEGEAYIIANGRVVGPIHDTFDADDFRLLINYEKEQRVEKVKKTLEDAQIATTSSNIMKASSILLRAGQQPDQGLYDINQPLVSRERFFEELDFEHAGFTVNPTVYADNDPILFHFTAILDPASELTQRWAPILMVLSRLEDVRIDVILMPHLKLNEAPIKRFYRYVAEPELKFDTNGEIVPPSAYFAGLPEATLLTLGVDVNPAWVVMPKVCIHDLDNLKLSSLTGSARKSGVKAEFELRHILIEGFARDLTQQAPPKGAQFILGTKSEPHVADTLVMANMGYFQLKANPGVWEMVLRPGRTTEVFSIESIGSEGWVIGAGIKNDKRDLVIANFEGLVLYPRLIRNPGMEQANIQDESSNRSGGIWDSIKTTLKGFTGKNVKTRAKETADINIFSVASGHLYERFLSIMILSVMKNTESRVKFWFIEDFLSPSFKDFIPHMAKKYGFDYELVTYNWPHWLRAQTEKQRIIWAYKILFLDVLFPLDLDKIIFVDADQIVRTDMKELVDLDLHGAPYGYTPMCQDRKEMEGFRFWNQGYWKEHLQGKPYHISALYVVDLVKFRQMQAGDRLRNHYQQLTRDPHSLANLDQDLPNNMQAEVPIFSLPQEWLWCETWCGDEGLAKAKTIDLCNNPLTKEPKLDRARRQIKEWESLDNEATEFAKEVNAKLKAARQTQQQQASLEDINISNNQGQQTMPFKDTEGSHTTKDEL

SEQ ID NO: 3720 - protein, 1492 aa, Aspergillus japonicus
MVSGSTFVAFWRLSTVIVASALSCLVHATTPSVNVALQASFDSAPYLIELLETAAEENSTSYFPILDRIAEGAFDDAVTDKELYDRFLEVIHTDGHLRTPEALSSFKLSLAIRSASPRIAAHYQYYNASVQHSLAAAQDAVCPVWVHAEGKQYCSSSLERAQQGVMGPSDPPELPFDRVLGDSSLPPAILYADLASPMFKDFHQSLTALARDGQFSYRVRYRPPQHWSSRPLFVSGYGVELALKRTDYIVIDDRAAEERTSDASGSKKTVNGEGDDLDDLRPLSSSEVSRLGPGTVGYVLDSESPLDALVELSQDFPKYSARIAAHNVTKELLQDIQSSRLRMLPPGFNALWINGVQIDARQVDAFTLLDHLRRERKLIEKFRSLGLSASESVDLLSHKFLAAAMAQDGPQRYNYRDEIEGGGVIMWLNDLEKDARYESWPSDLGGYMQRVFPGQLPSVRREANNVVIPVDLAKLDDATLIVKSIQVFVKNKIPVRFGLVPITSSPGSIAQLKVAHYLQDTFGLASLMSYLETSVSKNKLGSPDKTAFQTATADRTARPDKQSLSLDEVLKNDAVDTIVSRTSEYLKRLGVTGEASHSFVNGVPILRNENWAQELSARVSRDIQAIQQSIADGELAEDTWLPSLFLSDAFDRRNPVIVPEDPKDVRVVNMAQVAETYGELLGSLPRIPSIQEDVLASSHVIVAGDFSDEPGFNLLSAALGSLKNHGEAEVLLLQNNGANSSIWTGSYTIHRYLKKKDDADAAKLLEELTGTDLWSTSDKQEAENFWCAHQPLVKGLGLSTGANAIIINGRVIEVPVDVALTSDDVDQLLAYERQKRIAPVAKAAEALGFGAKLSGPLTLAKLTSLAALSTVSDVPEGIYESTPDIRVNLFERWDNARSTITVSNSEDPVITIVASIDPTSETAQKWLPILKVLSDLANVRMRLVLNPRDELQELPTKRFYRYVLDSEPSFSQDGSVARPTASFSGVPVEALLTLGMDVPSSWLVAPKESVYDPDNIKLSSVKEGTNVDAIYALEHILIEGHSRDLTMKTAPRGVQLILGTEETPQISDTIIMANLGYFQFKAQPGLWTINLKPGRSERIFQLDSLGNEGYSLHPNDDTSNEVALLSFQGKTLFPRLSRKKGQEMEDVLETGIKSGSAMDYVSKGLNFASGVLSSVGINGSPKDVAGGKQADINIFSVASGHLYERMLNIMMVSVMRNTEHTVKFWFIEQFLSPSFKSFLPHLAAEYGFSYEMVTYKWPHWLRAQTEKQREIWGYKILFLDVLFPLSLDKVIFVDADQVVRTDMYDLVALDLEGAPYGFTPMCDSRHEMEGFRFWKQGYWKNFLRGQPYHISALYVVDLSRFRALAAGDRLRGQYQMLSADPGSLSNLDQDLPNHMQHHIPIKSLPQEWLWCETWCSDESLAQARTIDLCNNPLTKEPKLERARRQVPEWTVYDEEIAALEKRVRSEVRQEEIREQDQEVEAEAGAEWDKDEL

SEQ ID NO: 3721 - protein, 1581 aa, Tulasnella calospora
MRLGPRTAALGGGLLLTSARAATSPPVNVRLTTSWNTTNLVAEIIETAALEDPNLFFPLLDLLVHPGTFEYPLVTEPPENIYKYALDAIKESNLLSGDGVLSSFEKSLALRAASPRLEAFHSYYTQRYGDSTPTKKQDPSCVAWVDWYGQRLCRPDDVYAAAGYSCPGWVVFMGHRVCGVEDIDQTPTDESKFRDPPQLLTFDHVFPTSAPPTAKTAILYGSVSSPNFFSLHYALYQLAKREDHPIKYVYRHLPPLSSAPANPAYLTGYGVSLDLKKMDYLALDDRRTRGAASNKAGNAQKVMSDKDEVTPEEDPILSLLPEATTPIDLGKPLTNEELTALGFKTSQVILESSDPLTALKQLSQNFPKYATSISHRVNPLNESIVVALGENMRKVQSGANMVWLNGRPVQPTDMNPFALLRLMRKERQLIDQLTKAGLSRSEAIEVLTHPSLTKPSAGQLLEGIFDASDRKDGGGVIIWLNDLEKEERYSRWPSTLDTLMKPSYNGQVPPLRRNLFNIILALDLSKTTSVSTLNLVTSIVQRGYPFRFGIVPIAETEDGTGNQWHSGIWTLMRDSTNIAKVFYYLNEQFDPLQAAGIYMKAADARRPIVSVESLERVFTALAVSESEDPKVPWKTFEEVTSSWDSADLISRLTKYCERLALTNAASKGGHLFVNGKYAPLSDDWTKNLQQEVAEQTQFLQESLWSGEITDSEELDISTWFYDLPISGASRNAHIYPSSSGASALRVIPMIDLGLPNSFVYHPESKAAPLSMWIVGDLDSQGGIELMMEGLQAMTPASSFRISFVHVPNPSNTAPPKIAPALLDVLLSNPLPSLDDVMYLISSLSTDSEVVEDVLRKVRGENGQELTIQRALEIVGKGKKLAEKIGFKAGDLGIIVNGRVVGPLPPSSFTASDFHTLASYEKNKRVAPIEEALVLALNEEGADVSSILLADQMPESGMVDMTPSPRARQYLQLESANASFAIGNNETAMFHFGVILNPVSDTAQKYSSLLEWLADDDLVHAVVYLNPPHQVEEMPLKRFYQYNLTPRLTFNSEDKSLSQAKVEFTGLPPDPIYTLGMDVPQSWLARPSESVHDLDNIQLSSLGESEQAIGVEAIFRLDYLVIEGHARDAATRAAPRGLQLQLTSESNTVADTQVVANLGYFQLRAKPGVFQLEIRPGRGQEIFGMTSAGNEGWDSPSVEKAGANITVASFEGITLYPTFHRLEGMENADVLAEAPEESSFFGNIASKVGSVFGSSKTTEIVKRQADINIFTVASGHLYERFASIMILSVMKNTKKTVKFWFIENFLSPSFLEFIPHYAEEYGFEYELVTYKWPSWLRMPTEKQRIIWGYKILFLDVLFPMDLKKVIFVDADQIVRADLHELVTLDLQGAPYGYTPMGADSEDMDGFRFWKTGYWKEHLRGRPYHISALYVVDLVRFRQLAAGDRLRGQYQGLSADPHSLANLDQDLPNNMQAEVPIFSLHEDWLWCETWCSKDRLHRAKTIDLCQNPKTKEPKLSRARQIPEWEKYDSEIANFARKLADSGLIRSHVAAENVDALAGESKQSETTTEQDGSKESHGKAHEEL

SEQ ID NO: 3722 - protein, 1349 aa, Zygosaccharomyces rouxii
MKLITAGIVFLTVLKTVVCLSVSLQSASVSERFKIWTIAQHLFRGDKKGILATVYPLVMQLDEDLEDTPVANLCEVVSARLSELGELDLASLMPLYCQWYPMGLPFPSSYDHLKSETYFVLNNKRYDHSDDVFYLKSGELKKQAQMPDEAVVAVNDVIIGNNPEAPIVYFYGCPDDDEATFEEFNRNLYSEATETGKLRFIWRSTCHVRNDTEIGPFPVELSIRDGKSNIDVLPIDHLGVPHQFDKSKYGLINPTTNQLSDLDLKVAHLIAQKYNSSKDFNSTLDYARGIINNFPLLVPELITMKNNTEAIMDSNTNLTESGVDHKLLGLFINGENWRFSSLDQYTLLNALESEYRRLKQLLSGLVKMYSKSTLVTAKDLITKFSQISIPNLQQSQPIKVDLHRISGFSESVIYFNDIEIDDQYRELTTDINKFFEKSKFGEIPEYRHNWNELIFVIDFNNLEDPDTKLALDGLKRAIGVITQGYPQRIGLLPLNTGASDDIIRKIYELKDRDLLELEDFLGNELIRGRTISSDYTNTPGVAKLLRNLQINETSIIINGEIYPFRKNTWHYLIAKTIKKDVGYLKRELRKYIRHDGEKAQPIIDVRGVLHMKSSETRHMKYTPDYFADSTYTTLDNSALQVWDERILEYVKGKEYNLLHTITLVDDFNTLQALKRLHNLIGIKFVGVKFRIIHSGALESNWKILKKISSKPSFLKELKSLIKKSARVISTNELNRNVLQSWLVDLKPEFLSAKSFMLINGRFIHFEENEIPQIKLFETTIKREAQRTIDALEALETILPGVTSNKIDPEFMENISATLTKMFYQGTELYGNGPVFTTESTLSRFDMSEILQVNNFTIFESSNDGDKPIDVVLVIDPLEERSQRLLSLITDIQQLPFLNVKIVIYPTADLKFMPIDRIYVPNFPDELGGKLTDIESKFDVAVEVPRNFVLNDNKNVGGYLVEVHAFDERQPVSEGIIDGLGNVCLELVDSTGKSVDKTVTMMTFGYGQFIVPKLGSNFTIKSCDPRYKVVSFSSDARADYMPMESVNVTSLNPVVTYVKLQKVDEVAKITVEESVINIFTIPKNEHSFEQEYQKMVLHILHSPQHGYMGVKFWLLDQPFISQSLRKFIDVINLDPKLDGNIELVKYEWPPWLRPQRFLERRMDAYKILFLDLLFPQSVSRIIYMDPSISQLPDPFKLNEKVKTKLPFAMYKMVGHGYWETHYWAQRLGDRNLKFHSVHPAFVVNLQQLREYNGGNKLRIHYQRLSADVLSLAKIDQDLINDAQEEVPIRTLSSSTIVFLNTKNQNSVNAWLTNFQKLAAKEETAGFATDENPGIKQEGTRETIDLMHDEL

SEQ ID NO: 3723 - protein, 1520 aa, Megachile rotundata
MQLIILFYFLLLCSTHLKADKRINKYVTTVIDAKWRETPLILEAAEYLNDENPNYFWKFIDTFANRDLRNVTARESYDIIIEFAEKYLSPSEIALLKLGLSLRIYSARVEMFNQMAENKNVSVFNCYNVVNIGGVLTCSLEELENLIDKETWPKPDTYSIDHRYHTSQQSEKVIILYGQVGTPQFSSFHNALKHLAETKGISYILRHYLKDREGKNVRLSGYGVELQMKSTEYKATDDSDIKDNADKDSEMANDNIEEIDGINFMTLKNLYPDKQVELDKLQTHLLESSHEIGALKVWQFQELSHQAAERIMNSPTNEAINVLTDISQNFPMQAKSLIRTKVNSEMKKEMKLNQAIFSTSLNIQPTDTALFINGLFFDLEAIDVLSLLESLRSELRVMESLRKIGFSNKKMSKLLALDLSTNMDKQEFAMDIRDSAINWVNDIEQDSAYARWSPSLTELLRPTFPGMLRNIRRNLYNLVLMVDPLSRESTPLITLAQSLYLHSAPLRVGFVFITNYDTSITGLTDASIAANNVYHYFAETKGSEHALQFLIDLGNYIKPDGATVEDVKKALRSQDSSANVNYILGEESEYDIGRHLASDFVKRSGFKKFPQALLNGVPLSSDVLNAESFEEAVLSTIMSQTPALQKAVYRGEITEGDDVVDYIMNQPNVMPRLNERILKSEKHTWLNLIGTLPNDEEYTKWSPEDLSTWLMTKLNYLFVPRRTNVHHLYTFWIVTNLNDAKGRQLLREAFEYIESNADVRITIIINPATDTDNAVNAIDINRIALTAINVLPTDKALHFVRNIIKEDVVTDIISGKFDIQEEAVKEKLQQETEELSVHQYYVKTVLKLAKGVTAIVCNGRLIGPLDENEEFTSEDFSLLERFSQSSYGDKLFKKLIKGQLLEDDEYEKSEITDDMIMKITSLLVSHPQTRARFDVPFHGDEYSAIKIPTTNPDEVAFNLIAIVDPVSRGAQKLGPILKTLQQSLNCDIKVFLNCLDKNSDMPLKSFYRFVFEPQLQFNSDGHINGAMAKFTKLPTSSLLTQYIHAPENWLVEVVRSIYDLDNIKLDNVAMGVHSEFELEHLLLEGYCFEAVMGSPPRGLQITLGTEKRPLMVDTIVMANLGYFQLKANPGEWILRLRHGRSAEIYDFTTVGGQDVVQKGNEVKVVISSLRSHVLKIKVSKKPDKVEMDLLSEDDKSSGLWNSISSFSKFWTFTTSDDSEDMDEKLNIFSLASGHLYERFLKIMMLSVIKHTKSPVKFWFLKNYLSPTLKDFLPHMAKEYGFEYELVQYKWPRWLHQQTEKQRTIWGYKILFLDVLFPLNVKKIIFVDADQVVRADLKELANMDLGGAPYAYTPFCDSRKEMDGFRFWKQGYWRNHLQGRAYHISALYVVDLKRFRRIAAGDRLRGQYQALSQDPNSLANLDQDLPNNMIHQVTIKTLPQEWLWCETWCDDASKKYAKTIDLCNNPMTKEAKLQAAVRILPEWVEYDEEIKALQSKIENENRQLEKEAHETLEDSTKHEEL

SEQ ID NO: 3724 - protein, 1457 aa, Blumeria graminis
MIGLNLQCVWTGILLVTTCILQNRQLGFVQAGPSINLELKTAFSSAPYLLELLETAAEENSTSYFPLLNRVADGYFADASSDQKVYERFLKILQDDGHITEPADLSAYQLALSMRVSAPRIESHYQYYRTAFCANIDERNIHELEFDRILGNVSAQTAILYADITSPTFGEFHHMLMNQALDGNLSYRIRHKNREFTSVSKPISTSGWGVELALKSTDYIVIDDRGEEKDEGKIENENSENTDTEFKSKVKLNEDEVEDLRPLSASELSPLGVKAGSYVMQSKSPLDTLLSVTRDFPKYSSQLVSHKVAPQFLDEHRYNRNQLVPEGHGIIWMNGIQLIDRQIEAFNLLDVLRKERHLISGIRALGLTAADAIRLVSHPLVSTAQSTNEDQRYDWRDEKEGGNAIIWMNNLEEDPRYAEWPRALSAMLQRVHPGQLPTIRRDSFNLVVPIDFSEPEDIALVVNTLLSFVTRRLCVRIGIVPITLTPSAVNQAKIIYHLTNTYGLQSAVTYLVRSSEAKLEEGFSSLTFDHATRVGKPINEKPQLSLKEVLESDEIRKQIEASKKWLHRLSAEDSIPPVFMDGVVIPRLDSWLQTAIFHGVFEEEEDQVWLPSIFLDEALSNRNPLIIPENPRSLKVFDLHVLLSKYQDLVNELPRLEADPSSIHSDSAYIILIADLNSIAGQKLAITTADFGEKTLSIDLRIAHNPLSCTSSGLSDNIYAHLRDRGFSGWERNGSLKNVLTSESVSRDEALQTESAKFWKSLSPFIETLGLLPGQNAILINGRLVGPIPDSSASGWSLEDLITLLSYERRKRITPTHAAMIDLGLGHKIQSVVEAAKFSSKVALSTLPDPTEEFFEQPSISRMNKFDMWKSNHTAIEIGNPETSDIQLTVILDPASHQGQRWVAILKVLSELQGVYMKLFLNPKERLTELPVKRFYRFVLESKPSFDSNGDVKAPRAIFKDMPQSALMTIGMDLPPTWLVAPKVSVHDLDNIKLSSVKIDVEAIYELEHILIEGHCHEAIGGRSPRGVQLVLGTERDAHVGDTIIMANLGYFQFKANPGYYRIRLQEGRSSEIFHIDSVGAHNWKEFIEENSDVIMMSFKGTTLFLRLSRRIGMGTEDVLEPSTDSNRGLVSQGLKLAQDLFNWKGQQPTNTQADINIFSVASGHLYERMLNIMMVSVMKNTNHTVKFWFVEQFLSPSFKDFIPYLANQYEFQYEMVTYKWPHWLRAQTEKQREIWGYKILFLDVLFPLSLDKVIFVDADQIVRTDMIELVQHDLNGAPYGFTPMCDSRTEMEGFRFWKKGYWEKFLRGLPYHISALYVVDLRRFRRIAAGDRLRQQYHALSADPGSLANLDQDLPNHMQNVLPIHSLPQEWLWCETWCSDDALVNAKTIDLCNNPLTKEPKLDRARRQVPEWTIYDDEIALVAKQRQQVPREEDRSMEKIDLEVEVQKAQQQRDEL

SEQ ID NO: 3725 - protein, 1445 aa, Uncinocarpus reesii
MPFTYPSSSWPLGLFLGTLLLPSVRAGPSVNVALSASFSSPPYLLELLETAAAENSTSYFPLLDRIANGVFVDSRTDKDLYDQFLRILQDDGHISDPSALSSFKLAMSLRSTAPRIQAHYQYYNTSVEPSLMGAQDAVCQVWAHYAGEQYCSPSLEHAQQGVSGEQVRYRPSSSGHANQLFVSGYGVELALKRTDYIVIDDRAAEQSPNSENAKATPPAAKDLKEESPADLKPLSASEVSTLGLNAASFAVNSENPFETLLKLSEDFPRHSSVIASINATTEFLEEFGQNQEHMFPPGYNVVWINGVQIDSRRVNAFSLLDHLRSERKLINSFRELGFSASEAVELLSHPIIANSQAAEVGPRYDYRDDTEGGGVIIWLNDIEKDKRYQGWPSSLNALLQRMYPGQFPQVRRDIHNVVVLLNLADGPDVQMLVSQIQTFITRKIPVRFGLVPTVVDQASMQQIRIASYLHQTYGLKTLLTYLETVLEKSKSQTISPDKNSFNAAIHDREHREGENILTFEEILSSDEFEPIITKTKAYLRRLASEEPAPLMFANGAVIPRDDNWIQPLTARLSQDLVNIQQSVFAGLYEDDFWMPNHYLEGAVLSRNSLIIPEDPSMIQILDLNAAYRRYQSELETLPRIPASGDSDMGKWGNLMLIADFDSDDGQKQLSTILEFREKNPEIEVLLLHNSSTNTHGRVSAELFDVVKSTRDVDESTLKSILQPDSERLVKQESEMEPVRNYFGSLSSLAKDLGPLRDRTNIVFNGRVVGPIPSTSLFEVQELEQLLAYERERRLEPVVKAVSSLALKDKIRDPFAFARLTSLVARSTASDMPEDIYDSGRVTRTSTYKKWNNMHSGFSLSNTDDPLIQVVATIDPASETAQRFIPILKVLSELNGVSLRVFLSPTTSLKELPIKRFYRQVLESEPSFNGDGSLRRPGASFTGIPEDALLTLGMDVPPSWLVAPKESIYDLDNIKLSSLKEGANVDAIYELEHILIEGHSRDTTHGSPPRGVQLLLGTERNPHFADTIIMANLGYFQFKAQPGYWQITLKPGPSERIFHLDSVSGTAFGAGPSDGNNEVALLSFQGTTLFPRLSRKAGHEEDDVLEAGSKPNSAKNYFAKGLNFASDMISGMTGTRQDKQADINIFSVASGHLYERMLNIMMVSVMRHTKHSVKFWFIEQFLSPSFKSFLPHLAKEYGFSYEMVTYKWPHWLRAQREKQREIWGYKILFLDVLFPLSLDKVIFVDADQIVRTDMYELIKTDLEGAPYGFTPMCDSREEMEGFRFWKQGYWKKFLKGLPYHISALYVVDLNRFRQIASGDRLRGQYQSLSADPNSLSNLDQDLPNNMQHSIPIKSLPQDWLWCETWCSDGALKTAKTIDLCNNPLTKEPKLERARRQVPEWTEYDDEIAELGKRVAREQQRIRGKKGQEEDVDGEEDGATIMEKDEL

SEQ ID NO: 3726 - protein, 1501 aa, Neofusicoccum parvum
MRVRNWLLTSQTALLLGAFGPQAVCASPPINVALKARFSSPPYLVELLETAADENSTAYLPLLDRIADGYFDGKASEQDLYESFLQLLQDDGHITDPDALSSFQLALSIHAAAPRIEAHYQFYNTSVEPSLEAEQSEECDSWVLLNKKQYCSPELAKEHGAVKDARGDDLPFDRPMTQERRLVPSVLYADITSPSFRKFHKTISKTAVEGRSTYKLRHKPSKTSRHEPLAVHGYGVELALKRTDYIVIDDRQAEEAAKEHATDGAQTVLQDEEVTDLKPLSESELKGLGLKAGSFVMGSEDPLDTLLKLSQDFPKHSSAIAAHEVSEEFLKEHKSNREAILPPGYNILWINGVQIMPRDVDAFALLEHLRRERQIINGVRKLGFTPPEAISVLSNNAIAKSKDNDEPQRYDWRDTTEGGNVIMFLNDIEKDKRYAEWPTSLRALLQPTYPGTLPSVRRDIQNVIIPLDLTNALDATLLIETLQTMVKRKLALRWGVVPSTKNMVAEQQAKVVYYLLEYYGLGAVMQYLEMSLKLKEISEPSKTAFQTVTDSGKIRGTRVAKTFEEVFEDSSIAKRVDGTGKWLSRLAADGNKPPFFVNGVAMPRNDEWLSSMSMRVSADLNTIQKGVFEEKFDQDGDDWLPDVFLANSTLRRNPIVIPEDEKDIKHVNLAQIYADHGDLIESLPRFAVAEDSEWFQWAQLFVLGDFDSRAGTDILADAYQFSGEHGDLETIFIHTGDVTPDSYRMAYLLFRNAGKVVGTEDIPEDFEPSAEEINACAEYWESMKPLLLALKGDLGRESLVLNGRTIGPLRKRRPFTEADFETLLAYERKKRIEPAARAIMDLHLEDKVKSPGAVAQLTSLVALSTVSDIPEGIFDAPPTMRRDVFKFWNDTHTCIKTGDRETATIQIIASVDPSSEVAQRWISILKVLSELNGVHMKLFLNPRERLDELPVKRFYRYVLASKPSFDESGSSRSLQAQFNGIPSEALLILGLDVPPQWVVAAKESIHDLDNIKLSQLKGRSSIDATYELEYILIEGHSRDMTTGMYPRGAQLDLRTTTNPRYADTIIMANLGYFQFKANPGFFNIELQPGRSQEIFSIDSAGTGGWNPSSGDRTKEIALMDFKGVTLYPRLSRRSGKEDEDVLEAPTSMVEDLAAKGAAFADGILSKVGLKGVKTGSSRHADINIFSVASGHLYERMLNIMMVSVMKHTKHTVKFWFIEQFLSPSFKSFLPTLAAAYGFDYEMVTYKWPHWLRGQKEKQREIWGYKILFLDVLFPLDLDKVIFVDADQIVRTDMHDLVTHDLGGAPYGFTPMCDSRTEMEGFRFWKQGYWEKFLKGKPYHISALYVVDLQAFRRLAAGDRLRQQYQQLSADPNSLSNLDQDLPNNMQTVLPIHSLPQEWLWCETWCSDESLKNARTIDLCNNPQTKEPKLERARRQVPEWTVYDEEIAALARKAREEGKEGAAGGEGVAAVVEDKEDEALLEEVKKQAEEVEGEKKKGHDEL

SEQ ID NO: 3727 - protein, 1585 aa, Laccaria amethystina
MLPVLALLAASLTLLAANAASPPVRVSLRSSWAAPPLLAEILETVSMENPDEDAFFTFLERLTDPEIFPSPEKMTPEAIHQAALGIAVSHGFLSNPGSLQAVEMNLALHAATPKIEAFYNFYEDHHKDSKGTLCGSWVDWYGEVVCDAKTLLRLAGREALDPSTGALPLRPRPKTLTFDHIFPSPKDLLERPPHTAILYGSLTSPNFRELLTELLFLTNRLDPHIEYVFRHIPSHAETRNYLSGYGVALDLKKMDYLALDDRNSHSKKLSETIDNDSVDKPATVDPILALIQAHPENVTAPDAKEPLSPEELQGLGMQAAQIIAESPEPLKALAHLSQNFPMYTTALSRRVIVNESIITELHDNSLKAQGGVNMFWLNGAAIELKDTQPLSLLRLLKKERTTISSLTALGLERSQAFDLLTHPEVSESQKGGAILDGLFDASDRVEEGDVVVWWNDMEKDSRYAHWNPSLFVLLRPMYPGQFPSVKANLFNVILVLDLSKTYSVNFIAGAMANILERNFPFKFGLVPVVETEESAKMARLFYHLVNTYGRKRTLTFLKTISQIQIPPQYQSPTVQWETVRTSFEELVNAEVAANPEAIKFNFDTIINTDSDAPLEKINAYVERLGATLATAPRGHAFLNGKHMDMNDDFLRQLQVETQQQQAFLQEKLYEGSLTDENKGDMATYFYDLPTTAKRRNKYIYPANNAPGSLKITNLPELFGKTRFRLEAGSYLYPEESNSVPLSLYVVADLDNDSGLALAMDAIRSITTTSKSRLTFIHNPTVLVTPAQSALSRFVAHLIYKGLLSEATSASLLQALGGGEVVDDSPSRDAVIRKLAGDIEPAEYEALVYDDYVKSTRHIAREFGVQPGQSALVVNGRLVGPFEKGDTFHAADFNALEEYELTKRTEPVLKALESIRPSLAENKVEFSNIVSMASSIIAAIQLPDPSEVGLFDAPQRPRQRAYQLLDSKYTAFEYGNNATALHHIAVLVDPLSETAQKWSSIIQWLSTLPDIFIEVHLNPGRYTDIPLKRFYRNNLIPSLSFDDAGNEIPAQAVFESLPIDPIYTLAMDVPHAWIVRPREALYDLDNIQLGNLSPGDSSVDAVFELDYIVVDGHARESATNAPPRGVQLELVTSDGSPIDDTQVVANLGYFQFKTKPGVFKLEIREGKGRKIYGMKTVGNEGWNSPSVEDVGSEITLTSFEGLVLYPQLDRNPGMERADVLDEGIDDYESGSGNLFVDMSARLMSFFGQSKEKTVDALVPVKPQADINIFTVASGLLYERFASIMILSVLRNTNHTVKFWFIENFLSPTFLEFIPHMAEKYNFQYELVTYKWPSWLRAQTEKQRIIWAYKILFLDVLFPMDLKKVIFVDADQIVRADLKELVDLDLHGAPYGYTPMGDDNEDMEGFRFWKTGYWKEFLAGKPYHISALYVIDLVRFRQLAAGDILRGQYQALSADPNSLANLDQDLPNNLQTQVPIFSLHEDWLWCETWCSKDRLHKAKTIDLCQNPLTKEPKLARARQIPEWEEYDAEIARFARDLAEEGKVQSRMAAADTNVLAGAAVPAAEKGEKGPAGATEGLEERGLGHDEL

SEQ ID NO: 3728 - protein, 1490 aa, Talaromyces stipitatus
MMRASLFALATSLLVLLQQPQSVVASPDVNVALRASFDAGPYLVELLETAAQENSSAYFPLLDRIATGTFEDATTDKDLYETFLQVLIEDNHLQSKESLDSFKFALAIRSAAPRIEAHYQYYNTSVQSTLGTAQDAACPVWVHMDGKQYCSSTLERAQQDVSGDRDPRELPFDRTLGDRFATPAVLYADIASPMFADYHRTLKGLANEGQIAYRVRYRPAHDGVSRPLFVSGYGVELTLKRTDYIVIDDRQAEEKDTTKSNAKTPSAQDLDAEEDESPLDLKPLSSSEVAKLGMSAASFVLDSSDPFATLVKLSQDFPKYSSSIAAYNASEQFLEEYKRNRQAGLPGGRNAMWINGLHVDARQIDAFSLLEYLRRERRLLAEFQKIGLSASEAVDLLSYPALAEVQGNSEVQRYDWRDEIEGGGVLVWLNDLEKDKRYTNFPTTLQALLQPTYPGQFPAVRRDVQNVVVPVDLANTDDVQFVAKYLYAFIKRMIPVRFGLVLTTNSEESKAQAKIAHYLHQAYGLASMLQYLETSLSAEKVSRAHKPSFTAAIAERSLRSGQENLSFEEVLQSDALDTIISNTEKYLNRLDLKGSSPSTLVNGVAMSRGGNYMQELPMQLSRDLQIIQQGLIEGAFSDDDYVPDYFLSKAAQSRNEWIVPEHDSDIVIADICGVADLHNDFAEILRFPADPKHTASNVQLIVVADFNTEHGLALLLSALKFRQTHPGSEIVPLYSSDAGEKVGSIPSKLYELLRHPEPVDFADVLTQIQSRDNTHQADKKEEEQAYWTLVQQLVTDIGLPAGSSSLIFNSRVVGPLPSSVIFKEEDIEALFSYETSQRLGPVSTALKDLGIESKVAGPLNFAKLTSLVMLSTNSDAPEGVFEQRSKYRVDVWKRWNSTHSAVDASTNTKDASINIAAAIDPTSEISQKWLPILKTLSKLAGVNVRIYLAPNGQLSELPIKRFYRHVLESEPTFDENRALARPEASFHGLPQDALLTLGMDVPSSWLVAPKWSIHDLDNIKLSAIKDSSDVDAIYELEHILIEGHSTDMTLRSPPRGVQLLLETEKGSFFADTIVMANLGYFQFKAQPGFWKIELKEGRSRDIFQLDSIGGGQESSGTNEVALLSFQGKTLFPRLSRKPGQENEEVLETGPRPGSAMDYVSKGLNFAQGVLSSVGVKQTDKSESAEKHAEINIFSVASGHLYERMLNIMMVSVMKNTKHSVKFWFIEQFLSPSFTSLLPHLANEYGFTYEMVTYKWPHWLRGQREKQREIWGYKILFLDVLFPLSLDKVIFVDADQIVRTDMYDLVTLDLEGAPYGFTPMCDSREEMEGFRFWKQGYWKSYLGNLKYHISALYVVDLQRFRELAAGDRLRGQYHTLSADPESLANLDQDLPNNMQTMIPIKSLPQDWLWCETWCSDEALKTAKTIDLCNNPLTKEPKLERARRQVPEWTVYDEEIAELARRVASSSSTSPENESEEEEEGEGKVYERKDEL

SEQ ID NO: 3729 - protein, 1677 aa, Albugo laibachii
MTKVVTNKAPIRAVLMRLIVPLIPLFVAFLPQCDSRAIHVNVTASWRSAITYPLTEISEFLAQEDPRLFWQWIDLLGAGDVFSTKMNDAADAETEVVLDVSGDAKSAVTAQSKSWSEMIENKHAMIERIVSKAMELTDTFLASHHSIIKLALLTRSYSPKVEMFRQMALDSVYHTSCDNRISAWAVVSNSKCVLAYACSIKELDALLQKSYEETSACIGPAENDRELPVDHVFVGSGDRDTASQKLTIILYGAIATNSFFDLHETIKPFAKIGRFTYIVRHYNRDSSLPTLLQGYGVSLDIKNMEYKTIDDDEHEKADDDHDDSELDNIDGISSDQKSALSEGLQQLEKESLQKQVDDTSHDEEQSEEWNLNDLGMVATFEILQSKNPVRHIKSLSQDFPKHAKRLAMAKNLLPSDIRETLRQWRISVVSYDYLDTLVVNGIPISATRGSFNAFDLLKLIQQEWSLVKKFSTLGLQEQDIIQLRQIGVAPIAEARYGTEKVVRIMIRGPVDGITPIYLTNIETDPSLARLPKSINALKSPSWHLIQIRRNMYEIGVIFDPTTQSGVEVLREMHFLYSRGAPIQFGILPTSKALLNTVDPQERVELIRLWKRVTLGEQATSFHFSKIIFLIRGQALGDLADESLHSQFTKFLSLMLTLDVGYTVSQLIGIYQKTIADMVETKDEVLAILKSDRLDEEVLSITEFISRKHLPFECHLFNGIIQPGLSLQENLMDNFGREQHVYQSLAREAKLSGKRDLIEQLLEHQDTYNSYFTIYSDSANKVDFHSFVSESNAASSLLNNDLDETLERMLTDHVTYLHPIGSATVTKKETLVFHLSVFSPSACGHAYQGVAELLRTDSNHSSTARVGIVHLHENTPSNLEEDRKKVGQLILDVLSKANTTDEKIMLEAIAHTFKCQMEYKSYEDTKQSLLGLLETFESNYATEWKELVKAHVSLPILKVDPDKQRLSNLLAVSTGQCGNSAAGKLTLSTSHLFLNGRCVDLSDYILGEFDIKDLIAYDLETRTEDAAKVVLKDDDSEMSVQDAGLKSLYLMKVCGLLDQYRHWDRYNALDLLTESGTKNRSMIHIDGDSTLNVVAFLDPLTEATQRMSSILETLQTQLNATIDIILVPDSEYSEFPLRRFYQYVFGNAPLHLGNSILNGAAFRSLPIKPILTMNIDTVEEWNVHTHESRYDADNLMVDPKNEAEVRGTKTVSYILNNVLVYGRCVDVTDGRMIPPNGLQLILHQRFGNEKLSHDTLVMRNLGYFQLQATPGIWSLHLARGRAANLYEIVMNHGDSSTETEVVYSIPVFISDFNTRKTNLVVKKRVGKEQIALLDSDEHDDANYVDEETKEAGTPGSVLTSYWNSVSSLLTGRKSAISTSSDEALKNSKETIHVFSLATGHLYERFLKIMMLSVVKRTKSDVVFWLLENFLSPNFKRSVPALQAEFGIEIRLITYKWPKWLRRQTVKQRIIWGYKILFLDVLFPLHINKIIYVDSDQVVRADLKELWEMDLKGAVYAYAPFCGSRNLGFQFWREGFWKSHLQGKPYHISALYLVDLKQFRKVAAGDTLRGIYEQLSSDPNSLANLDQDLPNFVQHNIPIFTLPQEWLWCESWCSDETKAEAKTIDLCNNPKEKEPKLEMAKRVISGDLFQESWIQLDQEIRESEKRYVAGLQSSDAGTI

SEQ ID NO: 3730 - protein, 1524 aa, Aureobasidium melanogenum
MVRYQHLAVNTALVLGLQAICTNAAPSVNVALKTSFDSAPYLVELLETAADENATAYFPLLDRIAEGHFDHASTDQDLYNLFKKTLQEEGHLAKAEDISSFEYALSIHAAAPRIEAHYQFYNTTVEPTLKSRLDTSCETWLHFNGQQYCDPDLSSSSANSVDQERLLDLPFDRIMGDKQSKTPAILYADLMSPSFRQFHKTVSLTARAGKTSYRVRYRPSLSIPGFPLAVSGYGIALDLKRTDYIVIDDRKAEDSDDTNVDASGAKLTDEDVADLKPLSSKELLRLDMKASSFVMDSSDPFDTLLKLTQDFPKHSAAMSTHEVSEQFRKEHLANREVFLPSGYNVIWVNGLQILARDLDAYAMLEHMRRERKLINSAGELGLTGKEAVQLLSHSSISEAASTQEPQRYDWRDELEGGKVIIWMNDIEHDKRYAEWPDQIRALLQRTYPGQLPPVRKEIHNLVLPIDFADYKDVEMVVESLQSFVKRKVPIRFGLVPKTSSAGSSEQAKAVYHLLDTYGLGVALEYLQKLSSNQGRKLSGPVQSVFENTIKGRKLRKDRVSAPLQEILKNDDFDARVASARKYLVRLGASGPNPPFFVNGIPLPMSDEWLQEMSQRVSTDLRTVQKAVFEELLDDESYVPEVFLSRASARRNPWIIPEDENSIRQVNLASMSDLSEGAVGSIPSLPASKDTISSELIHLVIIADFDSEAGQTMLSDLIALRKEEYDQVEILLVHNADKELSTSSFAVDLFKTMMLGPVVSLDALEALMSKKKVDVSEEDVVAAQAFWSSADRFINDIGFRRGEQGILVAGRVVGPLPSFEGFDRDDFMTLLSYERMKRLMPAAQAIKGVNILDKANTALSFSKLSNLIALSSKSDTPEGMFDASPPARADIFNGWTGSHTLIERGDPETATIQIVAAVDPASEIAQRWVPILKVLSELSGVHLRLYLNPKERLDELPVKRFYRHVLESKPRFDKQGSLESSLAHFEGLPADALLTMAMDMPPAWLVAPKDSIHDLDNIKLSSTQGRDIEATYELESILIEGHSRDVTIGTAPRGAQLVLGTNKDQHFADTIVMANLGYFQFKANPGFYNLTLQKGRSEEIFKIDSAGTLGYIPQKGDETTEIALTSFRGATIFPRLSRRAGMEDEDVLESAKTTTDHITDKADKLLAKVGLGSVKSSDVLSKAQKFGSGLLSGSTGSTTDISTLPHADINIFSVASGHLYERMLNIMMLSVTKHTSHTVKFWFIEQFLSPSFKAFLPIMAEEYNFRYEMVTYKWPHWLRSQKEKQREIWGYKILFLDVLFPLDLDKVIFVDADQIVRTDMYELVTYDLQGAPYGFTPMCDSRTSMEGFRFWKQGYWKNFLRGLPYHISALYVVDLVRFRQMAAGDRLRQQYHQLSADPNSLSNLDQDLPNHMQHVLPIHSLPQEWLWCETWCSDETLSTARTIDLCNNPQTKEPKLERARRQVPEWTIYDDEIAALAQRKVGDGKSPIAGDASGKGIQAEMQEADARAQKEENERKEKQKKHDEL

SEQ ID NO: 3731 - protein, 1616 aa, Cuscuta australis
MGRNWTPFGFGLWAVIVLVLFSGHSVSAANSRPKNVQVALRAKWPGTSILLEAGELLSKEWKGLYWDFIDTWIGLAEGDYECKSAQDCVKKMVEYGKSFLSESLASVFEFSLTLRSASPRIVLYRQLAEESISSFPLVDDNTSDSTIVEPRSFKEKKCCWVDTGGSLFFDVPELLLWINSPKAVTGETFQQPELYEFDHVHPDSSIGSPTTILYGALGTECFKKFHHILVNAAREGKVCYVVRPVLPSGCESKSGSCGFIGTRDSVNLGGYGVELALKNMEYKAMDDSTVKKGVTLEDPQTEDLSQEVRGFIFSRILERKPELKSDIMAFRDFLLSSTVSDTLDVWELKDLGHQTAQRIIHAADPLLAMQGINQNFPSVVSSLSRMKLNESIKDEIIENQRMIPPGKSLMALNGALINIEDIDLYLLIEIVHRELSLADQYSELKIPPTTIKRLLSTLPPSDGNSLRIDFRSHHVHYVNDLEVDVMYRRWRSNINEILMPVFPGQMRYIRKNIFHAVYVLDPASIHGLETIDMIISLYENHLPIRFGVILYSAKFINQIESNEGELLFPQKKEDSQVQEDISNLIIRLFIYLKENHGNAMAFKFLSNVNKLRIESSAEDAPEMHHVEGAFVETVLPQAKSPPQDTLLKLEKEHTFKEAAEESSLFVHKLGLSKLQCSLLMNGLVNDPSEDALMNAMNEELPRVQEQVYYGQITSHTDILDKFLSEGGVQRYNPLIISDGKAKPRFVSLSAALLEKESILNDISYLHTPETIDDLKPVTHLIAVNISSKKGIKLLREGIHYLMEGTRNARLGVLFSDVQDTHWPSILFIKIFKITASSYSHKKKVLEFLDQLCLFYEREHMQLLTPPTEDNRLFINKVFEMANENGLPSKGYESALPGLSDDMIKTYMSKVARFLFRQVGVESGGGVVITNGRVINLDEGTTFLSHDLQLLESMEYKQRIKHIVDIVEEVKWEDLDPDMLTSKFISDIILSISSSISSRDRSSESARFELLSATYSAVLLENENASVHIDAVIDPLSASGQKLASLLYLLSKSIHPSMRLVLNPMSSLVDLPLKNYYRYVAPTMDDFSRTDFTVYGPQAFFANMPPSKTLTMNLDVPEPWLIEPVIAVHDLDNILLENLGDTRTLQAVYELEALVLTGHCSEKDHDPPRGLQLILGTKSRPHLVDTLVMANLGYWQMKVSPGVWYLQLAPGRSSELYLMKKDGGVQGSILSKRITIDDLRGKLVHLEVVKKKGKEHENLLVPTDADSHSQDSKKGNQNRWNSNFLKWASGLIGSSDQSKNESTQELARGGRHGKTINIFSVASGHLYERFLKIMILSVLKNTNRPVKFWFIKNYLSPQFKDVIPHMAREYGFEYELITYKWPTWLHKQKEKQRIIWAYKILFLDVIFPLALEKVIFVDADQIVRTDMGELYDMNLRGKPLAYTPFCDNNKDMDGYRFWKQGFWKDHLRGKPYHISALYVVDLVKFRETAAGDNLRVFYETLSKDPNSLSNLDQDLPNYAQHTVPIFSLPQEWLWCESWCGNTTKSRAKTIDLCNNPMTKEPKLQGAKRIVAEWPELDLEARSFTAKILGEEISQEPSLLPAKTSNDPIEDAESKAEL

SEQ ID NO: 3732 - protein, 1318 aa, Echinops telfairi
TVKADSKAITTSLTTKWVSTPLLLEASEFLAETSQEKFWNFVEASQNIGSSEDHGSDYSYYRAILEAAFRFLSPLQQNLLKFCLSLHSYSATIQAFQQIAAEEPPPEGCSSFFSIHGKKTCNFDDIETLLRTASERPKPLLFKGDHRYPSSNPDSPVVIFYSEIGYKEFSTFHQQLISKSNAGKINYVFRHYISNPGKEPVYLSGYGVELAIKSTEYKAKDDTQVKGAEVNTTVIGENDPIDEVQGFLFGKLRDLHPALKGQLKEFRKHLVESTNEMAPLKVWQLQGSGNYFKGTLGLQPGDSALFINGLHIDLDTQDIFSLSDILRNEAWVMEGLHRLGIEGLSLHNVLKLNIQPSEADYAVDIRSPAISWINNLEVDSRYDSWPSSLQELLRPTFPGVIRQIRKNLHNMVFIVDPAHETTADLINTAEMFLSNHIPLRIGFIFVVNDSEDVDGMHDAGVAVFRAYNYVAQDLDDYHAFQTLIHIYNKVRNGEKVTVEHVVSILEKKYPYVEVNSILGIDSAYDQNRKGELSHDQDVVEYIMNQPNVVPRINSRILTTEREYLDLTANNNFFVDDYARFTVLDSQGKTAAVANSMKYLTKKGMSSKEIYDDSFIRPVTFWIVGDFDKPSGRQLLYDAIKHQKSSNNVRISVINNPSEDISYENTQISRAIWTALQMQASNSAKNFITKMVKEETAAALAAGADISVFSVGIIGPLEDNELFNQDDFHLLENIVLKTSGQKIKSHIQQLQVEEDVASDLVMKVDALLSAQPKGDARIEHQFFEDRLSALKLKPKEGETYFDVVAIIDPVTREAQRLAPLLLVGTNAGLVSLNYFYRYVLEPEISFTSDNSFAKGPIAKFLDMPQSPLFTLNLNTPESWMVESVRTPYDLDNIYLEEVESIVTAEYELEYLLLEGHCYDITTGQPPRGLQFTLGTSANPVIVDTIVMANLGYFQLKANPGAWILRLRKGRSEDIYRIYSHDGTDSPPDADEVVVVLNNFKGKIIKVKVQKKADMVNEDLLSDGTSENESGFWDSFKWGFSGGQKTEEVKQDKDNIINIFSVASGHLYERFLRIMMLSVLKNTKTPVKFWFLKNYLSPTFKEFIPYMANEYNFHYELVQYKWPRWLHQQTEKQRIIWGYKILFLDVLFPLVVDKFLFVDADQIVRTDLKELRDFNLDGAPYGYTPFCESRREMDGYRFWKSGYWASHLAGRKYHIRLLDLPNNMIHQVPIKSLPQEWLWCETWCDDASKKKAKTIDLCNNPMTKEPKLEAAMRIVPEWQDYDQEIKQLQTRFQKEKETGPLSKENKTKESSQGHQTREEL

SEQ ID NO: 3733 - protein, 1502 aa, Alternaria alternata
MMRASASILSAKALLVLSAFRHSGAHAGPSVNVALRASFNPAPYLVELLETAAEENATAYYPILDRISEGYFDEKDTQQELYTAFRDLLQSDGHITDPAALASFEFALSIQSAAPRIEAHYQFYKTSVEPSLEATQTKACDIWTSFHGKQYCDVHLEESFGGIESERTYQLPFDRILGNSSALPAILYADITAPRFKKWHKTLSKTAKEGKTSYRVRHKPSSNAPTTPLIVNGYGVELQLKRTDYIVIDDRQAEQGQKSDAQKPIGTGLDDDEDVADLKPLSKDEVSELALKAADFVAQSEQPMDTLMKLVQDFPKYSSVIAAHNASDEFVEEHLANRNQLLPAGYNVIWINGVQIPARDVNPYSLLAHLRRERKLINGIRSQGLSGSEVVSLLSHASIAESQTEDEPQRYDFRDTTEGGNIILWLNDIENDPMYEGWPSELRALLQRTYPGQLPSCRRDIHNAIVSVDFTSTEDVSLALDTIMSLIRRGIPLRWGLVPQTATSEAIDQTKLVYHLQDAYGLPAVIEYLQVSAAKPDKAVFDTTVKRTTLIEGKEALAFDDVLKSEALDQRISGAKQYLKRLAAEGPKAPIFVNGVPIPATDEWLQTLSQRIGMDLRQIQKGVFNGVFNDDSWVPQYFLFQAAAKRNPLIIPENEKNITLINMAEFEEVHGEAYSKMPRLDASESASKSDWIHITLVADFDSEAGFALLKALADFHEANPNVEAVLIHNDKAGAEQSNASEDLLETYIKSGRKLTSEALSGLLGKEVNYGPTPANSTLFWKVAEPIYDAVGLKPGQNGLLVNGRYVGPIPEDYTFSQDDMETFVTYEITKRIEPLNKALADLQLMDKIASPLDVAKIQSLVALSTVSDVPEGIFETASTLRMSTYNDWKSKYTAIVRGDEDKAVFQIVASIDPATEQAQKWVPILKVLSDMDGVHLKLFLNPKGMLQELPVKRFYRYVLEARPQFTHDGSVGRLGAHFGGIPKEALLNLGMDVPPSWLVAPEESIHDLDNIKLSTTPAGTNIDAIYGLESILIEGHSRDTTNGGQPPRGAEVVLATERDPHFADTIIMANLGYFQFKANPGFYNIKLKSGRSQEVFNLDSAGPISWAPQPGDETTEIALMSFQGATIFPRLSRKPGQEDTDVLAPEESLASELVGKSAQKVNKFLGKMGLNFDSEKVLQKGADLFSGGKTAKKGIQADINIFSVASGHLYERMLNIMMVSVMKHTNHTVKFWFIEQFLSPSFKSFLPHIAAEYGFEYEMVTYKWPHWLRGQTEKQREIWGYKILFLDVLFPLDLEKVIFVDADQIVRTDMFELVQHDLEGAPYGFTPMGDSRTEMEGFRFWKTGYWANFLRGRPYHISALYVVDLNRFRQLAAGDRLRQQYHSLSADPNSLSNLDQDLPNNMQFNLPIHSLPQEWLWCETWCSDEDLAKAKTIDLCNNPQTKEPKLDRARRQVPEWNVYDEEIAALARRVKGEERKEVVDVQEEEQRREKKEKDAEIEHSEL

SEQ ID NO: 3734 - protein, 1208 aa, Allomyces macrogynus
MDTACGFHAAPGRGEGPQPRQGSCLRPRARLARANRAISMLVVVCAAFLILTHQVAPTAAAVDGQATADGTTRETSGFRVTLNARWQSDPWLEYFEDIARHNTSALDRLLPSVTQFDSIDAAHRHLETTGALARETVQLINLGVQYRETLPRVAALLDVYNSTVHAHTDLQSCSMFVLIDDKWTCDLDEALAWLSSDHDHGHDTHFDAAIDTAPMGDANAWQKAVVYGHPRHTSFAPFWQRLRKLPVRVALRYVPATSSVVPARQRLNGYFVHLNIKDLEYKVTDDRTSEGEASAAPDTPTRLESLDAASLETIAARVAQNVTTLDDLARITAAYPVTLPEIAASTAAPSAQLCANLDANREMVEARVGRADKMLWANGKLLPASSVTIYHLLETLRGEVELAQDAKRIGLPWAQAVSVLQHNINSEAADYFDTCAIEPVVWLNDLESDAQYKSWPKSLRNLLTATRGMKAIRRNIFTLLFFMDAANSKHVAMALEFVTMVENNIPLRFGLVPLVNTDPASKTSRLGVEFWDIYVAKGRDAALQWLASNPALSLTHPDEAAHATLLAARNQLAVHDDGEMFFNGRPIDIGESYQHQVMAEYQQQVEQLAMMVYYGQLDDSTNMNKYWCIKPTTWKTRSELAFAKRKPEHRWANFDASALPEDVDLAAQDQYPFVHVTVRGHVRDAALEAIKAAQSTARFVLDVVADATTDQGIVVNGKLIRHLPAEMTVDDVKTLVHVEWVRRLKQLRLSPTCVAMDPPTFWKASSLWWKNHVAAKKNENGFRSGPGHRMNPFDIVSCDKGKCLTVPAATESGGTDDLPVVQLVALLNPVSTNAQRLVPLLQEVHRALPYVSVTVVWLALPVTKGARPQSVLVDSFLGVTLYPTVHKRAGKEDMTVLDEDRPQQSWWQQVVQSVMGQRKETVHVFSVASGHLYERFLSIMMQSVVDRTQNPVKFWLIEDFLSPSFKATLPALARTFQFEYQLVTYKWPEWLTAQSVKQRTIWGFKILFLDVLFPLNVDKIIFVDADQVVRADLAELVSMDLEGAVYGYTPFCDSRAEMDGFRFWKHGYWLSHLRGKPYHISALYVVDLNRFRQVAAGDILRQQYQGLAQDPNSLANLDQDLPNSLQHMLPIHSLPQEWLWCETWCDDTSLTRAKTIDLCNNPLTKEPKLDRARRLLPEWEVFDERAEKVRHNVLLELAAKSRPDHEEL

SEQ ID NO: 3735 - protein, 1477 aa, Colletotrichum chlorophyti
MVRLSQLPMGLALVVLAAVHVAAVPSVTVDMKAAFPSGPYLLELLETAAGENATSYFPLLDRIASGHFTEFKTDKEVYDNFLQVLQDDGHITTPDALSTFKLALSLRTAAPRIEAHYQYYRTAVEPKVGSDPQDGCEVWAELGGKQYCAPSLDNPRNLELEGSKVLPFDRVLGSGNEAILYADPTSSAFGAFHSALAQKARNGEVEYRLRYTKPAGSHDEALPVSGYGVELALKRTDYIVIDDRDAQTDDAQKTVTSDEVLDVEEEVADLKPLAKSELQELGLKAASFVMQNQNPFEALLRLTQDFPKFSASVAAHDVSADFLAEHQQNRQHLVPAGMNVIWMNGVQLIERQIEAFTLVDLLRRERKLIEGVRDLGFSGGQAVSLLGHPKVAESKSDEEPPRFDWTDDIEEGKVIMFLNDLEKDERYQDFPNNLMSLLQRVYPGQLPPIRRDIFNLIVPIDFSNLEDITQVAQLNQIIQRKVPIRLGFVPLTPNEEAVGISKILYYLLDVYGLDAFIEYLDVALQESKTDKPDAGFFEKAIKDREALPETKTLTFDAVLQSEELDKVIKLAQNWAKRLNANTPVRPAFINGLPVAREGNWLQAMSMKASTDLQAIQRAVYMGQVEEDMWIPDYFLEKAVKRRNTYIYPEDDRSLKILDVNKIHTEHDGLFSKIPVIEAYADSTKENWAALTVVGDFASNEGTNLLLSALAFRRNNPGVRLDLLHNPAAPASASAVNTALKNSVDKLSEVDSLSDLQAIVDGASGESDGIYTAALNEFLSFAALEPGANVLVLNGRVIGPFSQAEPFQVDDFQYFLEFEQKTRILPVYYAVEELGLTDKISGPLAAAKVTSVTALSTISDLPEGIFESAPSIRISAQDTWNSTYTAIETGNYETSSIHLIGLLNPASEQAQRWAPILKVLSELDGVYLKLFLNPKDKIDELPVKRFFRYVLDSQPSFDESGKVRALEASFKGLPSEALLNAGMDVPPSWLVAPKVSVHDPDNIKLSSIKSNVYASYELESILIEGHSREGKGTTPPRGAQLVLATEKEPHFADTLIMANLGYFQFKANPGFYNIQLKQGRSSDIYTIDSIGAKGWTPVPGDDGTEVVLMDFQGTTLYPRLSRKPGQEEADVLAEAEDNSIVGRGLKFAEGLLGKKKSASDEEHAEINIFSVASGHLYERMLNIMMVSVMKNTKHTVKFWFIEQFLSPSFKDFIPHMAKEYGFKYEMVTFKWPHWLRQQKEKQREIWGYKILFLDVLFPLSLDKVIFVDADQIVRTDMINLVNHDLEGKPYGFTPMCDSRTEMEGFRFWKQGYWANYLRGQPYHISALYVVDLRRFRELAAGDRLRQTYHSLSADPNSLANLDQDLPNHMQFQIPIHSLPQEWLWCETWCSDESQRDAKTIDLCNNPQTKEPKLDRARRQVPEWTVYDDEIAALDRKRKGLPVEVPKKEGEQKPVVEKNTKSRNWEEPPAKETHEKDEL

SEQ ID NO: 3736 - protein, 1641 aa, Scleroderma citrinum
MLHPLLVLAGLAFGALSASGSSPPVTVTLQSSFASSDPLLEALETVAIEDAPTLFPLLSHFPLHEKPRTQRDAYETVFNLASAYLDVSALASARARLALHAATPRLAASAEHYDLRVTDVSGPTASSGEDCASWVDWYGQIVCDADSLLRLANAAPAENPDVSLKKLRRFPFDHVYSVRPRLDEPPYTAIHYADPTASSFAPLHAALFGLKPKVEYVIRWARGTGEKKAGELSSYLSGYGVALDLKKMDYLVLDDRNQGGAAGLGSSDVSAPSGSHADNENGKVPEEILSCIFESLPYVDEHAEARAKAGEPLSPEEITDLGIKAAQFFASFSSEPHMGSLYEHPCWDSHHKQPMPVETLFRTLSTSFPLYATSLARKVHVSDELRDEIYENWARATAGTNMAWVNGRVLNEHQGASGEIFGILRTLRRERALVNSLVGLGLTREQAIELLMHPAHSSTGSPSGSSSNRGMMARESAERQQKKSFVLPPKFAEFLEGLIDASDRREGGGVILWLNDLEKDVGFRPSLMGLLRVHSMALFSPMLRLQHNLMNVVFILDLSQLRSLSVISHLHDNFVMRGYPVRWGFVPETAGQSLNMARVLYYVERKFGRDAMTGLIQGILATHGQRGLTTLSWSIVHELFDGLNAPDDFVSVTGSDVLIVDEATGDSLLSRAQQYCKRLGLTTRDEVGNGHVFVNGRYLPVSDNVMRQIATEGNAQLQILQEMVYVGEISDSDSSLMSTWFYDLPSTMLRRNPYISAKNTDRHASDGKGLEIFNLVDLFYNAGFTLEDGSFAVPSNGQESVLPLTMYIIADLNTHEGIELVTEALKFISDPAEARVTFVHNPTTFTQDTGSSASQLLITAVQAATLSRVPPRRLLTVLIDEGEPGLRVLRDELLSGTDVVDIDTSSFSSSMRLVARQLGLQPGERAILINGRVVGPFDSNAEFLAEDFKMLETYEITKRVGRIMHAFDGVLAGEEALDVAKRSNLIAVASSIIYADQQPDPSEVGLFDSSPRPRTGNYRLLSGDYTIEFGDRSTARTHIGLLLDPLSEAAQRWSTVLEHHSSLFPEVFIELYFNPVQHGDIPLKRFYRYNIIPALQFDENGQEIPAQVTFTALPEDPIYTLGMDVLQSWLVRPRDALYDLDNIQLGLLQGEERSRGVQALFALDYLVIEGHARELQSNNPPRGVQLQLFGINDRSVMDDTQVVANLGYLQFKGRPGTFRLEIREGRGSAVYALDSVGAEGWNSPSVVEAGDEFTVMDFDGLTLYPRLVYQSGMEGMDVLHDIGPVEEPSGILGSLVSRVSSFFKPANAGETGVLLKEGKQAEINIFTVASGLLYEASRFASIMILSVMRNTNSSVKFWFIENFLSPSFLDFIPHMAKEYGFQYELVTYKWPSWLRPQKEKQRIIWAYKILFLDVLFPMDLKKVIFVDADQIVRADLKELVDLDLHGAPYGYVPMGDDNYEMEGYRFWKTGYWRDFLAGRPYHISALYVVDLVRFRQMAAGDILRGQYQMLSADPKSLANLDQDLPNNLQREVPIYSLGKDWLWCETWCNNDRLHRAKTIDLCQNPLTKEPKLARARKIPEWEGYDSEIARFTRNLAAEGKIHASMATADTKVLAGGGAPAGPEHTPRAPDTNNSSNLHDEL

SEQ ID NO: 3737 - protein, 1426 aa, Candida duobushaemulonis
MLISRFWTIAAATAVSIKLTADWSEASFPEQLIEAASSYKDSLYVSAVRALYQNEESLDWEDDDFDDVEIGSETGSRTDKQIYDSFVGSLSPEEKGMADLNLVNKIYTPRIEAHYRHYQNEVDESKVLKACAKDSFGNEIEDPLGAWVKYGDRIYCSDADLYALQLSRTSEEIKAFDRVIGNDEKKPLLVLYGSSKSPRLGQMFETLYQFAESDKLRFMWRYVPTEGPKSEIPGFGAILTPKKPLNGTKSSKIKYTGDIKKYLADIRKRGQPLKALEEDSYQELSVKITALVLAQPEAEQHELLQEILNNLPLYGPYIQLIRDISGLESTRAAAKVNENRGASAESVGLYLNGASVHKLEMDLPHVINKLNTELRLAQRMSELGFSKAQSKFIFYKFALMSAFREVQYRTGDQENRYAVYKHAFDPTDNTSGGVVYFNDIEKDDPYDLFDVNRREAYLGVEAQRLQFGQVPALRENSHELIFAINFSSSIQVKIFFTFAKIILDRNLPQQIAVVPLVDSDEDELVTEKFYHIMEVSDSKEAFALLYQYYEAPTQEEKHEILSKVEVSEDKQGTFRNYEKTVREFSLDSPSVIINGVIHDMKSPWQAAMTKQMGNDVRLLQQKIKKMEDRGRDLKSVLFQDAKESRNSRVSPKDLSNIRYKEVTKELIDNSSAFKKINKPNDAPGTFWLIGDFNSRLILAQFSKLLELLEIYSDMSLEIRILNISDDDSLLNKLSAKYGAKPLTHETITDLKSEVLKAKSKVYSKVSPKKAQLLQDHQIQLHQPGMLFNSRYLKLNDLFDTEELIELVGFEHRRRLSIFKDITDTYPDMFSWKGIMFFRKSGYDNFEWFDLVSSVVAKSFFLEDSQIQTDVDRFDFSSLNFVNSLNITGANGASVDILAIVDPISDVSQKIVSIVSALKDLPFVNVKLLIQPLKDVAEHTSLERFYAHNFVSSYPQFDEDGTFSISNYGAQAQGLVPKYKFSSDLDIPSRWLVVKDKLPKADHEEFTVDEIEELSYKLDKLVVEGYAKDVKTAQSIATLTFDITNEQVVEDGIVMHTLGYVQFQLKPDVWSLSIQRGSRGEQIYNLLSASDNKYDTNDQPIDTAEVSLFSLHGSVIHPRLLEKSEKDQAKAKKKVSTTKNADINVFSLASGKLYERFVSTMMLSVKKHTKSTVKFWLLRNFLSAEFVDSLPQLAEAYGFQYELITYKWPLWLRQQKEKYRQVWGYKILFLDVLFPNSLDKVIFVDADQTARTDLKELVDTDLKGKVYGFPPMCDSRKEVEGYRFWKQGYWKNVLQDDLKYHISALFVVDLNAFRQEYAGDRLRSHYQKLSSDKESLANLDQDLPNNMQRSIPIHTLKQDWLWCETWCSDESKKKAKMIDLCSDPFRKETKLERVQRSIPEWKGYDDQIQRLQKGESDTGANVGHDEL

SEQ ID NO: 3738 - protein, 1635 aa, Coemansia reversa
MGTTLRFLGRLAALVAFCGGLCSAAAVSESPSIRTRLLASFAAPPLVLEVVEGVAAHNSSAFFPLLTKLAENDKLFKQTEADVYEQLLQWIEKDALLESFALALLKLELSAHVYAPVVVAQYQLYNSTVVPDIKTARGTENFDESCRIWAQYKDKQACSISALSELLDIEKFYGSTYVEEALVETTELAFDHVYPSESAAAPKLVVLYADPRAAGFVEFHNHLKQLAENQEIAYIFRYKPWVTDIEDTTRPLGLSGYGVELALKSTEYKVIDDRDLDVGGNHAAVNSDSKFVNQASGDRVAELLFESEIEPVVKGLKGKQLPALGIQATQMIISATDKLSVLRQLSQDLPRYAHLISEIPVNYTLAEDIDSPWRHNRKDEVLINGLAINEDDMDPFHLLEHIRKDSSIIQGLESAGLNPKQALGLLLNEAAEDDIDRSNSITFDMRERPLEKRAVMWLNDLEKDNRYSEWSSDVNNLLRITNPGMIQRLRINVVQVIFTIDLSSPESWIMIFEDIVANIEHGMPVQFGFVPLIDYANPNLHSEANQMAKFTLYLRRSLKKAEWHSLTKGALITHLRSQHTKPIGFIDSMRTAYETYAKSHKTRDNEDFLEWNDIVGTKAPWLMERWKSIVEYCSRLDLSPTSAPMGLAFVNGIQLPLTDGYQQQIFREFQIQTWLLSKQLREGEFSVKNNIQDYVYGRLAVGSRNALVYASDEAPLRFLPFGEQSVQGWMDKIYYLGFSGLAADASTSESKKENKEKLISTWVIGDFGSQRVRDIAAGAVLAAKSETRMRVALVHVSHTTETQHTDRAEGEDADDTPEDYDVDAPQIIYQLLSSQSAFSNASDALADFVPEFLVDQDTSKASLADMGANGKLLKSLLQPDDNRMDEAEHVFTQNRRNLSRLGAIPTGRDDCNVVVNGRILPPITPAVSFSADSFVLLARHELLERVNPVRKALSDVAIDIDAKILPELVMKATAIVEYGRLLFSGDTILQQRQRTSRMDMARQHPTDTETYLKFGDPNSARLRVQVVLDPLSENAQKWVPILETLLSLPNVSLELWLNPKYKVEVLPVRRFYRYLWPSGLEFDSVGDIADPEVVFSSIPADPLLTLNMDVPTAWLVTAVDSIHDLDNIRLSSLHGQHRDISAIYKLVNILVEGHLVDRNSRSPARGLEVQLGTSLEPAATDTIVMANLGYLQLKANPGVWRFGIRPGRSADIYRIDNVSSNRWNYAAAAEAADNKHDIQHTVLVTSFSGATIFPLVSKRPGREKDDVLQSSDVDSTDSTAPASKSGSGIWGKIRGSLGGGSNGDGNSGVVSSDERPHFDVFAVASGHLYERLMSIMMLSVLNSTESSVKFWLIENFLSPSFKAFVPQMAEEFGFDFEFVTYKWPHWLHHETEKQRTIWGYKILFLDVLFPLNLDRVIFVDADQIVRADLQELADMDLHGAPYGYTPFCDDRPEIDGFRFWKQGWWRDHLRGKPYHISALFVVDLKRFRQMAAGDRMRGQYQALSRDGGSLANLDQDLPNNMQHIVPIYSLPQEWLWCETWCSDGGLKKAKTIDLCNNPMTKEPKLERARRLLPEWEVFDKQVADFSRTLAQHGKHEGAQIADAEAVNIDQPLPVAKAKHHSSNEAPADKNIHEEL

SEQ ID NO: 3739 - protein, 1260 aa, Paramicrosporidium saccamoebae
MRFSFVAVSVLLSVVETAKVTAPWLSYCSAQSLETSEFLSILHPNSFWTFLERLANGESIDQATSSLLSPTEKELLERAAKYRLYSGRIVVHEKLRPHDAPECETFAVYQGESVCNPENLGKSISTLKENASDPKDTYGHMLGDRGSMVILYSKIGSPTFLPFHRILKKAALDGEVRYVYRHLVHRDCPDPADAELGGFGLELEMKGYGPTPITVDTAHGQYRLEDPANSKNVEQFGLQALQTILDSSKPLESLSFISENAPMLVKHLSTVRPTKEVIEKATMLAQHFNLPETIISINGAEVQSLHFELQTLLEFLGEYQSLVKRFLLKLEDFEMVGRQLMASSLQVAPFRFDVRTSTAIVLNDLSRDHRYKQWPRTFRALMRPPSGQFYPLARNVVALTIVMDLDSFASSLLEDIVRVVGQMIPVQMILVLTAAEDSLTAAVYAVYRQYGRIAIVLKARELGTKVDTSVLLEEVMGELEINTGLDMDDLIQMTQATQLAEEAKKFAIKFGAPNEIVAYSWQRKVMQVYQEEIYNLQVAVMAQQIDDSSDYLSLLLDDEKTFKSRHSEIFSMQQNYAQKMVPWTEWIYSDRATDNCAFAVVVVAEMHRQGDVQMVQSWLEAVGKTDRKMRLKIVPIGSPTTNTQLLWKLHRKEITPEAALDGLEDDPQDLDNAELQRWVEENSQIVSDLCEMADKGPVVSINGHIYGPFTTPVAVSDIPTWLQAEWQRRTETLQALRINFELEREPSALTQMTLFTGHLVALMQKHSHLFTGKTVMDIPLEKVCHFEVENETALVQIKELATMVDAIIIPNVQPKYTDLPAKGVYRFRHFDGTLTHIIPDSHYALMLNTPSAWDIDGASDTADMDNLTSPADAVRVILRGLVLEAVVRSSGRGLQGIPLELRLDNRLVDRSVSMAFPGYTQLHGDPGLYTLQVSPNEYLRLSAPTIVPLASLAFNMAVANVEVAMGDESILNDTVHVFTIVSGAVYERLVLIMMRSVSKNTTKPVKFWIIANFITPALRESISKLSGVLGFTYEFHRFHWPGWLNPQSRKHRRVWAHKILFLDSFPHTVQRLVYVDADQVMRGDVAELARTDMKDCVYGFVPFCESRRESIPLQFWKSGYWEDYLRGLPYHISALFLVDMARFRAEAVGERLRAQYQPLSFDPASLANLDQDLPNNLQHEVPIHALPSEWLWCETWCDDQSKAKAKSIDLCSNPLRKDETKLDQARRIIPEWSTYDEEVAKILRETEVTDDSTDDSHEEL

SEQ ID NO: 3740 - protein, 1668 aa, Sporisorium scitamineum
MRALPLLSVGWAWLALASTLAIPTSVVHAESPPVKVQLRASWSKISLPSGGSPFLLELLEAARSQQPSSFFPLIELLTSKYSATELREASDEWLASTVQDLITTHQLFGAWRKHADEALDTWRMSLALSNSSPRVQALVQLYQTMQLDETWQKGSKDASCVSWVHFHDQVLCSGDDLRQAVRNGAPMTSIYDRSREVSLGHSRSSSAGSTAATQSFVLYADPFSDNFHELFSILEEHTNQPDANFTYTLRWRPSATDSALMPDVERTTFLSGYGAILDLKKVDYLVIDDRKLKDDSDIGDIGISASYQSEEGTAAKQAADQARWLRDQIGADSDASGATLSSLSEDQIADLGIKAARLIMDSSDPLRALQELSQNFPLHAADLAKTTKWDDADRSAALVDAVLNLASMRIEPGHSDLWLNGASTSTRDFMPLTLLETLRRERSWNHALQHPLAGGGLNVTEAGDLISSSLVGRAFLAQADGQASTAIFDASDRIEIKNAPEGTDVGAITWLNDLEKDAATSEWSSDLMDLLRPMWPGKFPRLSLNLFNVVLVLDLSQKETCRFLSATVIQSLGRVGLHWGLVPGGLEDETSSDAVRMARLFWFLLDQAGAQTTSDVLRKAAASKAGSSGALDISLAVKEAKFALKSIDTDGSLATKLDDALAGNNPAYTLKENLGRAYIKRLRATRKENRGGHVFINGQHQPFHPQIVHILHQTIQEQIQALAPQIYYGQISSSTPSLDTFFYDSVGALSFRSALVGGAGGEEGKGVKHGALDLFSALVDDAVPTETVEKVFRFFYPAAASGALLNSTVWVIADLDSDDGVALLARSFEALAKEDAKFRLGLLHTPSTGSEAEAHGRYVSTLMYRLLAEGRTEAVSPTQVLEALEQAHSHPDVSVQQLEGALGLTASDANSNQKARHFWQSISPSITSKLAIPPGPAILVDSHLVTNLSPSTIDARDITALVEYEAGQTLPSLIQALHLLRPNLSDLPPHQRQNLIFASLSVLNGIHHQAGSSMFTSKAASRSGLPEQLGTGDHVFEVGNRAEADVRITVLLDPLSEAAQRWSSVLLMLRELEGVYARVILNPQIKLRELPLKRFYRFSAPRALKFSEGRVVAPELRFFDMPEDAVLTLGLDAPAPWLTMPMEAVYDLDNIRLADVPSGSRGKGVKAVYELKHLLIEGHAREERAGSAVTVPRGLQLLLETPDEGTRLDTIVMANLAYFQFKAQPGLWKLRIRGGRSDELYEMQSVGSQGWNSPTVEVTGQHVVLDTLSGLTIYPRVAKRAGKEGQGLLEELDAQGRPIKIQRSPPYEAGLASSAGQLFLSAKDKLSTLAQTITGTPTTATTTTTEVTRRTHADINIFTVASGHLYERMTYIMILSVVKHTSSTVKFWFIENFLSPSFKEFIPHLAVEYGFEYELVTYAWPHWLRSQTEKQRTIWGYKILFLDTLFPLDLGKVIFVDADQVVRTDLQELVDLDLEGHVYGYPPMGDDSEDMDGFRFWKQGYWKDYLRGRPYHISALYVVDLHRFRLFAAGDRLRGQYQALSADPNSLSNLDQDLPNNMQSSLPIFTLPKEWLWCETWCSNDWLDRAKTIDLCSNPKTKEPKLERAKRQIPEWTVYDGEVGRLAQRLVEEKVGKSVVAPDSQVETKSGNTQQQAADANANADAHVHDEL

SEQ ID NO: 3741 - protein, 1544 aa, Schizophyllum commune
MGVLRSILIPLYACKLAYAASPPVKVSLRLSWAAPHPLVETLETVAQENRDAFFPLLDALTDGDKLVSPQSLTPEAAYQAALEIAASGGLLSKPGSLAAVEMNLALHSATPTIEAFHQYYENLNQWVECGSWVDWYGQVVCDVEELARLAGIETLDANTTEKKYLLAFDHVYPDPQYELARPPRTAILYASLFSPNFRDLHSYLYEQASRPATHVEYVVRYVPEQDARSPNSLSGYGVSLDLKKTDYLVIDDRAARIRSSDGIEEATDDDEARDDILTLIEAYPVNDTVSDSSEPLSEDEIRELDMKATQIIIDSSDPLRTLLDLAQNFPRYAAPLARHSIPLNDTVAAELAHNAAKVQQGGSMMWLNGKGVAERDITAFGLLRLLRKEREVVLSLTGLGLSAGQAVELITHPAIAAAQKGKDYADGVFDASDREEGGDVIVWWNSMLEDSRYARWQPSINALLRPLYPGQFPSLKLNLFNIVIVADLTDPVAFNFVSNSVSNIIDRNFPFRFGVVPIGESLDSERLAKLFYGMIQEFGRKKTIIFMRKVAGRHTTEPKIDWGIVEFEYDDMVDQLEAKDPSKQYPELDDLLNRDVLPQSKIRSYTERLDLDTSSNKHGYVFVNGKYFELDDTFLRAMQSEVALQTNFLQEQLYAGQLSEDDSARMETYFYDLPGAQKRRSAYIHQPADELVIESLPELLAKARLSLAPSSYVYPPEAGFLPLTTYVVADLDSEEGLGLVKEALLSLDETSRTRLSFIHNPKDVEGSLVDKQPYSAQGSQTPLSREGGLADLVDGITTDSDAYEAYIKSSVLLARELHLQPGQSAVVANGRVVGPIERKEFKAVTFKDLEEYEMKKRVGPITEALSKITPEALERDRASVAELLSTASSVVASLQIPDPSEVGLYQAPASPRLRNYNLLEGRHTSFEFGDNSTALYQLAVIVDPLSEAAQKWTPLLAWLANVPDIYIQVYLNPAPLKELPLKRFYRYNVRPALEFDEQGNEVTAETIFRGLPVDPIYTLGMDVPQSWLVRPKKALYDLDNVQLNHLDPRDDALEAVFDLDYIVVEGHAREGSGAPPRGLQLELLAGETPIDDTLVVANLGYLQFKGKPGVYRLAIRPGVGPKVYELESVGSQGWDSPPVNVSGPEVAVTSFEGITLYPRFARRPGMERADVLSLRGLPEEPKGFLESLKSSLTSWFSNPPPMPAEVGKAQADINIFTVASGLLYERFASIMILSVLRNTNSTVKFWFIENFLSPTFLEFIPHFAEEYNFQYELVTYKWPSWLRQQKEKQRIIWAYKILFLDVLFPMDLKKVIFVDADQIVRADLKELVDLDLHGAPYGYTPMGDDNTEMEGFRFWKSGYWHDFLRGRPYHISALYVIDLDRFRRMAAGDILRQHYQALSADPGSLANLDQDLPNNLQREVPIFSLPEDWLWCETWCSKDRLHRAKTIDLCQNPLTKEPKLSRARQIPEWEVYDAEIAGFTRRLAEEGAIQSRLAAADANALANSGGSTEDAKTMASSASEVETQVAKPGEYPIDTHFGHVAEEL

SEQ ID NO: 3742 - protein, 321 aa, Poeciliopsis prolifica
MFIFCSFLAVQVQKKPDKFNEELLSDGTEENDSGFWKSLARGFTGGGKAEEPKQEKDDVINIFSVASGHLYERFLRIMMLSVLKNTKTPVKFWFLKNYLSPTFKEFIPHMAKQYGFQYELVQYKWPRWLHQQTEKQRIIWGYKILFLDVLFPLAVDKILFVDADQIVRTDLKELRDFDLEGAPYGYTPFCESRREMDGYRFWKSGYWASHLAGRKYHISALYVVDLKKFRKIAAGDRLRGQYQGLSQDPNSLSNLDQDLPNNMIHQVPIKSLPQEWLWCETWCDDSSKRTAKTIDLVTMFASNRSHKRALMVEESAIYFFL

SEQ ID NO: 3743 - protein, 1473 aa, Stachybotrys chartarum
MAFTALNRLQWGLILSLLAGSTANAAPSVNVGLEAAFPAGPYLLELLETAAQENSSAYFPLLDRISSGRFASVTTEADLYASFLDVLREDGHITRPESLSTFKLALSLRSAAPRVEAHYQYYSTAVDTTAGNDTSAACLDWVSLEGARYCTPSLDKAVSKQPKSSDVKQLPFDRVLGVGKEAVLYADPTSPEFGPFHQSLSEAARRGELSYRLRYRRVAHHPSAPLPVSGYGIELAMKRTDYIVIDDREASGDSSQKPLTSDVILDGEEEVADLKPLSSSELAPLGMKAASFILQSENPLQTLVKLTQDFPKFSVSLASHEVSEDFVKEYEETRFQGIPGGISYLWINGAQLTDRQIEPFALIELVRRERKLIDGVRNLGFNGKEAVSILGHQSLVKAQGSDDGVRYDWTDRSEDGGALVWLNDLEKDARYAKYPKDIFTLLQHGYPGQIPPIALNIFHLVAPIDFSSPEDLAFVGQYASLSQRGVPVRFGLVPLTSTPDAVDQAKVIYHLVQSYGPESLLRYLQAYFEGSHPAANKELFDAVVNTLELLPEAEARTFSEVLESDVYAKQVKHGQRWAKRLSADTPVRPLFINGQLVPRDKSWMQTLGMKIGEDLQRVQKALMMGEMDQKSSVPDMFLKNAAATRNTWIIPADGEEIQILDVNKIYSEHSELIEGIPVLEHFAESTKENWALFTVIADLATEHGQNLLLSALKFKRDDPGVRLDIIHNPANSQESSAINRELKINEAKLSEVETVDELKTLLDSPADALQEDGYAAALGGFLEYSKLLPGAQALLLNGRVVGPLPSDVVFSSENMQQLLEFERSTRILPVYAAMKDLGLDDKLSGPLAAAKVTSITALSTMSDLPEGIFDAAPSARTTLYTQWNSTHSAIEVGDAATASVHIAGLLDPASEQGQRWAPILKVLSELDGVYLKLFLNPKQKLEELPVKRFFRYVLDSKPTFDETGSIKPLQANFKGLPSEVLFTTAMDTPPAWLVAAKNSVHDLDNIKLSSVKGDVDAIYELEHILVEGHSREGEKGAPPRGTQLVLATEKDPILTDTIIMANLGYFQFKANPGFYNIQLKEGRSADIYTIESIGAKGYLPVPGDEGSDIAVMDFQGTTLYPRLRRKPNMEDVDVIDESGESEDDSLLAKGKKFAEGLWGSKSKSVSNEVHAEINIFSVASGHLYERMLNIMMVSVMRNTKHTVKFWFIEQFLSPSFKQSIPHLAAAYGFRYEMVTYKWPHWLRGQKEKQREIWGYKILFLDVLFPLSLDKVIFVDADQIVRTDMMDLVELDLEGAPYGFTPMCDSRTEMEGFRFWKQGYWANYLRGRPYHISALYVVDLRRFRHLAAGDRLRQQYHALSADPNSLANLDQDLPNHMQFQIPIRSLPQEWLWCETWCSDESLAAARTIDLCNNPQTKEPKLDRARRQVPEWTVYDEEIAAVLKRAGPTDEKAEPNTKSRRFEETKTADGSKDEL

SEQ ID NO: 3744 - protein, 1365 aa, Saccharomyces kudriavzevii
MRVVALVSILLCAPFCALAHSLRYGIPESVQIWSILVYLLRDLDGQLLSELYPLVTGLDDEIDIQENLLASTANALREQYDKEDVADLLELYASLYPMGMIQDDISFNTERASMSNNHFVLNGRKYEKPDDVFYLKSKDLISQQKITDINAMQPYDVVIGANPKAPILILYGCPTDDDPNFEEFNRNLFMEAMSEEGKIRFIWRPTCSLDGENLEYPLGFPLGITLQQGSNKSSIPQLKKILSTVPNEISVEMDHDEQLHDLKPEELRELDLKVTSLISKFYQDNEDILATLHFAKSLVNNFPLVSKELAEISSVNKDIIASNEQLNKKGFDYNMLGLYINGQNWKITSLDSYNLLNALKTEYQNLLKIATLLQKIEPSKGMLDAKSLLNKFSQFSLGNLQNSQPIKMDLHTIPGFSESVIYFNDIENDPQYNELVNNVQAFFDKSKFGELPEIKQNWSEIIFVIDFAHLEDSDVKEALNGLVRAVNVVSQGYPQRVGLLPFSSCGDKSVVNKIYELKSSINGLAELKTFLETSLLADGLIANTDTSNFKSVPDVHHLLDELQIDETSIIVNGEIYPFKKNTWNYLIAKVIKKDTEFIRKELSNSSPKKKQVSVRDLLHYKSANLRHNKYTPNYFADSLYSAVNNTALESIGPNRIMTYIKDEEYNLLHTVTLVDDFNSIYALTRLQNLLNTSFVGVRVRIIHVGGISSVWAQLNDSLSGTDPVNALDFLIDNLKSKSAKDNKYSKDKLNQLSLHKWLPDIPLFELEKGSFIVLNGRFIHLDQKEVPETKHFEAIVKREAIRTIDSVFALDLLFRDFSQERIDPDFIEMTSSILTKLFYQSTHIYGNGIEYTTESSLPRMDLNQFFEPNNLTMFEDARSAPIDLLLILDPLEERSQLLLSLVEQVKSLKFINFQVILMPTLELNIVPIRRVYVDDAEIVKVLIAEGDKMNSEVDIEMDGPNSFVIDNNYHLKKMLIELHVFSNETVLSAGNIDGVGGVCLELVDHAGNVIEETITMKTFGYGQFRTDRFLKDCLIRSCDSRYTVQSFSTDGHPGFIPSDSLNILSYNPYKIAVKIVENPSYEEEYKQGDGNETTINIFTILETGSKEEEKYVEMVLSILSKCPKSQRVKFFILDQPSISDAFRKSCEYINSLDEMRGDIVFLDYEWPQWLRPQRFSSRRRDVSKFLFLDVIFPKNISKILYMTPTKTPYDPFYLFQFQGLKRAPLGLFRMGGNGYWREGYWEKMLRENNLEFYSTEPGFLVNLERFRELNAGDKYRIHYQRISTDARSLVNIGQDLVNNVQIEVPIRSLKGSYKREMVIDYEFVAEWNKTINTFVSSLNDGKVPREGKSSENQDYDDCIPFHDEL

SEQ ID NO: 3745 - protein, 1490 aa, Brettanomyces bruxellensis
  MOD_RES (187)..(187): Any amino acid
  MOD_RES (396)..(396): Any amino acid
  MOD_RES (1059)..(1059): Any amino acid
MHFIHIIRWILTILLVACKAATTNNTIDISVAANWKAVPFKLIVLESIAQFNETLYEPLVEKLLGIKYEQSPDEDDEDMDVGDVSLVDSYLLSDQEFYRYGLSLINSDIFREIVNNTIANRYYSPSVEMHYQYFRNVVAKHKYCAKKDNTSYIVQNDHVYCDPTDVFALRTVSCNDENVGSHPLSVXHKMGNTGCPYFLYGDYRSEKFRETFFYLYQSMKAGKLSFVWRYIPDDAIISSELLAGYGIDLTLKRTDYIVVDDRDLAEGQKGKLNFDEKTITAPANISEDDEFWKESVSEIPKLSQDDIKQLGLKFTKFILDQNSKSDEQKLDLLTKLTFDFPLYASKIAGLNYSDHELHLFGLNVLRDEYAEIPNGFYINDEIVPSIKDDAYKLLAXLKNSVLQLDKLQSIGMDSRSANDILSKFSSFESALSKRPYLRYNYSDYENSIVYFNDIAHDHQYSKMVPSREAYSVEPQMGELPPARENIYDTIFFLDLSDPVRLYYTLSVINNILSKLVPERVGIVPLFTSKDGAILARKLFSIEDKFGSNDALRFLHKVNKYLAEDKLTDDVIAKLPGNSTFTSKKIEYAKNFMSAFKIDRLPQILVNGVFLPFNNDWQSSVQQLTLDVYYIFTQYQNGKIPLGLTFRDYLYKDAYKIRIPKLVPDNILSAGFDVIPAPNIDDYLKQHAAQDNNTLEIKSTKCTVKPCYKSQSLKTVTLIGDLANKEFRAQIIEMLQYIQRTKHIKLILADIGGHNYLSELKNESIDILIDKFSSDGIRATSKIIIPSILQSYSELGNAQLNSIFMVIDGRFLRISHSLLSQQDLDMVIQVDEKLRFKALSMIMKNKKNILELAKHKFNDKYNFYEYLIWTTSEIYFKNEDEFVYDALPRYDTNLLDDKLSIHIPAKEVPRVFVTMSIDPISEKAQKYLAMLDIFKAMPFADIVIHLHPKIEMENIGINRLYRGMFRPPVKFDDNGTFDENELQIIFDEVPEKPLFSLSVDEPQSWIVGIKEANADLDNIKLDISGPVVGVYEVENIIIEGYSRDVVSPSAKPIGLVLELXSSFNDKMQETSVMANFGYFQLKANPGEWSLRVKPETKGADIYDLVGVSLNSTSLDIGDGKISSFDFGVSNLGGLTLFPVFSKKSGKENDFIIGDHNIERKNNGSSNSYFSSFLSKLKNQVLSTKKAEEHKNADINIFSIASGHLYERLLEIMTASVMKHTEHSVKFWFIENYMSPKLKAELPLLANHYGFQYEFITYKWPVWLRHQREKQRIVWAYKMLFLDVLFPQSLDKVIFVDADQICRTDMKDLVDLDLEGAPYGFTPMCDSRKEMEGFRFWKKGYWKRLLGDKYKYHISALYVVDLDKFRSLAAGDILRQHYQELSKDPKSLSNLDQDLPNNLQDVLEIHSLPQNWLWCETWCSDESLKDARTIDLCNNPLTKESKLERARRQIPEWNDYDQEVANLVYHKNESHKEGETSNHKAEITNTNGHDEF

SEQ ID NO: 3746 - protein, 1492 aa, Aspergillus clavatus
MAIRSNIVASWRQCFVVVAALSCLARASPSVNVALQASFDSAPYLLELLETTAEENSTAYFPLLDRIAEGTFDDTTTEKELYDRFLQVVHDDGHLSTPELLSSFKLSLAIRSAAPRISAHYQFYNASVQHSLMAAQDAACPVWVHSEGKQYCSSSMERAQQDMSDEADSRELPFDRVLGDTSLPPAILYADIASPMFKDFHHTLTGLVKEGQVSYRVRYRPPQHWSSRPLFVSGYGVELALKRTDYIVIDDRDAEQRSQNTIASTEPSDGEDSPDDLRPLSSSEVSRLGINTASYVMDSDTPLDTLVKISQDFPKYSGKIAAYNTSTTLLQHIRASRLDLLPSGANVMWINGIQIDPRQIDAFSLLDHLRRERRSIDKFRSTGLSAQEAVDLLCHESLAETLAQDAPSRYNYQDEIEGGGVIIWMNDLEKDAKYQSWPSEVSAYLQPIYPGQLPAVRRDAHNIVVPVDLTNPEDMELIVKTIQVFVKKKIPVRFGLVPLASSPESIAQLKVAHYLQETYGLASLIQYLEEASDIQLSAAKNKIGSPDKACLQHATKDHDVRPNKQVLTLEEILKSDDFETLASRAAKYQSRLGIRGGGSHLLVNGVFIVRDEKWPQEMSMRVGRDLQTIQQGVMDGTIDDEMWLPQLFLSQAFDRRNPLIVPEDAKDIRIVDIAKLSESGKGLSEALVIASKAGNAIDSKHLIVVGDFDSAKGLQLLVTALEYQEKNGEVEVVLIHNPIPELETESGSALLYRSLKVNGRTDAAQVLADLKAADAPMSSENEAQEMAQFWEAQQLLAGELGFSPGANGIVINGRAVGPLLDDSTLSVEDLGQLLAYEQRTRVGPVADAAKDLGFESRLSSPLALAKLTSLTALSTVSDVPEGIFETTSNVRTDLFKKWNDSRSVITVSNSDDPAITIVVSIDPTSETAQRWLPILKVLSELASVRVRLSLNPRDEIQELPIKRFYRYVLDSEPSFSDDGSLARPTATFSGVPMEALLTLGMDVPSPWLVAPKESIYDLDNIKLSTLKPGSNVDAIYALEHILIEGHSRDLTTKTAPQGVQLVLGTDDNPHFADTIIMANLGYFQFKAQPGLWKINLKPGRSQTIFNLDSVGGQGYSPQPGDENNEVSLLSFQGKTLFPSLSRKKGQEMEDVLETGAKPGSAMDYVSKGFNFAQGVLSSVGVGSKHGSEKQADINIFSVASGHLYERMLNIMMVSVMRNTKHSVKFWFIEQFLSPSFKSFLPHLAEQYGFSYEMVTYKWPHWLRAQREKQREIWGYKILFLDVLFPLSLDKVIFVDADQIVRTDLYDLVSLDLEGAPYGFTPMCDSREEMEGFRFWKQGYWKNFLRGLPYHISALYVVDLNRFRALAAGDRLRGQYQMLSADPNSLSNLDQDLPNHMQHHIPIKSLPQEWLWCETWCSDESLGVARTIDLCNNPQTKEPKLDRARRQVPEWTEYDDEIATLAKKLAEEQQQREEEKRSDDREEQESDWIKDEL

SEQ ID NO: 3747 - protein, 1350 aa, Zygosaccharomyces rouxii
MKSITAGLAFLAVLECVICLSVTLQGAGVSERFKIWTIAQHLFQSDKKGTLTKVYPLITQLDEELEDTPIESLCEAVSYRLSELGEPDMASMMPLYCQWYPMGLPFTSNYDHSNSGTYFVLNGKRYDHSDDVFYLKSSELKKQAQVPDQAVIAVNDVVIGHNSEAPIVYFYGCPDDEESTFEEFNRNLYSEATETGKLRYIWRSTCHVERDTKLGPFPVELSLRDDKSDINVLPIECLGIPHQFDKSKYGLINPTAKKLSDLDLKVANLIAQKYNLSKDFNSTLDYARGIINNFPLLVPELITMKNNTEAIMKSNTNLTESGVDHKLLGLYINGENYRFSSLDQYTLLNALESEYRRLKQLLSGLMKMYSKSTLITAKDLITRFSQISIPNLQQSQPIKVDLHRIRGFSESVIYFNDIEIDNQYQELTQDINKFFEKSKFGEIPEYRHNWNELIFVIDFNKLEDQNTQLALEGLKRAIGVVTQGYPQRIGLLPLNTGDSDNIIRKIYELKDGDLLELEDFLGNELVSGSKITSDYADTPDVAKLLRNLQINETSIIINGEIYPFRKNTWHYLIAKTIKKDVGYLKRELKRYIKRDGDKVQPVIDVRGVLHLKSSETRHMKYTPDYFADSTYTTLDNSALQVWDERILEYVKGKEYNILHTITLVDDFNTLQALKRLHNLIGMKFVGVKFRLLHSGAFGSNWKILKKITSKPSFLQELKSLIKQSNRSSPINQLNPNVLQNWLPDLKPEFLSAKSFMLINGRFIHFEENEIPQIKLFETTIKREAQRTIDALEALETILPGITSNKIDPEFIETTSAVLTKMFYQGTELYGNGPVFTTESTLSRFDMTEILLVNNFTIFESISNEDKPIDLVLVIDPLEERSQRLLSLIKDVQYLPFLNVKIVIYPTTDLKFMPIDRIYVPNFPDEVSSKLDDIESKFDVTVEVPHNFVLNDHQNVRGYLVEVHAFDRKQPVSEGIIDGLGDVCLELVDGSGKSIDKTITMTTFGYGQFIVPELGSNFSICSCDPRYKVISFSSDARADYMPVKSINVTSLNPVVTYVKLEKVDEVAKIAVEDSIINIFTIPRNEHSFEQEYQKMVLHILNSPQGDYMGVRFWLLDQPFISHSLRKFIDAINLDTKLDGSIELVKYEWPPWLRPQRFLERRMDAYKVLFLDVLFPQSVSRIIYMDPSISQLPDPFKLNEKVRTKLPFAMYKMVGHGYWETRYWAQRLGDRNLKFHSVHPAFVINLQNLRAYYGGNKLRIHYQRLSADVLSLGKIDQDLINDAQEEVPIRTLSSSTIVFLNVKNQDSVDAWLKNFEEIAVNSETATTTSTSANPENAQENAKETQDFMHDEL

SEQ ID NO: 3748 - protein, 1459 aa, Lichtheimia corymbifera
MQAVVLCLFASLYAFTACAHSVELTLTAPWSSPPLTVEFIETVAGNNDTLYFSLVNDYVHQPVTDLNTPEAVYKDAVARAQQHTGSKRAVSIAKASFAIHAAAPRVEAYHQHYREQYGDSDIPCDTWVLQDLKTPVVCHPSDLIEKVVGLSYRPDLLLPFDHIMMTHQDVHHVAILYTTDITSSTFADFHRILSKAVHERPHFAYIIRYKPVSNVSHHQAIAGYGVELALKKTDYLVIDDRENKETSVKGKLASIGKKISQTLFEDTPSKIEPLSKDEIKELGLKATQFVQNAKDPMSTLVQLSQDFPRYAKSVSGLTLQKPLVEEVIHNQGLLRESGLNAFWLNGRPIEPEDLDPFSLVRTLKTEQELIEIFERIGFTAEQAISVMTDPALAKMESSTSAREPTDYFDVRSELVIWLNNLEKDKRYKSWSKNMMDMLKPVYPGQLRAIGRNIYNLVMVEDLASQDALTRMTQQVVDMIKRNTPIRFGVLPVVAKADSPTTAAAIAFSHIQQNKSRLDSLAFLNNVLAQLNEAKAQHASMDMIKKAFDEVEQDLSLQSLLEERQAFIEDTQRLLARLCVTSQDSVMFLNGKLIEYNNEQVIARDVYFGDLDQDEDVYNHIMSKPYVSASRNPYIVVSEHRPLVMLPLQTGEQDIHYIYDPTAVNTNLWVIADFDTVPGLKLASEALGFLETDNSVRLALIHNPSGKATLNDISTVLYREMLQGNKDFRELIDTAIATKDESLSETPEQVKVFAPGSPAVESFANEAVHRQSRVLEGLGLSDGFQGIVINGRVIGPFEESVTFTKEDFGSLLRFENDKRIQPVHAAVQNMTFDRPIADILTIVATLIELDKGSVKQDAFESPRPTIRERPYQELQGNHVKITLGDRAGAFVQLGVILDPVSETAQKWSSIIETLAGMDGIYAEVYLNPKASLDEIPLKRFYRYVFDREVMFDPATGAPTTPAAYFADPPADALYTLGMDIVKSWHVTVREANVDLDNIQLDDATSVYTMYELEYILVEGHCVDSVTRGPPRGLQFVLGTQTKPAMTDTIVMANLGYFQLKARPGVWQLALREGRSTEVYHIESVGTQGKWQTSKDGSDAHKELALTSFEGLTVYPQVRKNAGMENEDVLTEPSNSKDEGGFWSSITDKLFTKKQGAAVQSKQQADINIFSVASGHLYERFMSIMIASVMEHTNSTVKFWFIENFLSPTFKDFIPHMAQEYGFDYEMVTYKWPSWLRAQKEKQRTIWGYKILFLDVLFPLDLDKVIFVDADQVVRTDMKELVDLDLHGAPYGYTPFCKDRTEMDGFRFWNQGYWRDHLRGKPYHISALYVIDLVRFRQLAAGDRLRAQYQQLSADPNSLANLDQDLPNNMQHIVPIHSLPQEWLWCETWCSDESLSKAKTIDLCNNPLTKEPKLDRARRQLPEWEVYDQQVEALRDRIHAGKQVKDEGHVESNSKPEHAEL

SEQ ID NO: 3749 - protein, 1553 aa, Stylophora pistillata
MAAKKSLSSAGAICALMATLLTVLSLFHQSLCKSSSSKSIIASLDARWGSTPLLLEASEYLAADSNEKFWKFVDSCQDKSFDHDLDEYEHVLTTAEQLLAPIGLNFLQFSLSLRYYSPRVELFNKVAHDLPAPDCEAFVQLGSSTICDVSEAVSLIKQAENIPLVQSFEFDHHYPKSENNSIAVVLYGKIGSGSIWRFHQQLVNLAENGQVHYVLRHYIESSSKRKMRLSGFGVELAVKKTEYKAMDDSKVKDDAEGKVQKQEEEDDDEVEGFLFGKLRRLYPDLKENLEQFRAHLKESAHEMAPLKVWQLQDLSFQAAHRVMSSEPQRALKVLRDISQNLPMQTRSLVKTRVKEEMRKEIQLNQKHFAQFGLDPGDSALLINGLLVQADDLDPFQLLDLLRGEALAIDRLSSLGIKGEALGKLVSLATQPEHESFVLDARHDSIVFINDLEKDRQYWGWPSEIQEILRPTFPGMMRYIAKNIFNLVLFVNPLDVQSIELIKVVNELLQNSFPVRIGLSLVADVPLDAEVDAKTNAAVGIARAFSFITSEKDSRQAFDWLLQLYHNLAEGEVPTADKLFTSFTSLFGNDDAEELFGVESEYDEDRKSSQRFFDKTGFHQLPQVVLNGVPINTEEFDNLDEAVVREVMLQTGPIQHAVFSGSVYRYSSVYEYLMSQPNVVPRVNSMVQSMERPYVDLTGGQLSTDVDINNPEAFAMLDSSQMTSVIAKELKYLTKQGEDLSLKPVTNWVIADLASKEGRVLVRAALQQLKSSSSARVGLIHNPAVKQTDDLPESLQIARTVEAVLSSKSHVTPAMLKFMESLLDESNDFDKLSSDSKAMADLMAKNPGLKVEAIQAKLSDGKAFKGKLLSHQHFCTGVVNLRPGQPAVITNGRVLGPLAGNTLFTEDDFKLLENFDMDLYARKVRDQVDEMAFDGLPADDDTSEFRSDIIMKVSSALICREKRSRQEITAKASEHSVMKIKPKREGASFDVVAVLDPLSQAAQKISPILMVLQNVTNVNFKLAMNSREKLSELPINRFYRYVLEPEVSFNDDGTIAEGPAAVFSEMPQSVLLTMHMDTPLGWMVEAVYSPYDLDNIKLQEVENQVQAKFDLEYIFIEGHCSDFHTRQPPRGLQFTLGTSRDPAMFDTIVMANLGYFQLKAYPGAWSLRVREGRSAEIYEIESVSGSTKEDDGHFTVVIDSFIGKLLKVKVRRKPGMEGKDLLSDSDSASSGGIWDSLSSMVGSESTGDSPKDETINVFSVASGHLYERFLRIMMLTVMKNTKNPVKFWFLKNFLSPTMTAFLPHMAKEYGFQYELVQYHWPHWLHAQTEKQRVIWGYKILFLDVLFPLHVKKIIFVDADLIVRADLKELNEMNLRGAPYAYTPFCSSRKEMDGFRFWNVGYWRSHLGGKPYHISALYVVDLDRLRRLAAGDRLRGQYQGLSQDPNSLSNLDQDLPNNMIHQVPIKSLPQEWLWCETWCDDESLSTAKAIDLCNNPLTKEPKLQGAVRIVKEWPDLDNEVRRLQERVAAQTPSSKDTQESTRPTDLPPVKVKIEL

SEQ ID NO: 3750 - protein, 1634 aa, Dictyostelium purpureum
MIKKISFLILLLILFINISSIRGDENEATTSFDSKLIQLSLVSNWGDTPNYIEASEFFSKQDKLLFWKFIEEFNKKSIENKSNITDKINYDLTINTAKEILLPSTKYLIEFLNVELSMRTYSPIVETFRQLSLSQKNFNEKGWVQVKGKSISDASEINDQFLLSLSQNSKSQDGADLNEEKDEELKIFDFDHIYPISSGISAIDNTPIVIMYADIKSEFFQLVHPKLKQFSKMGKIIYCYRYIIKESSQKFNLQGYGYELSIKNLEYKVMDDSAIKKDIITDSGKSKTVISIPNEDVSGFNFHKLQKRKPDLTSKLSTFRSYLLAKSQEAKELKVWELKDLGIQSAQKIISSNDPFRTLKTISQKLPTISSYISKTAVNETLKKQIEANQKSIPVTETILLLNGRSVNVDDLNPFDLTNIIQQEYESASTIQSVGPISLETVNQIIAQSSDVTPIRIKFYPNNEEEAQAVGKHIIFPLNSLEMDYTYNSWENSLNSLSKESTEPTDIFFRKNLLTTVIVLDWNELNTLSILPELQSMIQSNIPTRFAIVFNTNKNSVRARYLRENGYVSGEEIAKVFLGFKNSNIGNRGAIFFINALNYFKKAYTPSEDGVTRSVLQSAFNAVINQMHSNFRSLNQGLQSDEYNNLLKASNLFIERMSLNSFPQVFLNGIPIEFTSPEQFSSQLLVSLYDEFERLKPLYKQGIIVDTPNSYASSFQLYKTITLDTDYWSENNIPTLEKYSPILFSSNYSYFITNSKNQLKEVEAQNVLKKQLFFIQDKEIDTEEDPEKEKTVTIEVVGDFDQYNTREVSLYLLKEISSSESYKNARAAFISNPSNQETLTSSSQNTLGKLVSILKHYKKEVTNDIMIKLFEDIQSDVAKYDSIKTLKELIESYKLPIPLSDIWVSQADNLFKQAAKTSREYLNLQSTNKLPVSILVNGKIITPPQYENVESFFKDFNLALFMESKKANDILNLLKEDSLLTGKSINYSDLINKISSLIGYHYKGSSIIRKRIPSSISTSFTYSPSNNNAAASSPLKFFLVINPFNKVSQKLIPMIQEFSNKLNIAVDVVLNPPVSVSEMPLKTFYTYVIKLDNEFSEETGQLINQPLGVTSNIPEDRVLTLALDAPSSWLVQPIIAKYDLDNIRLKDLGEEQVLYAVFELENIVIEGSCNDVSTDAAPAGLEILLNPVATQNKVTQDTIVMNNYGYYQLKSNPGIWKLTLAKGRSSDIMNIVEANGEMVPYHTVVIDSLFQPQSSLYVQRKQGQERTPILQPIQEYEKQKAEEVKNKENDSNGFFSNLFNKNDDSKKQVANKKNLDTIHIFSVASGHLYERFLKIMMLSVTKNTESPVKFWFLKNYLSPGFKEFIPQMAKEYGFEYELVTYKWPWWLRKQTEKQRIIWSYKILFLDVLFPLNVPKIIFVDADQVVRTDMKELWDMDLRGASLGYTPFCDSNKDTEGFRFWKQGYWRSHLGDRPYHISALYVVDLVRFRRLAAGDQLRATYDQLSKDPNSLANLDQDLPNYLQHYVRIHSLPQEWLWCETWCSQESKAKAKTIDLCNNPLTKTPKLENAVRIIDEWTSLDNEAKEFESKIEKLKEKEVANHHNEDDHSNLINNYAQNENVENILSKLDDAQKDFF

SEQ ID NO: 3751 - protein, 1233 aa, Monodon monoceros
AGDVVRLLLGSTALWLSLLGARTASASKAVTANLAAKWPETPLLLEARPRPYLYKGDHKFPANKENLPVIILYAEMGTRAFRKFHTVLSEKAQNGEILYVLRHYVQHLQDRFEIQPGDAGLYINGLHVDMDSYDPFNLLDMLKLEGKVMNGLRNLGIKEEHMSKFLKLSSPDWDDTYALDIRHSSIMVLFIDPAQEYTVDFIKLAELFFYHKIPLRIGFVFIVNTDDEVDGKNDAGVALWRAFNYIAEEHDVSQAFISIVHMYQKVENHNILTVDNVKGVLQNEFPHANIWDILGIYSKYDGERKAGASYYRMTGLGPLPQALYNGESFHHEELNIRELETAVLHRMMDETAYLQKEVFMGTLNDRTNAIDFLMDRNNVVPRINPLILYNKWQYLNLISTSVTADVEDSSTFFFLDSQDKSAVIAENMYYVTQEDDVISSVTFWIIADFDKPSGRKLLFNALNHLEISVHGRLGVIYNPTSKIDEDNTAISRGILAAFLTLENSFLRNFLRKLAEEETATAIYSGDKIKRFLTEGMNKNAFEKKYNTIGVNIFRTHQLFCQDVLKLRPGEIGVVSNGKKIYNNITAFKFLGPLDEDFCAEDFYLLEKITLTNLVEKIEDIVENTEVNSKNLSDLVMKIDALLSSLPKHASRYDVTFLEENHSIIKINSQENDMSFDVIAIVDPLTREAQKMAQLLIVLGKIINMKIKLFMNCRGKLSEAPLKSFYRFVLEPELTLPPNDVTGPVAKFLDIPESPLLTLNMITPESWLVETVHSNCDLDNIHLKDIEKTVTAEYELEYLLLEGHCFDIITEEPPWGLQFTLGTKNKPVVVDTIVMANLGYFQLKANPGAWILKLRQGKSEDIYQIVGHEETDSQPDLGEVVVVLNSFKSKILEVQVQKKPDKIQEDILSDKDEKKGVWDSIKSFTRSLHKKEDNKETDVLNIFSVASGHLYERFLRIMMLSVLRNTKTPVKFWFLKNYLSPTFKEVIPHMAEEYGFQYELVQYRWPRWLHQQTEKQRIIWGYKILFLDVLFPLAVDKIIFVDADQVVRHDLKELRDFDLDGAPYGYTPFCDSRTEMDGYRFWKTGYWASHLLRRKYHISALYVVDLKKFRRIAAGDRLRGQYQTLSQDPNSLSNLDQDLPNNMIYQVAIKSLPQDWLWCETWCDDESKQRAKTIDLCNNPKTKEPKLKAAARIVPEWVEYDTEIRQLLDHLENKKKNATCVKQEPSVTSVADYV

SEQ ID NO: 3752 - protein, 1344 aa, Ogataea parapolymorpha
MKALGIVFILNLWLLTLAEYVNLQMVGSWNQTSFKLNVLETFSAHNESLYLPLTLKLIGITHNEDEVELEDITLSDEDYFKYACSLVNTDDLGFVETDLALRTYSPRIVAHFQESDSLQCDGAWLKQENNVYCMPDDVFALKTASEGHVEPLEAFDRVIGNRENVFILYGDYESEKFRHFFANLYESAISGKLGFAWRYTPREEIEKEVLAGYGVDLTLKRTDYIAIDDRGFTEEQQAKLKFEPGQETVVPVDDFIDRHMDDIPKLSQDHMKGLVGKLVSYIAEKGSDLRLFRKIMLDFPKYASYISLRREPEEIAVESPNVPAGMYINGVPATEKFLSVFEILKRLKQEKLIVDNLSSVGVDKNEVKTLLYRFANESIVAAAHLPRYQTTDHPGIIYFNDLENDPQYADLQNPRLAYKSEWSGRKIPPARENIHDLVFAINPTDPLQLQYSLMMINAILKNLISQRVGLVPLVRTEEDQVVTEQLVKIHRTSGPIEALRYLILVHEVINSPGVSFDTLKQVDVPDKDELLRNLDSFKNQFALQSQPHVIINGIFIEFNQNWQYAMSEQITADILYLNSEQRQRRIPREVTLKDYLRQGALARRDPLLIPETLDRLRSSYVPAPTYETYKLLKNFGGDDKIVLNAVGKLSSRKFRSQVAEALKSGITLRIIDVSNSPEVETLTKSLDDVESALVYLDGEFASKPTDNSALSVISECFGVDDFADDDEVYLILNGRLIDLHDREPVKAVDLQILLNREKSVRLNLLDEDTQDFEYKSWVVTSSFYNDDGDFIISGLLPRYDFSRSSSFIEQGTGYVDVDSVIDPLSEQTQSILALSEVFEKFDFVRSRIWIKPSEKDELKIKRLYRGVFPTSVKFYENGTEKRDYSAFFDDIPEKTLFTADVDVIPSWIVSIKEANTDLDNIKLDISGSVDGVYELRSILIQGHAREGIDTIAPLGLGLQLLDSNGASVSDTNVMANLGYFQLKANPGLWTLSTKKIIPDVEFEIDAVDTKYKTRISHSRPEKIPILDLTGAMVYPIVSRKKPSNSLFSGLSKSFSSLFKPKQAEINIFTVASGHLYERFLGIMTASVMAHTKHTVKFWLIENYMSPKLKKHLPLLAKHYGFDYELVTYKWPTWLRGQREKQRTIWGYKILFLDVLFPQDLEKVIFVDSDQIVRTDMKELVDMDLKGAVYGFTPMCDSRKEMEGFRFWKQGYWKTLLGDNLKYHISALYVVDLKKFRQIAAGDRLRQHYQSLSADPNSLSNLDQDLPNNLQHTIPIYSLPQEWLWCETWCDDESLKKAKTIDLCNNPLTKEPKLDRARRQIPEWTKYDQEIETIIRGSPVTHDEL

SEQ ID NO: 3753 - protein, 1241 aa, Protomyces lactucaedebilis
MRLIEGCLLLGLGITVDAYQLRASLKGPSGFSPPSLPAEYVETLYHVNRQAYCDLLKDLSTSPVINDKPEAQLANLLKRSHLTDQERGLVKLSLALHEYAPAATFNGTLHNCTANPQRVVYTDFTTPFVYDAETQVGHLPPGAAQEPLTMTGYGAHLALKRTDYLVIDDSNKMSDASDDHKVVPLTKEQIKRIGLRAAARVVRSDNPLDELEDVSQNFPMRAQGLLKSSISKELEQEMKGLRELVRGDVFLINGREVETSPEKLMPALRAEAALASAMHKLGLNLTQIVHLLTLDVVGVDHVDRFEVRNPVVVYLNDLEKDDMYEGWRTDVNIFMEPLMAGQLHQIRRNFHTGVAYIDLTDEMHVDLLTNWMMLITRGIPIRWGFVPAGETELQRNLGNAFREIFKHGGLEQAYEFIAGYTRGGDLEGTYAMFQKKLKGKSLADLADLGSSEYDEFAKDWIERFGKDRIYINGQAVVRDEALMQRLSAAVRDDTMFVQERMIEGGVEDSGDLQDIFLDGAQLRFSEALFGERKYITLHEYQAQPNAGKCSRDTEIVFSGEGWPDLSKMEELAEKPCLSHVDGPRRMIVNGRIFEKLSFLEMPTMMAQEQREVIKYKDAAASVGASWSVALLTLIRTSKRLLRTSLPPFVSTDLSHFEVGREQSSTLEIKVFLDPLSENAQRWSTIIKSLSNLPNVFIKVHMIPKSGLTELPLKRFYRYLMPAEPSFAPVHVDFSGMPSDLMVFTLEPWNSWVIAPVSAIEDLDNLHLGDRSIDAVFEVTHILVQGHAREANTTNPPRGAQLVLSSGDGVSQAETIIMANLGYFQLKAMPGSWQLALKEGKSDEIFELQSSVRTVHVDSWAPSTLYVRLARKPGMEKADVLDDKQTAGKGSLWSKVSNMGKKDTALVKKHADINIFTVASGHLYERFVYIMVSSVMAHTDKSVKFWFISNFLSPQFRKFIPHLAERLGFEYEMITFTWPHWLRKQTEKQRIIWGYKILFLDVMFPLDLEKVIFVDADQIVRTDMIELVNEDLKGKVWGYTPMCDSRKEIEGFRFWKQGYWKSFLRGKPYHISALYVIDLVAFRAQATGDRLRQQYHALSADPESLSNLDQDLPNHLQAQIPIHSLKQDWLWCETWCSDESLATAKTIDLCQNPMTKEPKLDRARRQLPEWNEYDRKVKGFAKLVAEREAAGGQEGDDSMGSITVDVDAVGQNLEMKKDQLGDEAMTGSDGGEKATRKGHDEL

SEQ ID NO: 3754 - protein, 1657 aa, Phytophthora parasitica
MRPTTWLSAGLAALLAAAQPSLTSARGVHVNLTASWPSSPFFPLMETSEFLAEENPLYFWQFLEELETRTAYVEFMGNDVDALGTLAVTVAESIAAGSKNVLELMLATRTYSVQVEMFRQLGLDSGVRPCGEDADTWAVFYNEPHCVESVACSVDELEAILRGKKKQQNKDQTCVAAGVNDIELQVDHKYPFIASDSEKTPMSAILYGLVGTEKFHAFHKKLVKQAQNNNIQYMVRHYPRDSPLDTLLQGYGVALDIKNMEYKTIDDSKKTGGDDTANDEEGAEEEDEEEEEIDDEEVDGFLFKPLMARHGAIADDLKQFYDILVKKADGEQEQELKAWHLKDLGASAVRAIVDAKNPLKRLETLSQDFPVQAKKLAFSRKSISTELREEIALTRMQAANRRLKNKFIMNGIAVDPTERSFNVFDFMKTLKEEWSVAKQLGGLPLNQSELEDMLKHVRETNQEQPVVRIHVHGSMGGSTPLYLNNIETDPNSADWSPDLNILRRPAWNLIFVRKNMYECVLVMDPLTGAGRAALSHIGFMRMRGAPVQWALLVSSKELMTSKTSDERQAVVEKYKAFKTTDKASPWHFAKLLMLAQSKDNAEAAVKDDETNNSQSGDEETTEVEKEENRITPTRVASGFLQRVGEDGSSDVLVERLVEAYAEAAGGVGTVEDNEEEALECLNSDQFDDEILAMTEFIHLKHLPLDSFVFNGVVQKDLDIQRSMMANFGRDQPLYVNMAHRGMLNGEMDLIEELLAEQDAYPAYLSIFESSEGRPGDMEVKTPSHLVADDVDGRLEAAARPAVSYLHAPGSRALPKKQTVIFPVDLNDPRDAGHAYRVVKAVLEDSEQSLRVGVVAQLNDSDRNTVGELAAAIIAAIGHSDNEVHLKFVLEALNCIVKQKSVNTMKDKLRGIWNKTSKSENDKDPIYEKVLKLLSSKTGKWLTTKQRGVLTQFNTLLRSRFPPSYAHESEEDSSKIALPHLFINGRQVVLPPQSLSDEDVATIVNFDLKYRTQPVAKALIKRSATLKARDADKLSFAIMKTTGIVDKYVKTDRTPQMNVEENSLNTVRLPGDPSLQVAAYVDPLSESAQVMSSLLRMLHSQLNATIELVLVPADEYTEFPLQRFYRYLFDKKSSLAATSVEFRKLPVQPILTMKIDTPEAWNVQAFHAGDDLDNLRVDPDSPAAAKSTTSAVFQLESLLVYGQCRDTTFNMYSPPNGLQLVLEREVGAQLLHRDTLVMKNLGYFQLQATPGVWSLHLARGRAAELYDIIDLDTELPLETHPITVYDFGSHISQLYVRKKEGMEHEELLQSVEDAASEKSKSESSASEDDGALRSYWSSMLNMMGKQDDKKIQDAVTEAEQADNDSAVVQHKERTGETIHVFSVASGYLYERFVKIMMSSVLKRTNNPVTFWLLENFLSPDFKKSIPVLREELGMDIRLVTYKWPNWLRQQTEKQRIIWGYKILFLDVLFPLGVQKIIYVDADQVVRADLKELWELDLQGKPYGYTPFCDSRNVGFQFWRQGYWKDHLRGKPYHISALYVVDLALFRQMAAGDMLRAVYSQLSADPNSLANLDQDLPNYAQHQIPIFSLPQEWLWCESWCSDDTKVAAKTIDLCNNPKHKEPKLDMAKRVIAGELFNESWIELDQEIKDAEAKYAAQAA

SEQ ID NO: 3755 - protein, 1520 aa, Loa loa
MESLWLIILLALPYVTNSTISKKSVITSLHAKWPQTPFIAEASEFMAHESDSLFWAYIDEIVEKLNVDEWHTYSDAKQYDLTVRLAGYLLQEARVNLLKFALSLRAHSPAVLLFQRLGAEKKKSCAAFADIHGILTCDVNDLEKVIENDMKGPAPTVYSIDHVFPATKEHNVTLIIYGELGSASWRKFHLAAKALSRGGKARYVLRHFVKDVRDDKLLLSGYGVELAIKSTEYKAVDDSNTVTDKMVVEESSEEYIDNEEDNCGFNFNILRRLHHDLKESIEQFRLHLLERDELTPLKVWQVQELSYQTAQRIVQAGPQKAINIMTDSSQNFPLSARSLSRQIVRKEFISEVSANQEQLMEYGISEGESIFLINGIMVDIDALDVFQVLDLLKQEEKLANGFFRMGIKNEYLSMLMDLELSNERLSYALDFRSASPEYLNNLDTDKQYRQWANSVGLLLQPYFPGMLRPIARNLFTLIFVVDPSQKETRDLLHYALRFYAHEIPVRLGVVFVTNDEKETSGFDDASVAMLNLYNFIKMNNGIQKALDVLTEVLNVKEESVSPKDVLSYFQIKYPNHDPNDVFGSDSDYNNGRSTGYKFLRDSGLGLTPKVLLNGIVLDDSGITADHFEETVMMEIMRVTSRLQKAVMEKKLKDQDNVMNWILSQPEVMPRINKLILDSPLSPNALYLDLTSAKKCTNVSPAQYYKLPSEEQNQCMLKGMRYITRTEEMKTHFSTVWVVTDLETVEGRLLAYNAVRHLKRSYTMRVAIINNPKDIKAATTSGSITMLVNIASRLLVPRQMKSFVTKLVKEEIVSKLLNKQITLDDLAVNDMNMTFFYKESKQINSDEIVADARYSKDILGLKPGQLALVVNGLLIGPLSDGEVLDVADMELIDKLILLRGGKVIGDYMEKWKIQTRHGESSDMVARSMALIGSGVAKKRRSIALSREKESVVTIYGNNEEGIILVLCIVDPLSTQAQRLGHLLTVIQKVVNVEVKLVMNPRAKLSELPLKRFYRLVLQPTVMFDDSGRIDIAAYEARFTALPNKQLLTLAVVPPDAWMVQSVYAIYDLDNIRLENVAGNVLAKFELEHILLEGHCFDDITGSPPRGLQFTLGTLTNPSRYDTIVMANLGYFQLKADPGAWILNLRDGKSKDIYNIVSHVNTELEDETGVNVLIDSFSGRTIRIRVAKKKGREKENLLSEKSEGESEDYLSVWSSISTTSKSGGEKYDAINIFSLASGHLYERFLRIMILSVMKHTKHPVNFWLLKNYLSPNFKETLPQMAKHYGFKYEFIEYRWPRWLHQQTEKQRVMWGYKILFLDVLFPLSVRKIIFVDADQIVRTDLMELMELDLGGAPYGFTPFCDSRTSMDGFRFWKKGYWANHLAGRKYHISALYVIDLVKFRQVAAGDRLRGQYQGLSADPNSLSNLDQDLPNNMIHQVRIKSLPQEWLWCETWCDDASKEKAKTIDLCNNPQTKEPKLDSAMRIIPEWKDYDAEIKVLLDERSKKYAEERKSGHKAIDEHTEL

SEQ ID NO: 3756 - protein, 861 aa, Diploscapter pachys
MEKTALGKAPKVLLNGYVLDDSGIKSDKIEETIMYEVMKISPTIQRAVMEGRLKDRSNVANWLMEQKDVMPRLNARVLDAPTTKNYLDLTASTPCKASTLTQFGTLTAPQKSQCILEWAKYLQKSEEDITAASTLWVAGDAETAEGRDLFYSALKNLKHSKSTRVTFVMNPADEAQACKPNSITNLIHAAFRLLPRNQAKQFVTKLVKEENVKSFEESKLNIEDLAVGGMNVERFNKEKKQLNCDRIKMEAKFAQDILKLKPSERAIVANGLIVGPLSAEERFIETDFALLDKMLEARGAAQVATHVDKWEIEKNEEKASDMVLRSMALVGKHAVSKKRTWIDLQGDGHSVVKIFADDASKAIIDVATVVDPLSTAAQKVAPILELIGQTVNCDLRIVMNPKGKLSELPLKRFYRYVASPQLQFDQTGSVVASSARFSNLPSKQLLTLSVHAPDAWMIEAVYAEYDLDNIKMQQANPGSWLLRLREGKSKEIYKISNHFNSERTEGEAIRVLIDSFSGRTIRVRVVKNEGMEERSLLSDENEEGIWNSISQTLTREKPEKINVFSLASGHLYERFMRIMILSVMKKTKSPVKFWLLKNYLSPQFKKTLPLMAKEYGFEYALVEYKWPRWLHQQKEKHRVMWGYKILFLDVLFPLDVQKIIFVDADQVVRADLMELMELDLGGAPYGQAAIYFVNFKNSYVPFCESRKEMDGFRFWKQGYWANHLAGRRYHISALYVIDLHKFRQIAAGDRLRGQYQGLSSDPNSLSNLDQDLPNNMIHQVKIKSLPQEWLWCETWCDDTSKSSAKTIDLCNNPMTKEPKLDSAIRIIPEWREYDEEIKKVIASQLSSSEKKQSQEQGHPEL

SEQ ID NO: 3757 - protein, 1495 aa, Chaetothyriales sp.
MPASAFPSRLARLGLLACTLLFGSAQTASSVNVALRASFNSGPLLVELLETAAAENASSYFPLLDRIADGAFAESSTDKELYDQFVHVLREEGHVQSPEDLSSFKLAFSLHASAPRVQAHFQYYNRTISPHLPAAQDAACPVWVQLDRQQYCTPTLERSQQSLSLDEAEEVLPFDRVLGPNHGVPSSILYADISNPLFPEFHKVISASAKAGESSYRLRYRRSPGEHKPLYLSGYGAELSLKRTDYIVIDDRDAPKSEDLNQAALKEPSDAEELEIKPLTTSELANLGLNAASYIASSQDPLQALVQVTANFPKYSFFLAGQNASTHFLNEHQANRKLLLPAGYNILWINGLQIEPRQVNAYSLLDHLRRERKLIEEMKTIGLTATEAVSLLSSDVIAQAQADEVIQRYDWRDESEGGNVIIWLNDLEKDKRYAKWPTYLAGLFQRSRPGQLPPVARDIHNLIVPFDVENIKDIELVVKHLQSLIKGQVPIRIGLIPSGPTQTAETYARLSHYLVDTYGLSSLIAFYDDLVKSKKVSSNAEKHLATATKDAELREGKQALTYNEILQSEALGEYVSRAKEYLDRLELRTDDPHFIVNGVVLPRGETWFELLSSRVFLDLQQIQQAVYQDALQEDTWVPHFFLFQAIARRNSWIVPSDSKDVKIVDVPALTSAHPDAFAQLPKSDGEDATLLSDRAHLLLVADLDSPDGRELLASALGFKAARSEVELLILHNGGDSTIPGLSEHFKDFWVAYKEQAKDLTAEDLHRLIQQHANISTGHDAIKSAAAKLWEHGKGLVRDLGLEAGQNALWLNGRLIGALPRLFTLPDLLSLLDFERSSRIAPVTTAITALGLEERFTNALDLAKITSTVARSHKSELPEGLRDAAPLIRIDRFKAWNETYTVIKKEPAADPLVQVVAVVDPVSEVGQSWVPILNTLSELDGVNTKIFLNPKSSLSELPVKRFYRQVLSSAPTFHQDGSLQAPGAAFTNVPLETLFNLGMVVPPSWLVSPEEANADPDNIKFNVAGNDADVDVLYKLDHILIEGHARDVTAGPPPRGVQLLLGTTEQAHVTDTIIMANLGYFQFKANPGFWKISLKPGRSSKIFNIDSIGPNGYSAQPGDATSSVAVLSFDGLTLFPRLSRKPGMEYEDVLEESGSKGQVADIIHKGASFLSSLGLTTKEPWTKSTNAEINIFSVASGHLYERMLSIMLVSVMRHTTHTVKFWFIEQFLSPSFKSTLPILAEHYNFEYEMVTYKWPHWLRGQREKQREIWGYKILFLDVLFPLDLDKVIFVDADQIVRTDMIDLTRVDLHGAPYGFTPMCDSRTEMEGFRFWKQGYWSTYLRGKPYHISALYVVDLKTFRALAAGDRLRGQYQALSADPASLSNLDQDLPNHLQHSLPIFSLDQNWLWCETWCSDEALTTAKTIDLCNNPLTKEPKLDRARRQVPEWTVYDEEIAAVVRNASKKEDDDGEQESQAAAADSESGHDDTQKSAWQKKEL

SEQ ID NO: 3758 - protein, 1484 aa, Leucosporidium creatinivorum
MNDSDAPQTQLYAFDHLSPIKRDDSLPLITFYAYPSPSARRASPPAEFTARVQSFDKLYAFVRTLSSPSSLPTVNPKAAVSGGKTSSKASLAGPPRLQVALRWGAARNRFRRHIDDEEPQNLVLSGYGAGLDIKKSDYLAIDDRLASSDKAASHLEVEGEDASPKMDPVKKSDIAGLGLRATAHILSSDSPLEAFTNVTAAFPLLASHLSTLVPVVPEDLEEEVGTFQMTSPLSQRPSFHLNGMPLPESSIDPFALLRIMRRERKFVTDLQGLSSHMSTKQARDVLMHEGIGAVASGGTTSRGRDVALSPAVLGDLFDAGDKQEGGGLILWWNDLEKDKRYKSWSTDLKDMLRPVYPGQMNLIRRNLNTVIFVLDFSQPSALMLLSENIRQFVSRGIPLRFGVVPQVDSLAHENDISAKVAQVLWYVVDGVGRAPAMALLGDVSSPPSLALSGDRVSESILRRLYEQLAMQSVHISGGPLATFDEVIKGVEVEATAFNSRVSKARAYTKRLAVEREAKSLGSFFLDGAHFKLDDDWTQNLQRGLGSHVQYLQQMIYRDLLTNEVNVNRYFFDLPTTHARRNPYIFPSPETNPLKIVNLVDATKGVHASMAKATFIEGVSPEQLIDPEAEAPPALATLFIIADIDSPEGRDLAKSALQLDKTPQTRISLLHNPAHADLPHSWELSNLVYLLHTVGALDQVLPSELLSWLELDVDYGGPGKAAGTTWTEENPIRQFLRKGANRRDTLKAVEWWAEAGKLARNFRFEKGQNGIIINGRVIGPFEDGAFGAADLKGLVNFELQKRINPVVEAIDASGFNISLLERSQRCNLYNVASSIVSEAYLPDPAAGMFGGNSVERRSYYRALQNEHSSFIGPRENGAIFEIAVVVDPVTELAQKWAPIIQTLASLETVHLRLYFNPSLHIKELPIKRFYQYSFAPEPSFDVSTGAELQPEVRFEGIPEDILLTFAADLQQSWLAFPKTSVHDLDNIRLADLPSWSRREGVKATFELESIIVEGHAREMPSSQPPRGLQVELLAGSGPASTSEKRGDTIVMSNLGYFQLKAGPGPFRLAIRSGKSSDVYSFASIGAEGWKSGDISKTGDSLLVSTLEGLTLYPRLRRNPGFETVQLLDENEVAPSKGAGLFDRVKSMFPFLAPSNALAVKKQAEINIFTVASGLLYERMAFLMMVSVMRHTKSTVKFWFIQNFLSPSFRAFIPHMAQEYGFDYELVTYKWPHWLRAQKEKQRTIWGYKILFLDVLFPLELERVIFVDSDQIVRTDLKELIDMDPKGAPYAYAPMGDDRPEMEGFRFWKTGYWKDHLKNNPYHISALYLVDLDRFRKVAAGDRLRQQYQGLSADPNSLANLDQDLPNNMQSAIPIHTLDKSWLWCETWCSDESLAQAKTIDLCNNPLTHEPKLQRAKRLIPEWTVYDDEIAALARRVAAEESSIGAFGKRADDLEQAVQQEVERSEFVHEKEGEKEVRQERKKDEL

SEQ ID NO: 3759 - protein, 496 aa, Coccidioides immitis
MLVSQLQMFITRKIPIRFGMVPTLPDEASMQQIRVASYLHQTYGLKTLLTYFENALEGAKSQIVWPSKDSFNAAVQDREHHADRPKLTFEEILSSDHFEPTIITKTKAYLKRLSSDGPNPPMFVNGAIIPRDEHWMQPLVTRLAQDLEEIQQAIYGGLYDDDSWLPIHFLDGAVLTRNPLIIPEDPGAIQIRDLHAAFKSRRSAFDALPRIRASSDSNLENWSSLILIADFDSEDGIKQLGSVLEFREKNPGIEVLLLHDSHLDFSGRVSAELFNLMKESRDVDVSALKSILEVGSERLLTQEPDVERRRNYFSSFSPLARELGSNQGGVDIVFNGRLIGPIPSSSLFGYWKKFLKGLPYHISALYVVDLNRFRELAAGDRLRGQYQSLSADPNSLANLDQDLPNHMQHAIPIKSLSQDWLWCETWCSDEALKTARTIDLCNNPMTKEPKLERARRQVPEWTEYDDEIAELGRRVAREQGQAGDEKNEKMRERDEL

SEQ ID NO: 3760 - protein, 1453 aa, Papilio polytes
MKSTGLLIPLLVILIHVLVFVSTDTDPPKRDEKRAKGVTTFVTAKWESTPIVLELAEYLSGESSDLFWSFVNGVNSLKSPLQGLATDKEVYDACIGIASTLLAPAQLRMAKLALSMHLTSPAVRMFDEIATQNGAKDVQCEEYVHIASRKICDTDTLRDVLKAYKTYNPEDHILETYLLDHSYPSSDNKTLTAILYGELGTVEFANKHKILATYADMGAVNYVVRWNVKSRGGPKLRLSGYGVELQLKSTEYKSQDDTTPKETDTGDAAEPSVEEDENDPQNQIDGFNFGRLKNLFPALRTPLERFRRHLSESSEELAPLKVWQMQALSMQAAAAVVDANDAGGDEALKVLTSIAQNFPMQTKSLIHVNVPRSFRDEVLYNQDVWASSLGLRAAEPLLLVSGAQYDAEEVDVMALLAALREDVGPMNALHALGLPKNLINSLMSLELGEAYTWEEYGLDIRDSAITWLNDLESDDRYRRWPSSFMELLRPTYPGMLRNLRRNIYNYVCIFLKWLIFVTMVQSRNLSRFYLKMGETLLKHATPVRVGLVLAPGSDAALSAAVRSAFNYVAQDKNSNKEAFYFLTQLISSCENNDMTLEHVKNQLQKYASSGTNVDDIIYEDSEFNFGHQLAEEFLFKITSDKYPLVLINGVPLWDDGSPTAATSSVELLEEALVSLQRAVFRSELADTDDAVDHLMKQPHIMPRLNRRVLASEPTQYLDLSGVPSSPELFTEDRLHRLMHLTGRDALATALPILKYFQKSGKPEKITQTIWVVGDLNEKESRDLLRNAIKFMRESGGVRVAFIPNVEGVSGVSGEQSLNKAVLAALAALEPAAATKYVTSLLEQEGCHERQDCDILPELVPVLNKLEWVLKAARVLCARGMRLRAGARALVHNARIIGPFEDKLPFTMDDFVLLDRFSNQVYGDKIADLLLKKKTTVENDVYDESITVDIPELSADEYLKVISVLSSRSPKSRTPLPQGLLLLVLRRVVNCRLKLFLNPQDKNSDMPLKSFYRYVLEPELQFTEAGALGGGALARFWRLPQAPLLSLELRTPPNWLVECVRSVYDLDNIRLADVDSLVHSEFELEYLLLEGHAWDTTLGTPPRGLQLILGSREQPELMDTIVMANLGYFQLKANPGAWTLRLRPGRSEDIYEIVGHENTETTAGNSDIQVLLGSFRSHNAGGIWNSIASSFGGGGGGGEEAEGAEETINVFSVASGHLYERFLRIMMLSVLKHTKSPVKFWFLKNYLSPSLKDILPYMAQEYGFEYELVQYQWPRWLQRQRDRQRTIWGYKILFLDVLFPLHVKKIIFVDADQIVRADLKELVELDLAGAPYGYTPFCDSRKEMEGFSVLDQDLPNNMIHQVAIKSLPQEWLWCETWCDDKSKKQAKTIDLCNNPMTKEAKLSAAMRIVPEWREYDGEVRALQARVRRGLYQHTDTDQERHLHDAGKEHEHTEL

SEQ ID NO: 3761 - protein, 1517 aa, Exophiala dermatitidis
MRESTLPWRVTMLALWQFILVVASAASSSPSINVALETSFAAGPYLVELLETAALENSSSYFPLLDRIAEGVFAELQTEQELYNKFIDVLQHDGHISSPESLSSFKFALALHAAAPRVEAHFQYYNSSVQPHFMAAQDAVCPVWVYLDGQQYCSPELDRAQQSISLPEAEEMLPFDRVLGSGLDGPASILYADITHPLFGQFHNVVSQTAREGTSTYRVRYRPAIGTARKPLFVSGYGVELVLKRTDYIVIDDRDASATEEAPDADQKALEQPKDDELKDLKPLTTSEVVNLGLNAASFIASSSDPLRSLKDITSDFPRYSSLLAATNASKAFISEHRSNRERFLPSGYNVFWINGVQIEPRQINAYSLLDHLRRERRIIADLKGIGLTSTEAISLLSSEVIAEAQANEMPQRFDWRDDIEGDTVLMWLNNLEQDKRYASWPSALRNLFQRVYPGQLPQLRRDIHNLIVPIDMGNVKDIELAATSLQGLVRRQVPIRVAIVPTGSGYLADVYAKLSYHILDKYGLAPLMGFLSEVSGSRKLPANAEKSFQNAVKGLSPREGKQELSYNEVLNSEDLLKRLQARNAYLTRLALNSTDPPFIIDGVVLPRTDNWFETMSSRLFADLQLLQQAVYQGAVPDDSWIPEFFLLEAFPRRNEIVFPHDPKDVRIVDVSQLVSDFADEFDNLPRIPGSEAGLLSDRAHLFVVTDVNSEEGRTFLREVLGFRHQHPEADVLILHNPPSESSPSGLECAIHALVGETGRDITPEQLQQILDGHSNQADGEQKAHECGSYWSSKAKLTQSLGVTPGETGLWLNGRVLGPTHHALTAEDMEALLGFERRERIAPVTTAITALGLEDRFSNPLNLAKVTSLVARSLKSDLPEGLRESAPLIRMDRFKIWNDTHTSIKVANSEDPSIQAVAVVDPASEVVQQWVPILETLSKLHGVSVQIFLNPKDRLSELPVKRFYRQVISSEPDFDENGSLTTPTASFSGVPRDTLFNLGMIVPPSWLVAPKKCVHDLDNIRLSNLADGENIDALYELEYILIEGHARDVTVGPPPRGVQLLLGTEQEPHFTDTIVMANLGYFQFKANPGYWQISLKPGRSSKIFHIDSIGPNGYAAQPGDETNSVALLSFQGVTLFPRLSRKPGMEEEDVLEPPTSGIGGAMEYISKGASFASSALSSLGLKKGGASSSTNAEINIFSVASGHLYERMLNIMMVSVMKHTKHTVKFWFIEQFLSPSFKSTVPILAQHYGFDYEMVTYKWPHWLRGQKEKQREIWGYKILFLDVLFPLDLDKVIFVDADQIVRTDLIELVNLDLKGAPYGFTPMCDSRTEMEGFRFWKQGYWQTYLKGKPYHISALYVVDLKRFRQLAAGDRLRQQYQALSADPNSLSNLDQDLPNHMQHSLPIYSLSQEWLWCETWCSDESLAQAKTIDLCNNPLTKEPKLDRARRQVPEWTEYDEEIAAVIKAAKAKDKAREDQSKETLSSSSSSRLLEQGDDDDDGEQDQKNIIDGEGERPRDEL

SEQ ID NO: 3762 - protein, 1579 aa, Rhizophagus clarus
MVLKKLRYNTLLLVSYLFCIIFIVSKAETPPVQTWLKTSWDAPHLLLEIIESVSIDNSTAYYPLINEFINQGLFSSELTYHEVYNAALDVIESKQYLSTPTSISILEFSLSLHTTAPAIQAYYHYYNTTVVPSKQEFDVNFNPECEVWVDWHGHQACNVENFKKLTGISKTGSFDKLPNSSDQHPKLLSFDHVLSSNAGTTKPLIILYADISSPSFVPFHQFITDLVNNEKAEYVLRYKPPKGSQNSLYLAGYGVELALKKTDYIVIDDRKVESDDHNEKENENSESYNDSHSDKLNEHLFDEDISEIKPLTTSAIKDLGLKATQFIISSPNPLSTLAQLSQNLPKYSYHIAQLNLNSSLKQEIKINQNYVGLDSNSFWLNGLTVDPSSVDPFSLLKLLRRERQNVLSLMSLNMTSRQAVELLASPIILELKSSQDLVKGIFDVRDKSEKKNIITWFNDIEKDKRYKNWPPRMFDILQPIYPGQMRYIRKNLFNVLFVIDLSSMKGLEIINDTKMFIERNIPIRFGLIPLVIKEKNESIIMAKIFYYLIDQYTIPSIMQFFSEVLNELKNSPSANIVKIAEKQFNKVTNDQTPKDETSVKSFDYFTKSDTESSLEEQISGATEFINKFRINADGKGKGALFVNGKYFDIDDNYQRDMVQTITEHTVFIQQKVYVGEISDHTDIFEYFMTLPRVPSRRNPHVFVSDSQPLNVINLVDKKHESDEKLNNIRYIYSTKQDDNEVPISLLLITNFDSEYGARQGLEALKYLDESSNVRIAFIHNPSTQPSAREDISLSSFIYFILHSSEANTVDMPDLPKILKEAIEEYLNIEDNIKMPFIEQTESQEIPIPDSESINPARSFGWQFADKVKSQTYWKEWNSLTRKTLKLNENDTAIIVNGRVVGPFIKEDLFIVDDFRLLIDIEFSERIEPVINAAKAANLTVQLNRSNYSDFISKATSIIATSMISDVPLGLFGGQDLKRDLSFKKLKSEHSKIVIGDTEAALYKISVLIDPLSETAQKWSTILEILSQIDGVAIELYFNPKMNLVEIPIKRFYRYVLEPKLKFNTTTGNLIAPSAHFSNLPEDPLLTLGMDVIQAWLVTPKVSIHDLDNIRLANLDSRLRIKGVESVFELKNILIEGHARDMTLQAPPSGLQIVLGTKNNPVMVDTIVMANLGYLQLKANPGIWTFSLREGKSSEIFNIQSVGSEGWYSRNVEEIGNEIVLNNFEGLIIYPRFTRKPGKENEDVLKFEEKDGIWNYFVNKFSKNVSKNKAEINIFSVASGHLYERFLSIMILSVLKHTKSRVKFWFIENFLSPSFKDFIPHMAKEYNFEYELVTYKWPHWLRAQKEKQRTIWGYKILFLDVLFPLDLDKVIFVDADQIVRADLKELVDMDLQGAPYGYTPFCDNRPEMDGFRFWKHGYWKDHLKGKSYHISALYVVDLQRFRHMAAGDQIRGQYQSLSIDPNSLANLDQDLPNNMQHIVPIFSLPLEWLWCETWCSDESFERARTIDLCNNPLTKEPKLDRARRQVPEWESYDKEVATFAARISQLQKVLITESNIQSKSTIEVSSKSEIPVKTTTHEDL

SEQ ID NO: 3763 - protein, 1447 aa, Unknown
  Description of Unknown: ABL29440.1 Sequence 9 from patent US 7129341 sequence
MRWGFWFAIATLITICYAAKPLDVKIAATFNAPSFSALIAESLYQEKKEGFIWYLNHLSDLLDAENTTEKELYINVVNSLKREYVLSDEELSSLQFSLGLFSGAPKLQAFSSIVQSRTCDCDTWLQLDEESQVCFSDLPKDSPLFSKLYSKNPLDYEVVKTSATGIPYAVVVTSFERDLIPFHELYYKLALEGKCNYVIRYSPPSSSKLNSKLYVKGFGTHVSLKRTDYLVVDDREFPREKGDNPASFTSSRNKRSNERLFGMTSDSLQTVTPDKIAILDLLATQSIASSADMLSAFRELTQDFPIYAHYLSIQPDVSNHLIEELNQFQSQYVPEGINTIWLNGLSLDLEETDAFSILSLIKKEKDMFDRFEALGIKSSKVLDIVTNEAFANEDSDFKFVKFHCQDDIEDWKAIHWVNEIESNPKYDNWPKSIQILLKPIYPGQLHMLGKQLHTVIYPIFPSSPSSLPLLSELIQFSRRPSPVQTGMVCAANDDDEFAQTVCKSFFYISKESGTDSALKFLYKCLNSDSSADLYSLLEEHLPLSEHDDDTLANLKKDLSSSFFDHYMSKSNSWVNRLGIDSSASEVIVNGRIISHDENYDRSMYGIFLEDIPEVQIAVAEGKISEDDNLLDFILRDASLTRNPLVYPSAKSSIKSIDIKRVLENVGSLNHEDILLIGSSNAKYSFWLVADFNEKEGLEILSLLADLLSENKDANLMLIQEGKNHVVPPLFAKLLSSPKRSSKHLQEILNSSLDPSSGVVNDMDKALKFLKKSKAVVKELGLTGECKSALLLNGRMICSFSVDSLNTADLKMLMQMEYDNYLSKLSNIAGSSRRLKNSRAISFLSSYLKTLESTPMSTSSPTKEEKLFPRDFIYNKLGVGNATFETDDFSKAYYQFVAVLDPLSKDSQKWSAILEAVSKLNGVGVRIHLNPKQTLSELPLTRFYRYSISAEPEFDALGHLEESYVEFDNLPADTLLTMDIEARDAWTVMQKDVDIDLFNIKLEHTSEAEALDSHTAIYELKNILVQGYSQEEFRKSPPRGMQLKLGNLTNSHVTDTIVLSNLGYFQLKANPGVWTLEPMDGRSSQFYEILSLNKKNSYKDPQVIVDSFEGVTLNPVMRRKPGFESADIMDEDLSSHKFFDKIKKSLSFFNFKRKEASINIFSVASGHLYERFLYIMTKSVIEHTDKKVKFWFIENFLSPCFKSSIPAIAKKYNFEYEYITYNWPHWLRKQEEKQREIWGYKILFLDVLFPLELHKVIYVDAQIVRADLQELMDMDLHGAPYGYTPMCDSREEMEGFRFWKKGYWKKFLRGLKYHISALYVVDLDRFRKMGAGDLLRRQYQLLSADPNSLSNLDQDLPNHLQHLIPIYSLPQDWLWCETWCSDESLKTAKTIDLCQNPLTKEKKLDRARRQVSEWTSYDNEIASVLQTASSQSDKEFEEKDNNSSPDEL

SEQ ID NO: 3764 - protein, 1545 aa, Unknown
  Description of Unknown: Ramularia collo-cygni sequence
  MOD_RES (164)..(164): Any amino acid
  MOD_RES (401)..(401): Any amino acid
  MOD_RES (529)..(529): Any amino acid
  MOD_RES (648)..(648): Any amino acid
  MOD_RES (1419)..(1419): Any amino acid
MAFASGWKKVLVASGLLAAWANAAPSVNVALRTSFGAPPYLIELLETAADTNASSYFPLLDRIADGFFDSSTTDQDLYTSFRSLLQDDGHLSKEDLSLFDYALSIHSAAPRIEAHYQYYNTSIVPAIPQDAAEECDNWVHVPFSGERYCSAEMEEASAHSFGPXSPKVHSLPFDRILGDSLSERPSVLYAEIGSASFRKFHKTLSKTARDGKSSYRVRYKAATGAESKPFAVSGYGVELALKRTDYIVIDDRQDEEAQKDATVGTGEASLSEEEVSDLRPLSSSELRRLGLKAASFVMGSDSPFETLLRLSQDFPKHSSSIAAANVSDEFVAEHAKNRAEILPSGYNIMWINGVQIMARDVEAYALLEHLRRERKLINSVQEIGLNGEEAVELLSHEAITXSQVSQETQRYDWRDDTEGGNVIIWMNNIEKDKRYAAFPGSAQALLQRTYPGQLPSVRKEVHNLVMSIDFGDYNDAALVVDSIRGFVERKLPIRFGLVPRINSPVSEEHAKAILYLLDRYGLATALAYXERVVEASSRKLGTPDQKHFSAAIEGRELRRNKDALPLTGLLQDEQLDARIKRAQAYTSRLGDTGVTPLVFANGVPISRTEEWLSTMSQRVGTDLRIVQQAVYDGSVTDADYLPDLFLEXASLRRNPLVVPEDDKAVRHLNLGDYPELENLPNLPASTDTIERELVHITVAADLDSAKGFEQLMEALLFRQEHDNVEVAALHIPGNSSMTQRLGSIFATADGEKALTALAAGYDKLRGEGSDGSQDDAASKRNIYEKIRSTSASPSTSELDEAVIQAWAPFQDIVTSLGIQPGQKAMIINGRVIGPIPEWTTLEAVDLETLYNHERKKRLLPAALAIEDLKLQEKASTPLAFARISNLIALSLISDVPEGIFEAAPTVRTDVFKKWSSTHTAIQMGDPKTASIQIYTAIDPASETAQRWIPILKVLSELDGVYVSLFLNPRDRLEEIPIKRFYRHVISSKPVFESDGSLSHNGAHFSGLPADALLNMGMDLPPSWLVAPKETVHDLDNIKLSAVRSGSDIDATYELKHILIEGHSKDASTGPPPRGVQLVLGTDLDPHFADTIIMANLGYFQFKANPGVYNLGLQKGRSEEIFNIDSAGLLGATAQPGEHSTEIALMGFRGTTLFPQLSRKPGMEAEDVLEASKSTLESLAEGADKLLAQAGLRSQHASKYLSKAAQLGSGLFSGVGKSEVTAARHADINIFSVASGHLYERMLNIMMVSVMKHTEHTVKFWFIEQFLSPSFKDFLPVMAEEYGFQYEMVTYKWPHWLRGQKEKQREIWGYKILFLDVLFPLDLDKVIFVDADQIVRTDMYELVQHDLQGAPYGFTPMCDSRTEMEGFRFWKQGYWKNFLKGLPYHISALYVVDLKLFRQMAAGDRLRQNYHQLSADPNSXSNLDQDLPNHMQSMLPIHSLPQEWLWCETWCSDESLKEAKTIDLCNNPQTKEPKLDRARRQVPEWTAYDDEIAKVAKRYKDRQSGANEEVVEPGVPGTQAGEESIQERLQREDAERERKQHIKDEL

SEQ ID NO: 3765 - protein, 1406 aa, Nothoprocta perdicaria
MFQQIAADEPAPEGCSAFVVIHEKHTCKTNEIKKLLKKAIKRPRPYLFKGDHIFPTLKENGPVVLLYAEMGTKDFAKFHKILSEKAQKEEIVYVLRHYVQKPKSRKMYLSGYGVELAIKSTEYKAVDDTQVKGANDTSEVENEEEEEESDVQGFLFGRLRQMHPNLKNNLKEFRKHLIETTNNMEPLKVWELQDLSFQAAARIMSTPVYDALKVMKDIAQNFPIRARSLTRVPVSKELRNEIEKNQKHFYEILGIQPGEGRLFLNGLHIDMDFHDPFSILETLRLEGKAMHGLHELGIKEEILSKFMRLQVHSAGDSYALDIRHSSIVWINNIERDHSYSTWPASYQELLKPAFPGVIQQIRRNLYNLVLFIDPIQEDTNDYIKLTELFSHHNVPLRIGVVFILSTKEETDGNEDAGVALWRAFNYIAEETDTSQAFTSIINMYYEVEDGKVLSVNHVKNVLGREFPHADVQSILGVHSEYDEGRKAGATFYKKTGLGPLPQALFNGVPFTREEMDGAELETVILQRIIDATGFFQRAVFMGLLNDHVNAIDFLMEQHNVVSRVNPTILGAERKYIHFRSTSVPFDVQDFSTFSFLDSQDKSAVIADDMKYLTKKDEDVLYAVTIWIIADFDKPAGRKLLSNALKHLKTSRHTRLGILNNPSSKIQEDNTAIARGILTAFLTQNSSNLRGFLSKLTKEETAKSLAAGTKIIKFLMPGMDGDAFEKKYNTLGLDVIKTHQMFCQEVLKLLPGQMAVVSNGRILGPLDENEFYAEDFQLLEKITYTTSAEKIKTLVKEMGINAKSGSDLIMKIDALLSSLPKTEMRQDVKLLKEQHSAVKIDPEQNQPFYDVIAIVDPLTREAQKMAHLLIVLKDVINMRLRLFLNCRSKLSEVPLKSFYRFVLEPELTYGINNHLPSEPVAKFLELPESPLLTLNMITPESWLVEAVNSSCDLDNIHLQDIKGNVIAEYELENLLLEGHCFDVTTGQPPRGLQFTLGTKNNPVMVDTIVMANLGYFQLKANPGAWTLRLRKGRSEEVYQVFSHEGTDSVADLADVIVVLNSFRSKIIKVQVQKKSDKVNEELLTDDVTAEKGHFDSVTSFSGEIPTEEMEKRSDILNIFSVASGHLYERFLRIMMLSVLRHTKTPVKFWFLKNYLSPTFKEVIPHMAKKYGFKYELVQYKWPRWLYQQTEKQRIIWGYKILFLDVLFPLAVDKIIFVDADQIVRSDLKELRDLNLNGAPYGYTPFCDSRTEMDGYRFWKSGYWASHLGKRKYHISALYVVDLKKFRKIAAGDRLRGQYQALSQDPNSLSNLDQDLPNNMIHQVAIKSLPQEWLWCETWCDDESKKKAKTIDLCNNPQTKEPKLQAAARIVPEWVEYDAEIRKLIEKIALENKNQTSLFQKGFKHDEL

SEQ ID NO: 3766 - protein, 1562 aa, Danio rerio
MNHSMGHLYRPNMATHEADSEAGVGFCGKMWLFCAALLALGSVDSVNGDSKAVTTTLTTKWPSTPLLLEASEFLAEESQDKFWAFVEANQNIENDHDDTDQAYYDLILKRAGELLSPVQLNLLKFSLSLRAYSSTIHSFQQIASNEPPPSGCKAFFNVHGQKSCDSERLQGMLDNALERPKPNLFKGDHRYHSANPDAPVVILYAEMGTKEFSRLHQLMLSKANKGMITYVLRHFLASPSKSKVHLSGYGVELAIKNQEYKAKDDTQVQAGADANATVIGENDLVDEVQGFLFGKLKTIYPELKEQLKELRKHLIESTNEMAPLKVWQMQDLSFQTAARILAAPSVDALNVMKDLSQNFPTKARSITKTVVNSEIRKEIEENQKYFKGTLGLQPGDSALFINGLHIDLDVQDIFSVFDVLRNEARVMEGLRSLLIETPYIHDILKLNVQPSDSDYAVDIRNPAVHWINNLETDGRYASWPSNVQELLRPTFPGVIRQIRKNFHNLVMILDPTHENTAELLGVAEMFYSNNIPLRIGVVFVVNDSDDVDGMQDPGVALLRAFNYIADDVDGQMAFDAVISIMNRIPSGDKLKVEHVVGVLEKRYPYVEISSILGPDSAYENNRKEGKAYYEQTGVGPLPVVLYNGMPLQREQLDPDELETVVMHKILETTSFFQRTVYLGELNSDHDVVDYIMNQPNVVPRINSRILSTSRNYLDLSATNNHFIDEYARFLFLDAKDKNAAVANSMNYMTKKGMSTRDASDDGIIRPVTFWVVGDFDQPSGRQLLYDAIRHMKTSNNVRLGLINNPSENPSNENSLIARAIWAAMQTQTSNNAKNFITKMAKEETAQALYGGSDIAEFAVGGMDVPLFKSAYESPNVNFLLAHSAYCRDVLKLQKGQRAVISNGRIIGPLEEREVFNQDDFLLLESIILKTSGERIKGKIQQMGMVEDRASDLVMKVDALLSSQPKGEARIEHTFAEDRYSAVKIRPKEEEVYFDVVAVLDPVTRDAQKLAPLLLVLKQLVNVNLRVFMNCQSKLSDLPLKSFYRYVLEPEIVFLTDSSFAPGPMAKFLDMPQSPLFTLNLNTPESWMVESVHTRYDLDNIYLEEVDSVVAAEYELEYLLLEGHCFDVTTGQPPRGLQFTLGTASDPVIVDTIVMANLGYFQLKANPGAWMLRLRKGRSDDIYKIYSHDGTDSPAEADDLIVVLNNFKSKIIKVKVQKKPDMINEELLSDGTHENESGFWTSIARGFTGGSNPEEPKQEKDDVINIFSVASGHLYERFLRIMMLSVLKHTKTPVKFWFLKNYLSPTFKEFIPYMAEKYGFQYELVQYKWPRWLHQQTEKQRIIWGYKILFLDVLFPLAVDKFLFVDADQIVRTDLKELRDFDLEGAPYGYTPFCESRREMDGYRFWKSGYWASHLAGRKYHISALYVVDLKKFRKIAAGDRLRGQYQGLSQDPNSLSNLDQDLPNNMIHQVPIKSLPQEWLWCETWCDDASKKKAKTIDLCNNPQTKEPKLQAAVRIVGEWSDYDQEIKRIYNNFLDEKERGTLEGYQSTDRKHPGGVTHSEL

SEQ ID NO: 3767 - protein, 1588 aa, Toxocara canis
MILRLFSTVLLLAAILGSVNGQKKKKAVITSLHAQWPQTSLLAETSEFMTKEGSGMFWKYLDAIIEGVNADEWNSFSDAKQHDIAVRLASRLLGQSRTALLKFALSLRVHSPIVQLFQQLGAENAVNCDAYAVVHGEIVCDAEDLERAVGNASESGPPSTLYSVDHVYPKSRLHEITVVVYGELGSKSWLNLHLAAERIARNNKAKYVFRHWCREARDDKVLLSGYGVELAIKNTEYKAMDDSNIPGKTQSEEDSDADIRDYDDINGFNFNILRKLHGDSKESLDQFRLHLLERDELTPLKVWQVQDLSYQASQRIVSAPPEKALSLLTEMSQNFPLLARSISRQSIKKELRAEVQTNLEITLSELGIGEGESALLINGISVDVDQLDVFATLELLKQEQKLTEGFYRLGFKKEFITILLNIEPTDDRSSYALDFREAFPEYLNNLDTDKQYRQWGNSIKMMLQPYFPGMIRPIARNLFTLIFIVDPSQKETKNLLKFAHTFYKHDIPIRLGVVFVVNDDRSLSGFEDASIAMLNYYNFVKIDQDIPHAINTLIKVLEQAEGRDFLTPKDVINHFMEKYPDQDSNIVFSVDSDYDQGRSAGRNFLTTSGLGHTPKVLLNGVVLDDAGITPAHFEETVVNEVMKATPKLQRAIMSGKLKEKDNVMNWILSQPDVMPRINKRVLDAPSYFDAVYLDLTSRKPCTAKSPSQFNQLPDAEYNQCIMQRIRYVTRTEEERIRAVTLWIAADFESVEGRLLAYNAIRHLKHSHMIRVGFINNPRDVKKASHTSSISMLINAATRLLPPAQMRSFITKLVKEEIASQLIDQSLTLEDIAVNGMNVETFRKELKQLNADEIAADAKFAEKALGLQPGERAVVANGLVVGPLFDEETFEESDIQLLEKLMMSRNAKVIASFTDKWHIGKDYGQSSDMVARVAALVGAYPAKKKRFWVGLQSEEHSVVKLPAKQEDEAALNIVCIVDPLSTHAQRLGPLVNVIQQIANADMKIVMNPKAKLSELPLKRFYRLVLEPSVAFDDSGRISSVAYQARFTSLPEKQLLTLSLIPSDSWMVQAVKAVYDLDNIKMQNVEGNVIAEFELENILLEGHCFDENTGTPPRGLQFTLGTHTDLTMYDTIVMANLVEGNVIAEFELENILLEGHCFDENTGTPPRGLQFTLGTHTDLTMYDTIVMANLGYFQLKANPGAWILRLRTGKSTDIYDITSHTNTESEGVDEVHVLIDSFSGRTIRVRVSKKEGKQDENLLSEGRANEEEGLQQSLWSSISSTLSGSEKYDAINIFSLASGHLYERFIKIMMLSVMKHTKHPVKFWLLKNYLSPHFKETLPVMANYYGFQYELVEYKWPRWLHQQTEKQRVMWGYKILFLDVLFPLDVRKMIYVDADQVVRADLMELMELDLGGAPYGFTPFCDSRASMEGFRFWKKGYWANHLAGRKYHISALYVIDLVKFRQIAAGDRLRGQYQGLSADPNSLSNLDQDLPNNMIHQVRIKSLPQEWLWCETWCDDASKANAKTIDLCNNPLTKEPKLDSATRIIPEWNDYDSEIKKLLAGELQPLAERSESATSTAGDRIKEDDVHAEL

SEQ ID NO: 3768 - protein, 1831 aa, Vitrella brassicaformis
MISVMGGSRVLYLVAALLAALPLLVSSKENFNVEVELISPWPSVSPVAELFELMTDFDPHEALSFLYDLTEAAQAAPATSRIDIAFDTLQRFIKSPLTLTFLDMCASNHLHSPKVEMFRTLERDALAHFPGLMHRCNSSWAIVHPPACDGGVPSGMPISACDPVSLKEAVSRVDRTVSAHMDRADSPWCTIDYPYGFTVVKHHEHFMRRPAVNQTGRPVGMVVVYGDLEDPSVDGMVSAVRAMVDEWDRAEGSMGMGMEWGAVFRHGEMTSSARRPGRYDYLSGFGMELAVKSSEYKAVDEKDVDQKGGMKAEDDKGDRDDTDDDEAVEDALQREKESLTDNNGEGLEGLLFATLGSRYPSLTPHLAAYQESLDTELDSDELLKAWQLEKLGLQAVSKAMSSTNPLYTLIQIGQNFPAQALRLSKVSVLPTVEKALNRLHRRVYERSTFLSLNGRWARPSDLTTLQLLKDLGPVFLGLELLQRLGLPSTAAVKLLSSSARGMEASRVDWRPRKDEGGSVGGMAAIFDVTSDEATQDWYDLSALLYMWPRNLAPVRAPLYQVVMVMDPLDGPVLSLAGKMLMRRLPMKLWFAFVPSTEEQPDATWDEELLGAPPAWVVAARDAIPSVAPSSRSPAFISRVIAECYGQLLKKGKYKTQKNARKFVSSLVSLVTSQEKKQKKAAAKDTKDTPPLHSQQAPTTPPTLTESEIKKVFVSSGGDQPLWDTIWSGKVHQYSDGMAAYVAEKGLQSGTAMVNGRLVGRDRLLATDSDPFIRYMQYDQEEFQRALMTGWLDEDTDPAEAILTDGGFPSAYPGIVPLPEDAEENAPPEVAASTIGPATISYANVDAGLLRQLPWVEAEPESTKDPLLPVLHTLILPLPSSWWTLLDTFADHLLDLQKRTDTKDPHAVKSRLAIVVADSPDDLPAAATAAAATSVLRACLQVAMRTDDAATAMDEENEASVSAREKLKFLRYLGMTGRTAGAIKRRAGMGELSAGEVGDLCRMGMAKKINPAASKRLVGEFDKVVKGTKGGGGVVDGVEAEILRSVDFDDVTRRHPGEDVALVLTNGRKTVLHRPRDAVPPAVSSNTSSSLPAPSPPFLPCHVSLLEYLAHTREGPQSSRESITAILSNTTTDPYLIASASGIRAAYTAHNTDFWSVPEQVYEQTKGAIQLHLAPVDAEVPPPVRIVGVIDPLSSVAQGLLPIFEMLHICLNAEVQVVLNPATRYAEYPLKRYYRQVMAWPKRGFFNPTGVKERATDVPRAVFSGLTTQHTLTAAMHVLPSWLVRAYEAEKDLDNLRLVDLGAPNPSQGCRGTVRAVYMLNHLFLEGQIYEFNERGQPLGSPAGVYLALQKPPMARFPLPTTTTTDTDAHNASMSSQNRTATDEQQQQQEPPPLHDTQVMRNLGYFQLKANPGVFVVEIAYPDPATDDNPPPAPVEISSFFTQPHVIKLQKPSDADAAKGGDKKKSGTSGQEDKPGFWKSLTGLFKGENKTTDVSSSCPTVHIFSLASGHLYERLLRIMIKSVRQNTRCPLHFWFIDNFLSPKFRELISYMAARYSFDYQFVTYKWPSWLNPQTEKQRLIWAYKILFLDVLFPTWLNRVIYIDADQIVRADVRELWDMDLKGKVYGYTPFCSEGPGSNAATEGFRFWKQGYWKNHLGDLSYHISALYVVDLKEFRRQGAGDRLRSVYNQLSRDKNSLANLDQDLPNYAQHDIPIFSLPQEWLWCETWCANETMPMAKTIDLCNNPLTKEPKLHQAKRIVKEWTDYDEEIRAFELEVENMFSLDQSSVANDTISVTVNPAAESPTGSSSRQSRPSPPPSPPSSGQHEPPHDEL

SEQ ID NO: 3769 - protein, 1104 aa, Trichinella pseudospiralis
MEASEFMSKESNEKFWQFIEAVIDKHQTSQGNETDREIYSGILQIGEQILKSKARLEFLKLALTVRVHSATVEMHRQIAATSLDVQSDKSIYAVVHGKQISDLQQLDTILKHAEALARPVTYDFDHEYPGSKHGSVCVLLYADIENPHFKRWHLHLKKLVQRDGISYILRHYPKMNDDTVALSGYAVELAIKSTEYKAVDDSDKQTDSESGVSSSEEEVTDLNGFNLHLLEADELTPLKVWQLQHLSFQAGQRVMLAPKEEALRVLRDISQNFPIMARKDFTLLYAVKGNDPSAEYAVDYTQWSPQIFVLRLGDRASQNLLSTAYQMYEHVLPIRIGFIFVVNNDKSVSGYDDAGVAMLNAFNFIKEDRSVSKAVMFLIKIYNTSMRETISVEDVHKLFKSSYRDKNLKSIFNSEEYNEGRSISSEHIEEAILSKVMRFTADIQKDVYEGNLKENMDVQQHLLKKPTVLPKLNYNILQMENIFLDMTDTAMDMRIALIHNPKNEVQATKGIASLVQACIQFLPLYQSKAVIGKIFANKIATLEDLINLSLSGISWSEFTKAYNSMSDIWIQLHVHYAKFVLNLDPGVGGIVANGKLLLYSCVQIEASDPAAAQFDIVAIVDPLSAAAQKMSHLLVILSSVLNAHMKVCMNCKSKLSEIPLKNFFRMVLPRELEFAEDGSLKTQPSARFSALPQKQLFTLNILAPQSWMVESVEAVYDLDNIKMEEVKGDVMAKFQLEYILLEGRCFDERSGSPPRGLQFTLGTFQEPFMFDTIVMANLVAKKNDQLENELLAESEDAESESLWQSISKTFQSGEKYDMINIFSLASGHLYERFLRIMMLSVLKHTKTAVKFWLLKNYLSPGFKEFLPYMAGHYNFSYELVQYKWPRWLHQQTEKQRIMWGYKILFLDVLFPLDVKKIIFVDADQVVRTDMLNLMELDLEGAPYAYTPFCDSRKEMDGYRFWKQGYWENHLSGRKYHISALYVVDLKKFRQVAAGDRLRGQYHFLSRDPNSLSNLDQDLPNNMIHQVKIKSLPQEWLWCETWCDDKSKKFAKTIDLEPKLQSAMRIIEEWKDYDSEIKDLLDQRMKDKWSIAEQKIQVTEQKMLR

SEQ ID NO: 3770 - protein, 1466 aa, Aureobasidium pullulans
MSDRETAADENATAYFPLLDRIAEGHFDQASTDQELYNLFKKTLQDEGHLAKPEDISSFEYALSIHAAAPRIEAHYQFYNTTVEPTLKSQTDKGCETWLHFNGQQYCDSDLASSSGDPVNQERALDLPFDRIMGDKQSKTPSVLYADVMSPSFRQFHKTVSLTARSGKTSYRVRYRPSVGRPGSPLAVSGYGIELALKRTDYIVIDDRQAEDSDSTNNDASTAKLTDEDVADLKPLSSKELIRLDMKASSFVMDSADPFETLLRLTQDFPKHSAAMSAHDISEEFRKEHLANREVFLPSGYNVMWVNGLQVLARDFDAYAMLEHLRRERKLINSARELGLSGKEAIQLLSHPSISEASSGQEPQRYDWRDELEGGKVIIWMNDIEHDKRYAEFPTQVRALPPVRKEIHNLVLPVDFANYKDVETIVENLQSFVKRKVPIRFGLVPKTSSTASAEQAKAVYYLLDTYGLGVALEYLQKGRKLAGPVQSIFEGATKGRKLRKDRISSPLQEVLKSDDFSARVASAQKYLVRLGASGATPPFFVNGIPLPMSDEWLQQMSQRVTTDLRSVQKAVYEDELNDDSYIPELFLARASARRNPWVIPEDENSIRQVNLASVSDLAEGAIGSIPSLPASKDTVSNDLVHLVVIADFDTQAAQRMLSGLIKLRKEEYDQVEILLVHSAAKPLSTSSFAVELFKNMIAGPIVSLDALQALLSQDKVSASEADVIAAQAFWSSADRFLNDVGFNKGDQGILLAGRVVGPLPSFEEFDSDDFETLFSYERMKRLMPAAAAIKGINVADKANTALSFSKLSNLIALSSKSDVPEGMFDSSPPARSDVFSGWTGSHTLIERSDAEYATIQIVASVDPASETAQRWVPILKVLSELSGVHLRLYLNPKERLDELPVKRFYRHVLESKPRFDEKGSLQGTLARFEGLPADALLTMAMDMPPAWLVAPKDSVYDLDNIKLSSTQGRDIEATYELESILIEGHSRDVTIGTAPRGAQLVLGTNKDQHFADTIIMANLGYFQFKANPGFYNLTLQKGRSEEIFHIDSAGNLGYSPQAGDKLTEIALTSFRGATIFPRLSRKPGKEDEDVLESAKTTADHIADKADSILAKVGLGSVKSSDVLSKAQKFGAGFLTGSAGSSTDLSTLPHADINIFSVASGHLYERMLNIMMLSVTKHTSHTVKFWFIEQFLSPSFKAFLPIMAEEYGFRYEMVTYKWPHWLRGQTEKQREIWGYKILFLDVLFPLDLDKVIFVDADQIVRTDMYDLVQYDLQGAPYGFTPMCDSRTEMEGFRFWKQGYWKNFLRGLPYHISALYVVDLVRFRQMAAGDRLRQQYHQLSADPNSLSNLDQDLPNHMQHVLPIHSLPQEWLWCETWCSDETLGVARTIDLCNNPQTKEPKLERARRQVPEWTIYDDEIAALAQRKVGEGKSPIAGHAGGAGIQAEMQEADARAQREENEKKKKSHDEL

SEQ ID NO: 3771 - protein, 1414 aa, Yamadazyma tenuis
MQRIILLLVWVHIALCVSNHGDNSLKVMLQTPEWSPMPFHLHLLESIAAIDESLYGSAAYSLVNDDYDEEFLLSAANDELVYQLVHDSAGLDPINKSLADLKTASKYYAPRIQTHFSSYLNDIQPKYRGKCDYDMFGTKLERKPTKQYSWLLSGDRIYCTPDDLFALEFSKRSDMSSQLLPFDRVIGQNSKAPLLILYGDLNHEGFNSMFNNLYQSAEAGKLRFVWRYVPSMGAPDLLPNYASTLDLKNSSTPSSIGDFGLKLASKVLSNNVSPREKYRMLNSILEDFPSHLVDIDSEVVDSDVADSAAANEKMGTSKESVGIYLNGAPVNGLELDAFKLFNRIEEEVNIIQEIIALGFNLDQARTLLVKFALHAAVKLSEFNSGSDENRYKVHENSFVAGAQTKRGGVVFINDIETDENYQEYTTVREKAYIDMIPQLAPGQFPPLKENIHDLIFVINLSNQEQLKVFFTFSKLILDRGIPQQIGVLPFGDSELDIKIAKYFYFLYDTTTSKEALAFLYKIFMRETDNEITELLEHISIQGYEFSPSVYLSTLEKFSITEPSIVFNGIITDLKSDWRRQMGSQIRKDVSALHNGLRANKIGFSMKKFLHQSAKSERNLNIIPKDSSGFKYKKVSVSLIEKSSRFRLRPSLVVKDDIEVWLVGDLSQSAAFNQLIQLFKLMSISSFDIQLRVIDLSKSQLLSKIKQGDLNEKDLDNLLVTLEKESTTLKRADPDSDMKQFVSEQGLPPHHSYILVNSRYFRIDNTFSLKQVESIISFEKSFRLSIFDSFLGKYPEIFESSKVDDFYDEKLGIMFHDWKDLLVTRIMKSFFVDDDKYVDDVARYDFSSMNMYNSFVIDNELEPLVDVLVVVDPLVPYSQQIVGIVKGCINLPFIRTRILLQPQSQYLHLPIKRYFKGVYPSYPIKFDSSGFVDENLSAQFSGLSDDVFSVDLLSPKRWVAMSKFAPKNLDLDYFKFSSLSSKDQEVVFELSKLLIEGFATDVTNASPPGGLTLKVSQGDKEADTIIMSNLGYFQLPIGEGTWNLTTGASPYFNYGLLSASSDPFDSSTVIHKQVPLNVFNLDGLVLRPRLVKQASSLSKAKPIQQDGINIFTVSSGHLYERLSSIMMASVRSNTQHPVTFWLLENYLSPNFKALLPKLAEEYKFEYHLITYKWPMWLRSQFSRQRTIWGYKILFLDVLFPIELDHVIFVDADQINRSDMIDLVKLDMGDAPYGFVPMCESKEEMDGFRFWKTGYWKDVLKDDLKYHISALYKVNLKRFREIGAGDRLRSHYQKLSSDPNSLSNLDQDLPNNMQRTIPIYSLPQEYLWCETWCSDSTLQEAKNIDLCNNPLTKENKLDVAKRLIPEWSAYDKDISALIDTIEVQESRKEYEINTPVFIEDKDEDGEEDDEYEHDEL

SEQ ID NO: 3772 - protein, 1636 aa, Schizopora paradoxa
MRLWAIHLLSAAAAVCHASPPVKVSLRASWPSVPLLLEAIETINVEEPESFFPLLDALSNSESLPLEKLTPEAVHQLTIQTALSLGYLQEPGALASVELQLSLHAAAPKIQAFYQFYEDQHLDNTEEGCESWVDWYGERICDIEKLAAVSGRETIGEVSLNNTQILASKPKHTPFDHVSPSPSKVLESPPHTAIFYASPTSKNFQDIHSYLYKASTASPPRLEYIFRHIPPQTGPTDRSKSYLSGYGVTLDLKKTDYLAVDDRQTNGQGIRGAHDPYCYVLIRCPGKLSEKVETDESEAEEDFIFSLLTSQPENTTTELNSPLSTDELLLIDYQATQLITNSSNPLLAFTQLSQNFPRYSTSVARRVQLNDSVLEEIQRNNLKVQAGASQVWLNGLALQDADINPYGLLRLLRKERTTVLSLTSLGLTPSQALELLTHRAIGMSQSDSGVLDGLCDASDRPEGGSVIVWWNDITKDSRYVRWNPSLSGLLRPIYPGQFHNVKQNLFNVVIVADLSQTTALHFITNTMNMIIQRGFPFRFGVVPISETEAGRKMARAFYHSIDTYGRARTMSLLSRVSQLVMPSEYYVDISVVESELQALQNRDSPEEGESQVDAQILLDLNEELAVDERVSKAKEYATRMDSTLASSLTGHVFVNGKHFNLDDDFLKHMQTEIGHQLQHLQEKVFANEISDDSGEDVSTYFYDLPGTEKRRSQYVYPAPGTGSLRIFNLPEVFSKAGLTIESSAYLYPESGQLPLSTYVIADFDSDEGIELMKEALKSLPDSSSRLAFIHNPSSRVNASGTHHRHFSPFLVPLATEGLLWKLSGSEIMEFLEGHVVPEDSSNQVVMEADSPITRLIRSAGLNPNTVAESEIYKQSCHASALLVRDLGVLPGQRMVIVNGRMVGPIVGNTFLADDFKALQNFELRRRVAPVLDALANITVSAETFDRITYSNIVSSASSVISAVRLPDPSEQGLLNTAQRPRNRNYRLLESNYTFFDFGDKDSALYNLGFLIDPLSDGAPKTAAIMKWLATLPSVYVEVYLNPIARQEVPLKRFYRYNLSPTLSFDDSGSEIPAQIVFDDLPEEPIYTLGMDVYPSWLVRPREALYDLDNIQLSTLSDEDRSTGLEAIFELDYIVIEGHARETLTNAPPRGLQLQLNTIDNKVVDDTLVAANLGYFQFKAKPGVFNLEIREGRGRDVFEMESVGNEGWDSPDIEVVGQDITLTSFEGVTLYPRFKRQPGMQRSDVLDEFVLGETEKKGFFSDLTSRFSSFFRPNKSESTELVKKQADINIFTVASGLLYERFASIMILSVLRNTESTVKFWFIENFLSPSFLEFLPHFAEAYDFEYELITYKWPSWLRAQTEKQRIIWAYKILFLDVLFPMDLKKVIFVDADQIVRADLQELVDLDLQGAPYGYTPMGDDNVEMEGFRFWKTGYWKDFLRDRPYHISALYVVDLVRFRQMAAGDILRAQYQTLSQDPNSLANLDQDLPNNIQREVPIFSLHEDWLWCETWCSKDRLHRAKTIDLCQNPLTKEPKLSRARQIPEWETYDAEIARFARKLADEGKLRSHVATADANVLANANNANPSVDADADSSAADEGASRSADGEEKESGETHGEEDIAEARVSEVASNRHEHVEL

SEQ ID NO: 3773 - protein, 1348 aa, Camelus ferus
MIEYLLCLQNPRKEPVYLSGYGVELAIKSTEYKAKDDTQVKGTEVNTTVIGENDPIDEVQGFLFGKLRDLHPDLKGQLKELRKHLVESTNEMAPLKVWQLQDLSFQTAARILAAPVELALVIMKDLSQNFPTKARYVNNSPSFLGEEEELNGGDINQQKLQYGPKVMFLMGQAGLRAVRAAQSTCAPPPSQGAGVGGPHRGLQPGESALFINGLHIDLETQDIFRAIVFLSTMGTEKSRVFGFWDNVTLFDTLRNEARVMEGLHRLGIEGLSLHNVLKLNIQPSEADYAVDIRSPAISWINNLEVDSRYNSWPSSLQELLRPTFPGVIRQIRKNLHNMLLKRQEQVFLVDPAHESTAELMNTAEMFLSNHIPLRLGLIFVVNDSEDVDGMQDAGVAVLRAYNYVAQEVDDYHAFQTLTHIYNKVRTGEKVKVEHVVSVLEKKYPYVEVNSILGVDSAYDQNRKEARAYYEQTGVGPLPVVLFNGMPFEKEQLDPDELETITMHKILETTTFFQRAVYLGELAHDRDVVEYIMNQPNVVPRINSRILTAEREYLDLTAANDSFIRPTSNYAKNFITKMAKEETAEALAAGVDIREFSVGGMDFSLFKEVFESSKMDFILSHAMYCRDVLKLKKGQRAVISNGRVIGPLADSELFNQDDFHLLENIILKTSGQKIKSHVQQLRVEEDVVFVMPGRLHLAVAPGTAMHNPDLQPAGRFSSRKLSCGLFGHGVHPSPRNQMPIDVFCDSVDTSQETHGLFYMYFRVRSEKCQERASDLVMKVDALLSAQPKGDARIEYQFFEDRHSTIKLKPKEGETYFDVVAIVDPVTREAQRLAPLLLVLTQLINMNLRVFMNCQSKLSDMPLKSFYRYVLEPEISFTSDNSFAKGPIAKFLDMPQSPLFTLNLNTPESWMVESVRTPYDLDNIYLEEVDSVVAAEYELEYLLLEGHCYDITTGQPPRGLQFTLGTSAQPVIVDTIVMANLGYFQLKANPGAWILRLRKGRSEDIYRIYSHDGTDSPPDADEVVVVLNNFKSKIIKVKVQKKADMVNEDLLSDGTNENESGFWDSFKWGFTGGQKAEEVKQDKDDIINIFSVASGHLYERFLRLVMLTEKQRIIWGYKILFLDVLFPLVVDKFLFVDADQIVRTDLKELRDFNLDGAPYGYTPFCDSRREMDGYRFWKSGYWASHLAGRKYHISALYVVDLKKFRKIAAGDRLRGQYQGLSQDPNSLSNLDQCNNPMTKEPKLEAAVRIVPEWQDYDQEIKQLQTRFQEEKESGTLFRDKTTKEPSREAKSTPGLHAAFLTSVHGRSSGALPKGCTARVCATRGIRFPIKLKPHNNRVSSGSARGKLIWG

SEQ ID NO: 3774 - protein, 1620 aa, Suillus luteus
MHLGALVVLGCALLALSTSPPVSVSLRSSFSAADPLLEALETLALASPEHLFSLLNHFPLPLKPATPEESHRSVLDLAKKYLPLPEIAAMNVGLALHAASPKLAAQHIRESGREGCEDWVDWYGRIACNAEELRLFVETSVAGSDFESQPKLKRLPTDHTPHLQPSLDAPRLTAIHYADPMAPEFNLLHSTLLSLSPDVEYVLRWARPVIATDGPYLSGFGVALDLKKMDYLAVDDRKRAASTSGDHLAGNESQEDNEHDVLSCIFEAMSYIDTEMEKNATTNNPLSTEEIQDLGLKATSLFSLLSNPASSPPVISSCLLKNSLTPLHILNTLSTNFPRYAAPLARKVRVPDAVRDEVQENWVKAMMGINMVWVNGRVLEGEAGIFGLLRNFARERALIRSLVELGLSRSQAIEFAVHPVHSGPFDPSPSKLKVKKGTMFGSAKRFAEEVLRTDTEHNVEAEALIEGQKKYDISPKWNDLLDGLVDSSDRLEGGSVILWRNDIEEDTKYADWGTDLTQLLRMHPSQLFNPYLRLRINVINVVLALDFSQPRFFSLIANQVDNIVARGFPVRWGFVPVAVDHGDGLKMARIIYYVAQKFSRLEVASFFRSLSAAHTQQQLPTLSWSIVHATFNTLGTADNFGDIASGKVPSVEEALDSARRWTRRLGVSGRDGEGFVNGRWYEVGDNFLRDLQTEAVGQMQLLQELVYLEELTSASVSLVSTFFYDLPTTLSSRNPYIFSKAPASVHAPSSSIGNLKMFDLGDLSNRTGWSPFTCAWVTSDAERTPVSMVVIANLDSAEGQALVREAVTFVSVKSQSRITFLHNPTAGSPRGNVSSFFAHIGSTSNLGEISSNMFKRALDNFETQDAAQVFIAEGITLQSDPQAHTAFLTTSRLLVREAGLRPGEQAIIVNGRLIGPFSPTSEFVSEDFATLETYEMKKRVGRVAQAIEDVLADGTELDALAYANLVSVASSIIYADQQPDPSEAGLFDSAPRARNSNYRLLSGSYTKFEFGDRENALTHLVLLLDPLSEGAQKWIAILEKHEELFPEVYFELYLNPAQHSEIPLKRFYRYSVEPRVRYDNKGNEIPAQVIFNGLPVDPIYTLGMEVPPSWLVRPREALYDLDNIQPSTLPPDGLHALFSLDYLVVEGHARETKSNSPPRGVQLQLTTSSSAANNTPSVVDDTQVVANLGYLQFKARPGTFNLTIREGGGREVYHIASVGSEGWNSPSVEDSGEELTVMSFEGLTLYPRLSRKPGMEKADVLAGLQQRSGHSQTVIHDILSKVSSLFTSKSESTTAVAETGARQADINIFTVASGLLYERFASIMILSVLRNTNSTVKFWFIENFLSPSFLEFIPHMAEEYGFQYELVTYKWPSWLRAQKEKQRVIWAYKILFLDVLFPMDLNKVIFVDADQIVRVDLQELVDLDLHGAPYGYTPMGDDNYEMEGFRFWKTGYWKDFLGDLPYHISALYVVDLVRFRQMAAGDILRGQYQMLSADPNSLANLDQDLPNNIQRDVPIFSLPEDWLWCETWCGADRLHRAKTIDLCQNPLTKEPKLSRARRIPEWEEYDNEIAQFAGRLAAEGKIQSSIATARSDVLANVGLVQPAHNNDVGGKDLQHPHDEL

SEQ ID NO: 3775 - protein, 1410 aa, Pichia kudriavzevii
MILGDFATFSLALLSIIGACVAETEIPPENAVDISLAASWNRTPYKLNVLEAAASVNESLYEPLVLKLLNIEPDYDNGEFNADEDYIEVSDSDFLNHAMSLLHGDYEKYMFNLQLSNHLSTARINAHFQYYNTSVKDTHECDVDAVLFEPLGPSPQHYCDPDAAFMLQNANYAFIFDTFKLPFDRRLGSTFTPSSYIIYGDYRDETFRKMFLNMYQFAGTGKLNLVWRYVNTHPDNRPELLAGYGAALNLKKTDYIAIDDSGFTQEQESKLLELGSNNKDETVNITDIYRHNFEKVQKVDLEDLSTIGLKFTKLISESKSQFKDLMTILAEFPKYARTISKIGYSEDELKAVAGVADEDYGKFVENGIYINDALVPVEKTDLFEIFRAIKREVSFIKLLQAIDIHYDDARTLMSRFAQMISPYFASTKRRFNFSRYDDLVVYLNNIEEDYKYSLFDSTIDAYIKKPDVNELPRAKENIHQMIFIIDLTDLEKLENLISFLRTMFIEAFPIQFGVVPLSTSNELNEKITSQLYSAYAEDGREGAFKYLITLRSSLAGENHHPPDNFSQLEEPLLKERLEKLGLFYKNFGIDHEMPTIFSNGVVFGFHKVVDALNNVFDDMLYLYDMKSQIGEGETYSEFLRKDSVHSKDTNIVPERISQIKGNFIKPPSIIASKHWFSTDRLIIEKPIIPGQAPITINLLGSFFNTEYIRQVEEVLRYSQTNEGIKIVISDVTPTKDFKKLLQLQTVEEKISFLSTLVESDTEDNYKIRDYVRFCKEMFGLNFEKEYLNAYIVVAGRKVQIKNFMDVHSIESLVHYECASRLNVLKELENEFDYNVPFKNEYDRFQHFAWVVSYTYFFPAPEPYSASNIPRFHRYKFSEENTIIKQAKDELIEVDILIDPVSEYAQELVSFIPLFEKESFITLKVHLRPKRSVDILPINRFYKELVNTDVNQVSEKIRFEKVPEKTLFNVELHETQRWLVSINNASTDLDNLMLDLTDSKSAFGEFLLENILVEGYTSNDATGLPLEISGPSKYETTVLANTYFQLKANPGTWTIKIKDYTKGSLVYMMPEEVKTISVIELDGTIIDLDVQKRWLMESISLRKMYAYFFETMDFIYSFIKPTQADINIFSIASGHLYERFLGVMVSSVMKNTNSSVKFWFIENYMSPDFKKKLPLLSEKYGFDYELIMYKWPVWLDSQRERQRTIWGYKILFLDLLFPQDLKKVIYVDADQIVRADLKELVDIDLEGAPYGYVPMCDSKKEMESFRFWKTGYWKEFLGLKYKYHISALYVVDLEKLREVAGGDILRQQYQYLSKDPESLSNLDQDLPNLLQPHLKIYSLSQEWLWCETWCSNDTLKDAKTIDLCNNPQTKEPKLNRAKRQIQEWVELDQENMILFSGSTEVLKEDLGHDEL

SEQ ID NO: 3776 - protein, 1631 aa, Ananas comosus
MERLRLRSSSSKAVVVSLLLLFLLFGFAGNLAGAETPRPKNVQASLRAKWAGTPLLLEANELLSKEWKNLFWEFIDLWIEPDKGSECLTAKCCLQKIVEDAQSLLSESLGSVFEFSLTLRSASPRLELYRKLAQDSLYSSDYGKSEQVNNDANEEHFQKNTNPISGGTCCWVDTGNVLLTNVSGLLQWLEDSSKLAVDSSEQPELFEFDHVYPHSSITGPVAILYGAVGTECFKEFHVILVEASKKGKVKYVLRPVLPSGCQAKSSYCSAVGSVDAVTLAGYGVELALKNMEYKAMDDTAVNKGVTSEDSRTEDLSQEVRGFIISKILERKPELTTEVMAFRDYLLSSTISDTLEVWELKDLGHQTAQRIVHASDPLLSMQEINQNFPSVVSSLSRMKLDASIKDEILANQRMVPPGKSLMALNGALISIEDIDLYLLMDLVHEELSLADQFSKVQIPQSTIQKLLSAAPPVDSNAFRVDFRSSHVHYLNNLEEDNMYKRWRSNINEILMPVFPGQLHYIRKNLFHAVYVLDPATPCGVETIDMLLSLYQSSVPMRFGVILYSSKLVNIIEENGGNLPSLSDGTKNREDISSLIIRLFLYIKETYTTHLAFEFLSNIQKQWSDVDNFNEEMLEAHHVEGAFVDTLLSKAKSPPQDVLLKIEKETKYKEAAEESSLVVFKQGLFKLRCCLLMNGLVYEPTEDSTMHAMNEELPRIQEQVYYGHINSHTDVLDKFLSESGYGRYNPSIIGDDKGKKKFVSLFASFLQSDSVLHDIAYLHSHGSVDDLKPVTHLLAVNVASRSGLKVLHEGIRYLMGGSERARIGLLLYVAGDASRSAFLLDKIFGKTASSFSNKEKVFDFLHELCTFYENLYMSGSLVDSDGVSIISEKVYELAGENGLPVEEYEAIFTSFSFDKDQEKRDKVSNFLFGQLGLEFGSNAVITNGRIFTLNDGNSFLSDDLGLLDSVEYNLRIKYIVDIIEEVEWVDVDPDYLTSKFYSDLVMVVSSSLSIRERSSERARFEILNGEHSAVILNGVNSSIHIDAVIDPLSPAGQKLSPLLLVLWRRIHPSMRIVLNPISSLADLPLKNYYRFVLPSMDDYSTTDYSVHGPKAFFPNMPLSKTLTMNIDVPEPWLVEPVVAIHDLDNILLENLHDVRTLQAVFELEALLLTGHCSEKDRDPPRGLQLILGTKQRPHLVDTLVMANLGYWQMKVSPGVWYLQLAPGRSSELYMLKETGNGNKSYPSSKLITINDFRGKLIHLEVQKRRGKEHEDLLNASGDDQLQEKKKESNNRWNTNILKWASGLIGGNGSSRKQNETILDLKGGRHGETINIFSVASGHLYERFLKIMILSVLKNTLRPVKFWFIKNYLSPPFKDVIPYMAQEYGFEYELITYKWPTWLHKQKEKQRIIWAYKILFLDVIFPLSLKKVIFVDADQVVRADMGELYDMDLKGRPLAYTPFCDNNKEMDGYRFWRQGFWKDHLRGKPYHISALYVVDLVKFRQMAAGDTLRVYYETLSKDPNSLSNLDQDLPNYAQHTVPIFSLPQEWLWCESWCGNATKSRAKTIDLCNNPMTKEPKLQGARRIISEWVDLDAEGRRVTEKILGEQLEPPESVPPPPPDSSKGDNNEDTESKSEL

SEQ ID NO: 3777 - protein, 1662 aa, Papaver somniferum
MGLRSRSVRYITVWVLIVTIVISLSGSPVASENRRPKNVEVALRAKWSGTPLLLEAGELLSKEWKDLFWEFIEVWLRSENDSETSSAKHCAKKIAKLGRSLLSEPLSSIFEFSLTLRSSSPRLVLYRQLAEESISSFPQADESNSRHVAADTLEEGVESFGSKGADNMLIGMNPEGPNGKCCWVDTGAVLYSDVSELQLWLDSHTGSSGDSFEPPEIYDFDHVHFDSITESPVAILYGALGTNCFKAFHVVLAEASRKGRVKYVVRPVLPSGCEATTGSCGAVGTGDALNLGGYGVELALKNMEYKAMDDSAIKKGVTLEDPQTEDLTQDVRGFIFSKILERKPEMTAEIMAFRDYLLSSTVSETLDVWELKDLGHQTAQRIVHASDPLQSMQEINQNFPTVVSSLSRMKINESIKEEILANQRMIPPGKSLMAVNGALINIEDIDLYLLLDMVHQEISLADQFSKLKIPRQTIKKLLSTLPPSEASSFRVDFRSTHVRYLNNLEEDDLYKRWRSNLNDVGPYFCYMWIQSSFISILAIMLLSVGLRQASFSDYFQFVIIVFLLRLLRFVVFFFHFGIFQSVDTILSMYENNFPIRFGVILYSAKLIKKIEEHAGELPLSSAGKDDSMEDISSLITRLFLYIEENHGPRLAFQFLSNVNKLRSEEDLTEETLEVHHVEGAFIETILPKVKSPPQDVLLKLQKELTFKERAEESSLLVFNLGLFKLKCCLLMNGLVSESTEDAVVNAMNDELPRIQEQVYYGHINSHTDVLDHFLAENGYRRYNPQIIGEGKNKKKFKSLAASILGSDSVLNDISYLHSPGTVDDVKPVTHLLVVNLTSKKGINLLREGIHYLMGGSKRARLGALFTTADVAGSPTPLFVNVFRFTVAKFSYKKNVLEFLDQLCVLFERDNLFTVEKVIELAKANNLPVEEFEASLSDVSKELVRSHLDKVSQFLYREMGLDFGATGVITNGRIMLPARGSTFSRYDLDLLESVEFGQRIKHIMEAVEETKLDDMDPDILTSKFLSDLIMFVSSSMAMRERSSESARFEVLNAKYSAVVFNNDDASIHIDAVIDPLSPLGQKLAPLLRLLSKFVQPSMRIVLNPMSSLVDIPLKNYYRFVLPTMDDFSSSDFAINGPKAFFANMPLSKTLTMNLDVPEPWLVQPVIAVYDLDNIVLENLGDTRTLQAVYELESLVLTGHCSEKDHEAPRGLQLILGTKSRAHLVDTLVMANLGYFQMKASPGVWYLQLAPGRSSDLYVLEEHEDGDEVLPFRKQITIDDLRGKLVHLEVVKKKGREHDQLLSSSDDANTLDERKGNSKSWNTNLLKWASGLIGGSEHEKRKGGSVERKDGRHGKTINIFSVASGHLYERFLKIMILSVLKNTHRPVKFWFIKNYLSPQFKNIIPHMAREYGFEYELITYKWPTWLHKQKEKQRIIWAYKILFLDVIFPLSLEKVIFVDADQIVRADMGELYDMDMKGKPYGYTPFCDNNKDMDGFRFWRQGFWKEHLRGRPYHISALYVVDLLKFRQTAAGDNLRVFYETLSKDPNSLSNLDQDLPNYAQHTVPIFSLPQEWLWCESWCGNSTKARAKTIDLCNNPMTKEPKLQGAKRIVTEWPDLDLEARRFTARITGEEIDDAKETITTSTQAKSEASSIVEEDKESKSEL

SEQ ID NO: 3778 - protein, 1493 aa, Unknown
  Description of Unknown: AAM60110.1 Sequence 16 from patent US 6399321 sequence
MNLTGLLIFFCHIAVLAALEKKGVHTSLKANWDSTSLLAEASEFIAEENEKLFVKFIDIVNKDVGTLNWEKLTDEQKYEYTIKTAGKVLSTSSVDLLKFALALRQYSPRVQSFQQIAVEYGEKCDVFVVVGEQVSCEYTKLEKMIKDAKTNSQVLESDHIFGEKDLKQAAILYGELGTTSFAKAWEKLSKLQKTKLIFRHFSKKTDSHPVSLSGYGVELAIKNTEYKAVDESSEKKNVEEDEADLFGFNIKLLKELHPDSVDAIESFRVNLKESDELTPLKRWELQDLSYQAAQKIVNAGPADAIGTLEEYSQNFPTHARALAKTSVSDLLRKEVLQNRKMLEKASIEVGETSLYINGINQDINSLDLFKLADLLKQENKLADGFHSMGINREYLSILVGMDTSDDEKTTYAVDHREGYPFFINNLDTDKKYKQWGNSVKLMLQPYYPGMIRPIARNLFSLVFVVDPSTSEGRKFLRIGQTFNSHDIAMRIGYIFAVNQDTKASGETDLGVALLNLFNFVSIDSSNADALKVLNNFLDDYRSKDPTIEDIKEFFEAKFSDASFSDVFGVNSDYDKGRKHGFEFVQKTGLNSAPKVLLNGFILDDEGVRGDNIEETIMMEVMKISPKIQRAIMEGKLTDRMNVGNWVLEQKDVMPRINKRILSAPSKKTYVEILGSMDCKSLKDVENLSDSDKAGCLLQTTKYLQKASADSILPVTLWVVADAEAASGRRFIYNSLQILKNSANSRVGIIFNPESVEKACESNSISSYIRAALDFLPMDQAKRLILKLSNEEYAADFISGKITFDDLSVGGMDTAKFLADKKKLDCERTRLESQIVKKVLDISSGGRVVVGNALQVGPLESSEHFEAADFKLLESMLLSRGAEVISSHLKKWEFDVSNGVGSNTVFSIAGHVGKHASSQKRTWVSIQGDEHSVVTLPADEMDRPAVDVLAVVDPLTMEAQKLGSILHLIKKVTNCEIKIVMNPKDKHSELPLKRFYRYAAASELSFDHNGNLNTNVVRFDNLPSKQLLTLSLQAPDSWIVEAVSAKYDLDNIKMEQANGDVTAEFALQHLLLDGQCFDEVSGQPPRGLQFTLGTDKNPKQFDTIVMANLGYFQLKANPGAWKLEIRDGKSSEIYKIGSHVGAEKIGEDVLQVVIDSFTGKSVRVRVEKREGMEERNLLSDDEEGVWSSLSNLVSSKEKTQEVINVFSLASGHLYERFMRIMIVSVMKNTKHPVKFWLLKNYLSPQFKETLPTLAKHYGFEYELIEYKWPRWLHQQKEKQRIMWGFKILFLDVLFPLDVQKVIFVDADQVVRADLMELMKFDLGNAPYGYVPFCESRKEMDGFRFWKQGYWANHLAGRRYHISALYVIDLQKFRQIAAGDRLRGQYQGLSGDPNSLANLDQDLPNNMIHQVKIKSLPQEWLWCETWCDDGSKKNAKTIDLCNNPLTKEPKLDSAARIIGEWKTYDDEIREVISGHSSDNPSDNVISENDDSHTEL

SEQ ID NO: 3779 - protein, 713 aa, Danaus plexippus
PELVPALNKYEWVLKASRVLCARSLKLRGSERAVIHNARVIGPFNKGESFSLEDFALLERYSNQVYGDKLSELLHQNKKLSNNVLDDDDDITDISTDNYLKVISVLASRSPRVRTPLPSGLRTDHSVIELPPLYEDEAAVEIVAVVDPASAAAQRLAPLLLVLRRVVNCRLQLFLNPQDKNSDMPLKSFYRYVLEPELQFNSAGAQTGGAIARFSRLPHAPLLSLELRTPPNWLVECVKSVYDLDNIRLADVESLVHSEFELEYLLVEGHAWDTSLGTPPRGLQLVLGTRHRPDTVDTIVMANLGYFQLKANPGAWTLRLRPGRSDDIYEIVGHENTDTPAGSKDIQVLMSSFRSQVIKLRVTKKADKQHLDLLAENDEKNAGGIWNSIASSFGGGEEQEAQDETINVFSVASGHLYERFLRIMMLSVLKNTKSPVKFWFLKNYLSPSLKDILPYMAQEYGFQYELVQYQWPRWLQRQRDRQRTIWGYKILFLDVLFPLDVKKIIFVDADQIVRADLKELVDLDLGGAPYGYTPFCDSRKEMEGFRFWKQGYWRNHLQGRSYHISALYVVDLKRFRRIAAGDRLRGQYQALSQDPNSLSNLDQDLPNNMIHQVAIKSLPQEWLWCETWCDNESKKYAKTIDLCNNPMTKEAKLSAAMRIVPEWSDYDNELRALHARVRQGHYQDDTEQEIETHEHEQVSKEDKTDKAQEHTEL

SEQ ID NO: 3780 - protein, 1408 aa, Chlorella variabilis
MAPSLGWRHRAPAATAAVALLLLAALAGVPAARAARRETKGVKITVQAKWQATPLLHEAAEFLADEVPALFWRFVEEWQRGSEALGGAPSPQQCWAGIRQAAAAHLSPNMARLFSAALAARQYSPRLEMFRQLAWESVAAAPACCWALLGGAAYTEAAPLEAALAAALQAKAAALREGAGRGVEGGAGAVYPFDHIYAAAASSAPPLNITAPATVPVELFAPIGSRCGAQLHAVLAAAAERADAAAAAAAAPAAAPRLAYAWRPLLDAAACSAAGEGVVHPCTALGTEGRLVVPGYGVELALKNMEYNAQDDSKKVNNLEQDRQYQRWPRELQTLLMPMYPGRLPTVARNVLNAVYAFDPASPAALDIGALLHQLQQQAWPLRTGLLPVVAARVARARGGAGPRPDDAPSLSERMGRLLGAVHAAFGGRAAVHFLYAVRQAMPAQADGQADFDDRLWLEAVRAAEEQWAGWGELAEVEEGPVATAAEAVVMAERAGEAGSKEVAARLQAAAELAHSTGLAGPARSGVLVFNGVVSTNDGGSGWHGVTMGAVQSQLQQVQEDVYMQRLTDAAVDIYEEEYQARQLALAGPLLGLNATSPPAAGGGGGGLWIRYFGPQPSLAAEEEEASGPAPLAAVTHWVAADAGSRQGLRLVAAGLQHRSSNGRLGVVVNSGAGTAAPGADAAAQLLPVEKVVVAVGSGLLETDLNDFVDGLDAVVQQPQAPAALTLAQLDELLQARRRGGFEGRLEPALSGLGASLGQAAASQAGFVRRALGLGAGANAVVSNGRVVELPAEPPSGGDDAAGSGAEFEPHDFELLELYAQRNQYSERMAELVRSASQFGALRGVDLSAAAAVVSSALAAAKPEEVDARSGRVSELISGRSVQKNFVRVAAAGPADSAPLLVQAVVNPLSKPAQRLAPLLAFLRGVLDVDREYHDMPLKTFYRYALPTLGSPDGGPPAPAAATFTRLPPNKVLTLGMDEPEPWLVEPVQAEADLDNLRLEELGPGVAAAEAVFELEALMLTGMCLDLASLAARMREQIHPRGVQLQLQALSAPEAAPPLVDTLVMSNLGYFQLKAGPGLWKLKLAPGRSQELYSVASSTGASSSGQRAEAAVAGADAHQVPVAMSSFGGKHMHLFLRKHADRLSEDVLEAEEGEPGKGSLWSKVTSWAGSGGGGVPAPEGEGERETIHVFTVASGHMYERLQKIMILSVIKRTPARVKFWFIKNYMSPQMKAFVPFMAEKYDFDYEFVTYKWPSWLHKQTEKQRIIWAYKILFLDVLFPLGLKKVIFCDSDQVVRADLRELWHMDLQGAPYGYTPFCDNNKEMEGFRFWKQGFWREHLQGRPYHISALYVIDLERFRQMAAGDRLRVIYDGLSKDPNSLANLDQDLPNYAQHGVPIFSLPSEWLWCET

SEQ ID NO: 3781 - protein, 1539 aa, Pogona vitticeps
MVISDKMEVLIVLIGLWVNFSVVKADSKAVTTSLTTKWFSTPLLLEASEFLAEDSQEKFWNFVETCQDFGSSNHDGTDYSTYNAMLQAASKNLSPLQQNLLKFALSLRSYSATVQAFQQIAADEPPPERCNAFFVVHGEKTCTSDRLGMLLQTALERPKPFVFKGDHKYPGSNPEGPIVILYAEIGSEDFSKFHKLLVSKVNAGKITYLLRHYVANPSKEKVYLSGYGVELAIKSTEYKAKDDTQVKGTDMNATVIGENDPIDEVQGFLFGKLSQLHPTLKEELKELRKHLVESTNEMAPLKVWQLQDLSFQTAARILAAPTMDTLMVMKDLSQNFPTKARAITKTVVPSELRSEIEENQKYFKGTLGLQLGDSALFINGLHIDLDTQDIFSLFDVLRNEARVMEGLHSLGIVGLSMHNVLKLNIQPSDSDYAVDIRSTAISWINNLEVDSRYNSWPSSVQELLRPTFPGVIRQIRKNFHNLVLIIDPSHENSAELLTVAEMFLSNYIPLRIGLVFVVDDSEDVDGLQDAGVALLRAYNYVAQEVDNNYAFQTVISIYNQVNAGETLKVEHVVSILEKQYPYVEVNSILGADSAYDQNRKEGHNYYQQTGVGPLPILLFNGMPLQKEQLDPDELETVTMHKILETTSFFQRAVYLGELSNDQDVVEYIMNQPNVVPRINSRILMSDREYLDLTGTNNFYIDDYARFTVLDSKDKTAAVANSMTYLTKKGMSSKEIYDDSFIRPVTFWIVGDFDKPSGRQLLYDAIRHQKSSNYVRIGMINNPSKDPASENTFIARAIWAALQTQTSNNAKNFITKLTKEENAKMLEAGADITEFAVGGMDIAAFKAAFESSKADFILSHAVYSRDVLKLKKGQRAVISNGRIIGPLENDELFNQDDFHLLENIILKTSGQKIKSHIQQLGVEEDLASDLVMKVDALLSAQPKGEARIEYHFFEDRHSAIKLRPKEGETYYDVVAIVDPTTRDAQRLAPLLMVLTKLINMNLRVFMNCQSKLSEMPLKSFYRYVLEPEITFTSDKALVPGPVAKFLDMPQSPLFTLNLNTPESWMVEAVRTSYDLDNIYLEEVESVVAAEYELEHLLLEGHCYDITTGQPPRGLQFTLGTSTNPVVVDTIVMANLGYFQLKANPGAWILRLRKGRSDDIYRIYSHDGTDSPPDASDVVVVISNFKSKIIKVKVQKKLDMINEDLLSDGTSENESGFWESFKWGFTGGQKKEEVKQDKDDVINIFSVASGHLYERFLRIMMLSVLKHTQTPVKFWFLKNYLSPSFKEFIPYMAEKYNFQYELVQYKWPRWLHQQTEKQRIIWGYKILFLDVLFPLAVDKFLFVDADQIVRTDLKELRDFNLDGAPYGYTPFCESRREMDGYRFWKSGYWASHLAGRKYHISALYVVDLKKFRKIAAGDRLRGQYQGLSQDPNSLSNLDQDLPNNMIHQVPIKSLPQEWLWCETWCDDASKKKAKTIDLCNNPMTKEPKLQAAMRIVPEWKDYDQEIKQLYSRFHQEKESGTPSTKNETKQQSRAENAHVEL

SEQ ID NO: 3782 - protein, 1714 aa, Pseudozyma hubeiensis
MSLSHRVEVAARLHQLIDPRPAQALVAVAVVQAIMRALPLLGVSWAWLALTLALTIPTSPVNADSPPVKVQLRASWSKISLPSGGSPFLLEVLEAARAQQSSSFFPLIELLTSRYHPNELLHASDEGVAATVEKLIRAHQLFGSSPDQAEEALDTWRMSLALSNSSPRIQALVQLYETLGLDKVWRKGSGEESCVTWVHHNDQVLCSAEDVQKATQEGRSGTSMQGQGEEVVLGHSRKKNGSKAAAASSFVLYADPYSGNFRELFTALEQHSSHPDVDFTYTIRWRPSMRTKENSTKHVDSHAEAVQPLSGYGAILDLKKVDYLVIDDRKLKDDSNIGDVGISSTSQTDQSTAAQRASDDTQWLQDQIGADSEAAIVKLSSLTDDQIADLGIKAARLIMDSSDPLRALQELSQNFPSHAPALAESTRWDHAEASAGLVDSVLNLASMRIEPGHSDLWLNGQSTNARDFMPLTLLETLRKERGWNHALQHHLAGGGLNVTQAGDLISSSLVGRAYLAQADGDAAAAIFDASDRIETKNAPQGTSVGAITWLNDLENDEATSEWSNDLMDLLRPMWPGKFPRLSLNLFNVVLVMDLSQKETCRFLSETVMQSLGRVGLHWGLVPGGVEDETNANSIRMARLFWFLLDQAGAQVTSDVLRKAAASKAGSAGAIDVALAVKEAKFALKSIDAEDPLTDQLDKALAGDVDEYAQRETLGRAYVQRLRAHRHESPAGHVFVNGQHQPFHPQIVHILHQAIQKQIQVLAPQVYYGQINSSTPGLDTFFYDSVGALSFRSALVAGATSSSDGGQEGGVTHSAVDLLSALVNDAELAPMVDKVFDFFYPSAAQDSLNSTVWVLADLDSPDGLALLTRSLKALARDDAKFRLGVLHRPATTNDRATAVSTLLFRLLVEGRYEQLSAQTILTVLQQAKDDPAVTSQQLMAALGMPAVDSMVELDASHFWRSLGSTTASKLDIPDGPAILVDGHLVSNLDMSSIEARDITALVEYEAGQKLPYITQALKLIRHDVDDMPPKQRQNLIFAALSVMNGVYDQAGQGAFAAKASSRSGLPEQLGTADHVFEIGDRETADVRITVLLNPVSEAAQRWSSILLMLRELKGTHLRVILNPEVRLRELPLKRFYRFSAPHRLEFDGEGQVVPPELRFFDMPEEAVLTLGLDAPAPWLTMPVEAVYDLDNIRLADVPSTSRAKGVKAVYELKHLLIEGHAREEVAGSAVSVPRGLQLLLETPDASKSLDTIVMANLAYFQFKAQPGLWRLRIRSGRSDELYEMQSVGSQGWSSPPVERTGDYVTLDTLSGLTIYPRVAKRPGKEREELLEELDASGRPMKKQRAESMDGGLAASASVAGQLFLSAKDKVASLARQVTGSTSQGNTAVAPIRKHADINIFTVASGHLYERMTYIMILSVLKHTSSSVKFWFIENFLSSSFKEFIPHLAAEYGFEYELVTYAWPHWLRSQKEKQRTIWGYKILFLDTLFPLDLGKVIFVDADQVVRTDMKELVDLDLEGKVYGYPPMGDDSEDMDGFRFWKQGYWKDYLRGRPYHISALYVVDLQRFRLFAAGDRLRGQYQALSADPNSLSNLDQDLPNNMQASLPIHTLDKEWLWCETWCSRDWLKDAKTIDLCSNPKTKEPKLDRAKRQIPEWTVYDEEVARLAQRLVEEKRVGSSVVAPDSQVATRAGQQEEVVEPKDAQTKDEADPPLHDEL

SEQ ID NO: 3783 - protein, 1405 aa, Ornithorhynchus anatinus
MFQQIAADEPPPEGCSAFVVIHEQHTCKTKEIKKLLRKAAERPRPYLFKGDHKYPKINENVPVAILYAEMGTKDFVKFHKILAEKAQNQEIMYVFRHYVQKPKSKKMYLSGYGVELAIKSTEYKVMDDSQVKATNETDLEEDNEENEVQGFLFGKLNKIHPDLKDNLKELRKHLIESTKEMVPLKVWELQDISFQAASQIMSTRVYDALKLMKDISQNFPIKARSLTRIAVNQDMRKEIEENQKNFPEVLGIQPGDARLFINGLHIDLDLHDPFSILEILKSDGKVMHGLHDLGLNEEDLSRLLRLNTHPTDVSYALDIRHPSIIWINDIEKDDMYKLWPTSCRELLKPIFPGSIHQIRRNFYNLVLFVDPVQEMAADFVKVAELFYHHKIPLRIGFVFILNTDEKVDGKDDAGVALWRTFNYFAEEDDITRAFISIVNMYHKVKKGETLTVDNVKSVLQNEFPHADLQEILGVDSEYDEKRKAGATFHKMTGLGSLPQALFNGVPFKSEEVDAEEMETVILQKIMDATEFFQRAVFMGLLNDQMDAIDFLMDQSNVVSRISPLVLGTERRYLNLISTSVSVDIQDFSTFSYLDSQDKSAVIARNMRYLTKKDEDVISPVTIWIIADFDKSSGRQLLSNALKHMKTTSHTRLGVICNPTSKLNEENTAISRGILAAFLTQKNKHLRNFLNRLTKEETVKEIANGVKIKKFLLPGMDVNAFEKKYNTLGVDIIQTHKLFCQEVLELFPGKMAVVSNGRVLGPLAENYFYTEDFRLLEKITFRTSAEKIKTIIKDMKVNSESGSDLVMKVDALLSSSPKRMSRQQVKFLKEQHSIIKINPQENDAFYDVVAIVDPLSREAQKMAHVLIVLGQIVNMKLTIFMNCRSKLSEVPLKSFYRFVLESELKMEPSGILTSGPMAKFLEMPESPLLTLNMITPDNWLVEAVYSSCDLDNIHLEGIEGTVTAEYELENLLLEGHCFDISSAQPPRGLQFTLGMKNKPAMLDTIVMANLGYFQLKANPGAWTLRLRKGKSEDIYHIIGHEGADSPSDSDDVIVVLSNFKSKILKVQVQKKPDKINEDLLSDKNKENQRIWDSISSSVEGIQIEEKDQSNQDFLNIFSVASGHLYERFLRIMMLSVLRHTTTPVKFWFLKNYLSPTFKDIIPHMAEEYGFHYELVQYRWPRWLHQQTEKQRIIWGYKILFLDVLFPLAVDKIIFVDADQIVRADLKELRDLDLGGAPYGYTPFCDSRTEMDGYRFWKTGYWASHLGKRKYHISALYVVDLKKFRKIAAGDRLRGQYQALSQDPNSLSNLDQDLPNNMIHQVAIKSLPQEWLWCETWCDDKSKKQAKTIDLCNNPQTKEPKLEAAARIVPEWSEYDTELRQLIQRTEEGKKSSSKPTSKKGFQRDEL

SEQ ID NO: 3784 - protein, 1614 aa, Cynara cardunculus
METRIRSGLRILLLIAVCIIVCGYSVSAETQRPKNVQVALRAKWPGTSLLLEAGELLSREWKDLFWEFIDVWLNNESGNTDPYTAKDCLQKICNYGKSLVTGPLASVFELSLTLRSSSPRLVLYQQLAEESLSSFPLSDDLSVNPSSPGGKCCWVDTGGALFFDLPELQLWLRSPHKDGDIFQQPELFEFDHVYFASSIGSPIAILYGALGTDCFKEFHLSLVEAAKEGKVKYVVRPVLPSGCESKSGHCGAIGTKDPLNLGGYGVELALKNMEYKAMDDSEIKKGVTLEDPHIEDLSQEVRGFIFSRILERKPELTSEIMAFRDSLLSSTVSETLNVWELKDLGHQTVQKIVHASDPLQSMQEINQNFPSVVSYLSRMKLNDSIKDEILSNQRMIPPGKSLMALNGALIDIDEIDLFVLLDMVHQELSLADQYTKLKIPSSSVRKLLSTLPPPESNMFRVDFRSEHAHYINNLEVDAKYRQWRSNLNELLMPVFPGQLRYIRKNLFHATYVLDPASICGLETVDMIISLFESALPIRFGVILYSTKLIETLEANGGEFPLSSLENDSQINEDLSSLTIRLFLYVKESHGMQNAFQFLSNVNKLRMESGEEDVPLLHHVEGAFVETILPLAKSPPQDILLKLEKDQSFREPSQASSLFIFKLGLAKLECSLLMNGLVHDYNEDSLMTAMNDELPRIQEQVYYGQINSRTDVLDKFLSESGIQRYNPQIVGDKAKAKFVSLTASFLGDESLLNNIEYLHSAGTIDDLKPVTHLLAVDVKSRKGVKLLHEGIRYLMAGSANARVGFVFNSDVDPDSNSLTFMKVFEIATSSYSHKKKVLNFLDQLCSFYGNEFRLGSSQDAQSTQALLNKISDLADANGIQSKGFMSALSEFTVAKLTSHLKKVGQFLYGQVGLENGINAVITNGRVVRVPDDVTFLSQDLHLLESVEFKQRIKHIADIIEEVTWDDVDPDTLMSKFLSDVIMSVASSLSTRDRSSEGARFEMLSAEYSAVVIGGQNATIHIDAVIDPLSSSGQKISSLLRILWKCSQPSMRLVFNPMSSLVDIPLKNYYRFVTPTMDDFSNTDITVHGPKAFFANMPLSKTLTMNLDVPESWLVEPVIAIHDLDNILLENLGDTRTLQAVFELEALVLTGHCSEKDHEPPRGLQMILGTKKNPHLVDTLVMANLGYWQMKVSPGVWYLQLAPGRSSDLYIMQDGLDMRSTKRITIDRLRGKPVHLGVVKKKGKEHEKLLIPSDDDDSSRKQGDQDSWNSNILRWASSLIGGNVQSKKSGSTKVDNNVSNGRKGKTINIFSIASGHLYERFLKIMILSVLKNTQRPVKFWFIKNYLSPQFKDVIPHMAQEYGFEYELVTYKWPSWLHKQKEKQRIIWAYKILFLDVIFPLSLEKVIFVDADQIVRADMGELYDMNLKGRPLAYTPFCDNNRDMDGYRFWRQGFWKEHLRGRPYHISALYVVDLVKFRETAAGDNLRVFYETLSKDPNSLSNLDQDLPNYAQHTVPIFSLPQEWLWCESWCGNSTKARAKTIDLCNNPMTKEPKLQGAKRIVAEWPDLDLEARHFTSKILGEGVSPVEKVVSPIEKIVSPPAQPQEPEEDLESRAEL

SEQ ID NO: 3785 - protein, 1208 aa, Phlebia centrifuga
MPPTSFGELHAYLLDVSSPPERQIEYVFRHIPPKGYESSIETEAKTYLSGYGVSLDLKKMDYLALDDRRQGSNSREEFASETSDLPYDTDRILSLVHQYPENVTADYVAPLSEEELLQIGMQSTQLIYDAGEENALATLKQLSQNFPKYVKDVARRVTAEDKLEAEIMDNQVKAQGGISMAWLNGVVIQETDWNPFSLLRLLRKERSTMQSLMSLRLTSEQAIELLTHRAVGVAQADSGVLDGIFDASDRLEGEGAIVWWNDFENDSRYARWGPSLSLLLRPMYPGQLPNLKLNIFNVVVVADLSQSSALNFIAGAVSNIIQRNFPFRWGIVPIIETEEGERMARLFYWLVENLGQTKTMEFIARISQVQTPVHLITPTVDWSLVHSEFHHAISERLDNDEVSDHFPRHIDLELILSGSVGDSAEVLQKARTYAKRLSADLASAPQGHTFLNGKHFNLDDDFLRNMQVEAGQQLLHLQEQLYHGLLTPEDGARISTYFYDRPEASKRRSKHIYPSGKPEGLKILSLTDLILHSHGSFVYPPESEGHNLPLTTFVVTDLDSTAGAELVKEVLSAMEDSTTRVAFIHNPSTKGANTNPSPGLSGLLRNLGNKGLLHGITPSRLLDVLRSGSVGPSKAIDQVVLSAEGLSDDALREALLPDMTEETEDYQQFVEASRFVLRDLKIGPGEQVVIMNGRVVGPLGRGEFVAEDFQELVAYEYRKRVGPVVDALADILPALDELDRIDYADFVSSVSSVISSIHLPDPSESGLFNAPIKPRRRNYQLLAGEYTKFEYGDNSTAFFHVGILLDPLSEAAQKWSSLLEWLLDDPAVFVELHINPARYKEMPLKRFYRYSVSPKINFDENGEEIPSKLTFHGLPEEPIYTLAMDVAPSWLVRPREALYDLDNILLSALSNHERAKGIQAIFDLDYLVIEGHARQVFTNSPPRGLQMQLVANSTPIADTLVVANLGYLQFRTKPGVFRLEIRPGRGREIFHMESVGNEGWDSPSVAEVGNEVTLMSFEGLTLYPRVTRFPGMEGVDVLATESVPGEDEGLFGKIKESISSLFSSKSTEVAVAEPNDDQAEINIFTVASGLLYERFASIMILSVLRNTKSTVKFWFIENFLSPSFLVRILHGFVKSTILYWKQEFIPHFAKEYGFQYELVTYKWPSWLRAQKEKQRIIWAYKILFLDVLFPMDLKKSFSWMRIKLSGQT

SEQ ID NO: 3786 - protein, 1581 aa, Columba livia
MTESGLSRLLDNPKLEREINTPENNASIQSNFKWEENCFDGNLVKINHSQWFTVRVVRHRTGWRQDPPQGGGANAAPALARGRVPLRPQRRVSTRELREPRYLFGVSEFIAEDGNEKFWQFLETVRELTVYKQGDSEHSYYNLILKKAGQFLSNLQINLLKFALSIRAYSPTVQTFQQIAADEPPPEGCSAFVVIHEKHTCKTNEIKKLLKKATKRPRPYLFKGDHKFPTLKEDGPVVILYAEMGTKDFVKFHKILSEKAQKEEIVYVLRHYVQKPSSRKMYLSGYGVELAIKSTEYKAVDDTQVKGANETKEEADEEEEEEEGDVQGFLFGKLKQMHPDLKNNLKEFKKHLIETTNNMEPLKVWELQDLSFQAASRILSAPVYDALKVMKDIAQNFPIRARSLTRVPVDKKMRSEIEENQKHFHEILGIQPGEARLFINGLHIDLDFHDPFSILETLKVEGKAMHGLHELGIKEEILSKFMRLHIHPKDDSYALDIRHSSIKWVNNIEQDHSYSTWPASYQELLKPTFPGVIQQIRRNLYNLVLFVDPIQEDTGDYMKLAELFYHHNVPLRIGFVFILSTKEEIDGNEDAGIALWRTFNYIAEESDTFQAFTSIINMYHEVREGNVLTVNHVKDVLRSEYPHADIQSILGVHSEYDEGRKAGATFYKKTGLGPLPQALFNGVPFNREEMDAAELETVILQRIIDATGFFQRAAFMGLLNDHINAMDFLMEQHNVVSRINPTVLGAERRYIHFRSTSVPFDVEDFSTFSFLDSQDKSAVISDNMKYLTKKDEDALYAVTIWIIADFDKPAGRRLLSNALKHLKTSSHTRVGVLNNPSSKIKEDNTAVARGILAAFLTQNNSNIKSFLSKLTKEETAKSLAAGTKITKFLTPGMDDDTFEKKYNTLGLDIIKTHQMFCQEVLKLLPGQMAVVSNGRVLGPLDENEFYAEDFNLLEKITYSTSAEKIKAIVKEMGNSSKSGSDLIMKIDALLSSLPKTEMRQDAEILKEQHSVVKVNPQQNEPFYDVIAIVDPLTREAQKMAHLLIVLKDIINVKLRLFLNCRSKLSEVPLKSFYRFVLEPELTYGINKHLPSEPMAKFLELPESPLLTLNMITPESWLVEAVNSSCDLDNIHLQDIQGTVLAEYELEYILLEGHCFDVTTGQPPRGLQFTLGTKNNPVMVDTIVMANLGYFQLKANPGAWTLRLRKGRSEEIYQVFSHEGTDSVADLTDVIVVLNNFRSKIIKVQVQKKPDKVNEDLLTDGTTGKKGNRESVTRFSEEISTEDNENKSDILNIFSVASGHLYERFLRIMMLSVLRHTKTPVKFWFLKNYLSPTFKDVIPHMAKKYGFKYELVQYKWPRWLYQQTEKQRIIWGYKILFLDVLFPLAVDKIIFVDADQIVRSDLKELRDLDLKGAPYGYTPFCDSRKEMDGYRFWKSGYWASHLGKRKYHISALYVVDLKKFRKIAAGDRLRGQYQALSQDPNSLSNLDQDLPNNMIHQVAIKSLPQEWLWCETWCDDESKKKAKTIDLCNNPQTKEPKLKAAARIVPEWVDYDTEIRKLIQQIEKEKKNLTSSFQKGLKHDEL

SEQ ID NO: 3787 - protein, 1496 aa, Talaromyces islandicus
MKPTAASSLAAGLLLLLHLPHVAIAGPSVNVALQASFDAGPYLVELLETAAEENSTAYFPLLDRIAEGAFESATTEQDLYRQFLRVLHDDGHLADAESLDSFKLALSIRSAAPRIQAHYQYYNSSVQSTLAAAQDAACPVWVHMDGKQYCSPTLERAQQPVEGDSDPRELPFDRTFGDPLATPAVLYADVSSPIFGEYHRTLKALAKDGEVAYRVRYRSIQNHDTPARPLFMNGYGVELTLKRTDYIVIDDRQDEERGTAQTKAKAPSTENLEDESSAELTPLSSSEVLTLGTSAAGFVVDSQDPFTTLVKLSQDFPKHSAAVAAYNTSDKFLEEYMKNRQAGLPGARNIMWINGQQIDTRQVDSYSLLEHLRRERRLIGEFKKLGLAGSEAVDLLSHSALAEVKLGSGVQRYDWRDEAEEGGVLIWMNDIEKDSRYASFSANLQMLLQPMYPGQLPPVRRDIHNVVVPVDLANEEDVGFIVQYLYVFVKRMLPVRFGLVPIVHTEESKAQAKIAHHLQQTYGLASLLKYLEETASSGKNPKANKKFFAAAIADRALRPDRQSLSFDEVLQSQDLEATVTKTAKYLRRLDLRGPSPPTLVNGVAMSRTETYLQSLPMQLGNDVQVIQQALIQGEFEKDSWIAGFFLLDAAQSRNEWIVPENDNEIRMLNMLEIASAHNDFNEVLRLPSDKTHTTNNVQLVVVGDFNTDYGLALLVSALKFRQSHLQAEVIPLHTSDAKEDAAGVSSKLYELLRQAKQPEVADVLLHVQSANAAATHSQEEQEYWTRAQKLVESFGFALGASGVVVNGRVVGPLPSSVEFGEAELEHLYSYELSRRLGPVTEALGDLGIESKVTGPLAFAKLTSLLALSNTPDVPEGIFESKPKYRLDVWGRWNSTYSGITAESQEDASINIVATIDPTSELSQRWVPILKTLSELAGVKVKIFLTPVTQLQELPIKRFYRHVLSPEPLFDENGALIRPEASFRGLPQEALFTLSMDVAPSWLVAPKESVHDLDNIKLGALKDGTDVDAIYQLEHILIEGHSTDTTLQTPPRGVQLLLESEGGSFFADTIVMDNLGYFQFKAQPGFWKIELKEGRSQSIFKLDSVGAKGRTVRAEDDGSNEVALLSFQGKTLFPRLSRKPGKEDEDVLETGPRPGSAMDYVSKGLNFAQGMLGVKSSSSSKSVTAEKHAEINIFSVASGHLYERMLNIMMVSVMKNTQHTVKFWFIEQFLSPSFKSFLPHLAAEYGFSYEMVTYKWPHWLRGQREKQREIWGYKILFLDVLFPLSLDKVIFVDADQIVRTDMYDLVSLDLEGAPYGFTPMCDSRTEMEGFRFWKQGYWKTYLKELPYHISALYVVDLQRFREVAAGDRLRGQYHTLSADPQSLSNLDQDLPNHLQTMIPIKSLPQDWLWCETWCSDESLASARTIDLCNNPMTKEPKLDRARRQVPEWTVYDDEIAALAKRVAQGDVDGVDDVDVDVDAEDDVDHVRVEEQLRKDEL

SEQ ID NO: 3788 - protein, 1554 aa, Phanerochaete carnosa
MRLRCLLALLPLTAVLASSPPVQVELRTSWAPPPFLVELLETIAIEDPESYFPLLDRFTHPEWSPLAQDQAHENVYRNALETALAAGYLAEPGELAAMEATFALHSSTPRLEAAYQFYSDNQAGRGADCGSWVDWYGDVVCSVEDLQRLAGIKAIEAGEVAARNGSASDVKVLPFDHIRPSPDLTLDRPPQTAVLYATLTSSNFRNLHSFLYAASAGPRPHIQYILRHIPPTGHASDRERAYLSGYGVALDLKKMDYLAMDDRRQSSADDSDASDDALSAPGEADVVAALLQQYPEDADTDYTIPLTSDELSNIGLQATQLIADASDPLATLKQLSQNFPKYASSIARRVVVSDTLEDEITLKNTRAPAGASMAWLNGSPLTEGDMNPLSLLRLLRKERAVMRQLAALGLNTTQSLDVLTHRAVGAAQADTGALDALFDASDRPEGGAAIVWCNDLEQDARYARWPDRLSTLRGVMLYPGQLPSLRLHLYNIALVLDLSQPAGLGFITNAVVSLISRGIPFRFGIVPSVETEESLKMARLTYWLFENIGQDKALNFIARLARLQLGNPFAEPTFDWSLVTSEFTDLLARTEGLSASLASIFDGEDEEMEHKVAAARAYAARLAADLTSAPRGHVFMNGKHFDLDDDIMRNMQFMGTQMFQHLQEQLLAGALTDDDAEHIATYFYDLPTTAARRNRYIYPSGKNSELVLNVPELLAKASFSSGQDAFVYPPGEAQVSLTTLIIADLDSEEGLALAKEALMAMEEDSPARVSFVHNPSNSTARASTSAFLGHLGEQVVLSAGGGIDEILDGASLAALDDDPFVRASRFLLRELKLAPGAQAVVVNGRVVGPFVPGGIVAEDLHALYMYEQHKRVGPVVEALEEVADLERLSRKGAAELIARAASLISSIHQPDPSEVGLFNAPVRPRKRSYQLLGGEHTKYEFGDNATAIFHVGILLDPISDTAQKWSALLEWLLNDPAVFVELHINPWRYTELPLKRFYRYNVQPALRFSDAGDETKSLVSFNGLPEDPIYTLAMDIPPSWFVRPREATYDLDNILLSGLGKHERAQGVYALFELDYLVIEGHAREDGTLTPPRGLQLQLINGEGNAIADTLVVANLGYLQFRAKPGVFGLEIRPGRGREIFELESAGSEGWNSPTADQAGNEITLMSFEGLTLYPRMRRSPGMELVDVLAPPRLDEQDGTIVDKLKHGITSLFKSKPEERTEAAEPATQQAEINIFTVASGLLYERFASIMILSVLRNTNSSVKFWFIENFLSPSFLEFIPHFAEAYNFQYELVTYKWPSWLRQQKEKQRIIWAYKILFLDVLFPMDLKKVIFVDADQIVRADLKELVDLNLHGAPYGYTPMGNDNEEMEGFRFWKTGYWKEHLEDLPYHISALYVVDLVRFRQLAAGDILRAHYQQLSADPNSLANLDQDLPNNLQREVPIFSLPEDWLWCETWCTKDRLHRAKTIDLCQNPLTKEPKLARAKHIPEWEEYDGEISRFARQLAENGLIHSGMADADATILADVGAGKVATENKQGTGSAGDDAETLHRQKDEL

SEQ ID NO: 3789 - protein, 1396 aa, Rattus norvegicus
  MOD_RES (550)..(550): Any amino acid
MARAGAAKGLRLLLRSVALWLALLGASTATASKAVTAHLAAKWPETPLLLEASEFMAEESNEKFWQFVETVTELAVYKQTESDYSYYNLILKKAGQFLDNIHINLLKFAFSIRAYSPTIQMSQQVAAEEPPPDGCAAFVVVHTKRTCKTSELKKLLSKAASRPRPYLFERDHKFPTSSENLPVVILYAEIGTRAFAEFHRVLSKKSKNGKILYVLRHYIKKPSSRKMYLSGYGVELAIKDTEYKALDDIQIKATTDATVENETGADEVQGFLFGKLNILDLLRSEGKLLSGLKSLGLSEEERSRFLKLNSPVWDDDFVLDIRHSSIVWINDLENDALYTDWPTSCWEFLKPVLHGTVPSVRRNFHNLVLFIDPAQEYTLDFINLAEFFYFNEIPLRIGFVFILTMDNDVDGTTDAGVALWRAFSYIEENYGVSEAFLSMTHMYQKVKGRHILTVDDVRTVLQNKFPHADILDILGTHSKYDSRRKEGANFYKMTGLGPLPQALYNGEHFGLKEIDTEELKGAILEKMMDAFIYLQRDVFMGKITDEINAXDFLMDKSNVVPRLNSLILHTEPQYLNLLSSSVTADIEDFSTFSFLDSQDKSAVVAKHMHYLTRDDAVISAVTLWIVADFDVPSGRKLLSHALEHMETTFHSRLGIVYNPTSKINEENTAISRGILAAFLTHENDLLRSFLRKLAKEETAEAIYSGDKIKTFLATEMDKNAFEKKYNTIGVNIFRTHQLFCQEVLKLRPGEPGIVSNGRFLGPLNEELHKEDFHLLEKITFSDSVVKIAGIVENMEMNSKHMSDLVMKIDVLTSSLPVRASRSDVTLLKENLSVIKINPPENDTFFDVIAVVDPLTREAQKMTQLLDVLGKIVNVRMKLFMNCRGKLSEAPLDSFYRFVLEPEPFSGASNSPSQGPVAKFLDIPESHLLTLNMITPEGWLVEPVHSNCDLDNINLKDIERSVTAEYELEHLLLEGHCFDMTTEQPPQGLQFTLGTRSNPDVVDTIVMANLGYFQLKANPGAWILKLREGKSEDIYEIIGHEGADSETDVGNVIVVLNTFKSKILKVQVKKKSGKIKEDVLADKHEDRGMWDSIKSFTESLQKDGRKDNNILNIFSVASGHLYERFLRIMMLSVLRNTKTPVKFWFLKNYLSPTFKEVIPHMAKEYGFQYELVQYKWPRWLHQQSEKQRIIWGYKILFLDVLFPLAVDKVIFVDADQIVRHDLTELRDFDLDGAPYGYTPFCDSRTEMDGYRFWKTGYWASHLVKRKYHISKTHSPVSTCKVGISGFFGDSGIMMFCRGRQVKEQFAEADTGDLPNNMIYQVAIKSLPQDWLWCETWCDDESKQRAKTIDLCNNPKTKEPKLEAAARIVPEWVEYDTEIRKLLDHLENKKKSTIHDEL

SEQ ID NO: 3790 - protein, 1525 aa, Ophiostoma piceae
MAGFPNRPRGLAMALLAALSLQPSLTAASPSVDVGMIAAFPAPPYLTELLETAAQENATSYYPILDRIAEGYFADASTDRDLYEKFLALLKDGGHVASDAALSTFKLALSLRSAAPRVEAHYQFYNTAAEGSVSGDQTGCSQWILWEGSQYCSPSLDEAHSKVSGHQRQEKTVPFDNTLSHGPAAILYADITSPGFGPFHKFLAEKARNGEISYRLRHVRPTAVDGVAEPLPVNGYGVELALKRTDYIVIDDRESATGNEAAQKKLAAPAEVILDGEEEVTDLKALSKSELSNLGMSTADYIIQSENPFDTLLKVTQDFPKYSSSIAAHNASEAFLTEHQKNRALMVPPGVNVMWMNGVQLIERQIQPLALLDIVRRERIMIDGVCELGLTGKEAVDILGHQAVAQSKAESAPLRFDWRDEIEDGRVIIWLNDLVNDNMYEEYPKTLRALLQGGMPGQIPPIGLDVFNQLYPVDLTKKADIHLIVNQLVDFVRRRLPVRFGLVPLTPTPEAAKQAKVVYYLLETHGLIAVVGYLTQTLKDGKAASPNASIFKSIVKDHDLREEAKVLAFDDIMTDEGYAKQIELAQHWADRLGANSEIPPIFIDGSVVPRDERWVQTMSNQVALNLRAIQEAIYYKRIDDTIWAPDFFLIESLTRRNALIFPEGPQSLHVLNVHKLLTEHADLFNHIPSIEADEETTKETWAALTVVLDIGTEDGLKLLINALQFRVNNPGVTLDVVYNPKDTDSALDLINSLQDVDLDVLTEVQSWEELKALIATEKPATADYLAALTRFRTAAAINPGDNMLILNGRVLGPVDKADSFKEDDFFTFLEYEQAERILPVYKAVEDLNMTSKVSSPIGAAKLTSITALSTITDVPEGIFESAPTLRISSFNLWTAEHTAFEAGDAATATIHFNIALDPASEVGQRWTPILKVLSQLDGVYMRVFLNPRDRLQDFPVKRFYRSVLEAAPLFDDAGKVKALAARFNGLPSEALLNLGMEVPPAWLVAPKVSVQDLDNIKLSSVKSDITATYELEHILIEGHSEEEGSKAPRGAQLILGTEKDEHFADTIIMANLGYFQFKANPGFYNIKLMDGRSSDIYTIKSVGSRGKAPVPGDEGTDVVLMDFQGTTLYPRLARKPGMEKEEIIPSDASAAPAAAARDSSAGSGGAMDYVSKGLKFAEDMIGKAKSATHKTAAVAAKEKQADINIFSVASGHLYERMLNIMMVSVMENTNHTVKFWFIEQFLSPSFKDFIPSLAEAYGFEYEMVTYKWPHWLRQQKEKQREIWGYKILFLDVLFPLSLDKVIFVDADQIVRTDMYDLVQVDLQGAPYGFTPMCDSRTEMEGFRFWKQGYWSNYLRGQPYHISALYVVDLRRFREMAAGDRLRQTYHTLSADPNSLSNLDQDLPNHMQFQIPIFSLPQDWLWCETWCSDEALTTAKTIDLCNNPQTKEPKLDRARRQVPEWNVYDTAIAAIDKQRKQGSDAASKPSSPIRVGGGAGGQQKPVVGSEPKEVAEEAVVVAGTHERDEL

SEQ ID NO: 3791 - protein, 879 aa, Zea mays
MYRRWRSNIQELLMPVFPGQMRYIRKNLFHSVYVLDPASACGAETIDMMVSLYQDSVPIRFGIIMYSSRFINVVEGSDGTLTNNDGEDTSILITRLFLYIKETYSTQLAFQFLGNIHKSRNGEDDYNEELVEAHHVEGAFVDSLLSTAKSHPQDVLLKLQKENMYKQEAEESSHFVHKLGLYRLQCCLLMNGLVHEASEEATMNAMNDELPRIQEQVYYGHIQSHTDILEKFLSENSYKRYNPSITGKNAEKKFVSLFASYHQDSFIFNDMKYLQSPGTTDDAKPVTHLLAIDLSSKVGTKLLYEAILYLMDGSDRARVGLLLYVHTGGSSPILLLKDIFDRTISSFSYKEKVLVFLHGLLKFYDAQPLPASSVADDWTRTMMEKVYTLAAETALPVDDYKAWFKSFSADTVLKGMDKLSDFLFGQLGLVFGSNAVITNGRVFIMNEGKSFLANDLGLLESMEYDLRTKYIFEIIEEVEFASVDPDDLTNQFYSDIAMLISSSMSVRERTSERAHFEILHAEHSAIKLNNANSSIHIDAVIDPLSPTGQKLAPLLRILWKQIQPSMRIVLNPISSLADLPLKNFYRFVLPSMDDFSSTDHSVHGPKAFFANMPLSKTLTMNIDVPEPWLVESVIAIHDLDNILLENLGDVRTLQAVFELEALLLTGHCMEKDRDPPRGLQFILGTKQRPHLVDTLVMANLGYWQMKVSPGVWYLQLAPGRSADLYELPPKLIAIDSLRGKLMHIEVQKKKGKEHEDLLNAADDYHFQEKTDNKGWNKNLLKWASSLITGDASSKSKADKTTDRKDARQGETINIFSVASGHLYERFLKIMILSVLKKTQRPVKFWFIKNYLSPQFKDVIPHMAREYEFEYELVTYKWPT

SEQ ID NO: 3792 - protein, 1505 aa, Auxenochlorella protothecoides
MGVGQCALACVLLTTLVLLHPSLADVGRGADIQLRAKWNSSTFAHEAAEFLAAQDTAAFWSFAGAFTLPQDSTDCLEHVLRQARSLPPDEPSRRLLGVEVAARLHSPRAELFHAAAARELGDASPSMPCCWASVGGAPFLSLSALRAALAAPATGRASEGPRAFDHVHPGPPEGAPEVPFVALYAPLGNACGAAFHAELRALASAGKITYAWRPLATVACAGDDSSPCLHAGSSLVLPGYGVELAIKNMEYNAADDKAASEAAADAGGDPAGAEDTAPSGTAAVGAARVPAGEGDLEALHAQLEAWRDSAAAETVLTKRQLRRLGLQAAARVAEAPASPLAVLVELAQNLPSYAPLLSAVHVPKNLTRAVDLLQRLLPPASGMLAVNGRLLRARDLSLHDLLGKSDARYARWPARLESLLVPSFSGRLPGLRRNLLTAVLLFDPASDSAADLGEAARVVLLQGWPLRLGLVPLVRNGAGDEAGARVARLFLGVHATLGPDPALAFLVSLAGVDFQSGDEAAAWKQVQLTFKRHWPTWVDKASEDAEPHPALQWTAAQALEAYVDQPDAATLRTLRAGVALARSTGLAGLAASPEASGGVLVICGLVVPLRAGEPVARLVGQALQMELRQVQEDVYLHRLTDDMPDLEDELLELRGAAPRINPRIFPSRQGTGAGGGLEGVPDPSAPRQLALTGPGLGAAARHAAGLAYWKVGDGVETDAPAIIHWAVADVLTREGLSLVLAALQHESSHSRTALLLNSAGGLGEGSLAPLERGLLAMLTRADKPVPALDVAAALESILALPLDTDLGSLSESDIHITHGLSWAELPNADQVAAAHSRFAREGLRLPRGSSAVVTNGRVVTLQPSGELFVPEDFELLELYARWYQFAGDGDSEEQQAGLEDAGYELSGRGLWERFPTDELNTVRVLAYLHEALGAEVMLTLNPDRGLADLPVKGFLRYVLPRGDGAPPAARFDGLPADQTLTLGMEVPEPWLVEPVATDHDLDNIRLAELAPGQRLAATFELEALLVTGSAIDLGAARSGDPSQEVHPRGVKLELGPAGKVPLVDTLVMSNLGYFQLKAAPGEWTLGLAPGRSRELFSVARDDELEADHGMEGAAAPRNQGGLTFELPVTVDSLMGHHLRLFLKKDPAWLDEDVLAPSPGTGPTVGVWSSLPVWGVKKDEAPAPAKEGEDARIHIFTVSSGTMYERLQKIMILSAVKRTSARLKFWFIKNYMSPQMKAFIPVMARRYDFDYEFVTYKWPTWLHKQSEKQRIIWAYKILFLDVLFPLGLKKVIFCDSDQVVRADLAQLWATDLQGAPYAYTPFCDTNKEMEGFRFWKHGFWKDHLQGLPYHISALYLVDLDRFRTLAAGDKLRILYERLSKDPNSLSNLDQDLPNYAQSIVPIHSLDQEWLWCETWCGAASRPAARTIDLCNNPLTKEPKLQSARRIIAEWPALDREVEELTAAVTAAAGRARELEAVVASDSLFRARLAPMVEGVVGGQGRDASEL

SEQ ID NO: 3793 - protein, 1472 aa, Mus musculus
MRLLLRSVALWLALLGASTATASKAVTAHLTAKWPETPLLLEASEFMAEESNEKFWQFVETVRELAVYKQTESDYSYYNLILKKAGQFLDNIHINLLKFAFSIRAYSPTIQMFQQMAADEPPPEGCTAFVVIHTKCTCKVNEIKKLLNKAVSRPRPYLFERDHKFPTSSDNLPVIVLYAEIGTRAFAEFHRVLSKKSKNGKILYVLRHYIQKPSSRKMYLSGYGVELAIKDTEYKALDDTQIKTTTDTDIENETEVDEVQGFLFGKLKEIYSDLKDNLTIFQKYLIESSKEMTPLKVWELQDLSFQAATQIVSTPVYDAIKLMKDISQNFPVKARTLTRIAVNELMRKEIQENQKDLRDRFEIKPGDARLFINGLRVDVDVYDPFSILDMLKSEGKLLSGLKSLGLSEEERNRFLKLNSPVWDHDFVLDIRHSSIVWINDLENDGLYIDWPSSCWEFLKPVLHGTVPSVRRNFHNLVLFIDPAQEYTLDFINLAEFFYFNEIPLRIGFVFILNVDNEVDGTTDAGVALWRAFNYIEEKYDVSEAFISMTHMYQEVKGHRILTVDEVKSILQNKCPHADILDILGIHSKYDGRRMEGATFYKMTGLGPLPQALYNGEPFDLKEMNTEELKGAVLEKMVGTFVDLQRDVFMGTIRDETSAIDFLMDKSNVVSRLNSLILQTEPQYLNLLSSSVTADIEDFSTFSFLDSQDKSAVIAKHMHYVTQEDAVISPVTLWIIADFDVPSGRKLLFNALKHMETSFHSRLGIVYNPTSKINEESTVISRGILAAFLTHKNKHLRSFLRRLAEEETAEAIYSGDKVQTFLAVEMDKNAFEKKYNTVGVNIFRTHQLFCQDVLKLRPGEPGIISNGKFLGPLSDELYQEDFHLLEKITFSNSLQNIAGIVESMDMNSKHVIKINPPENDTFFDVFAIVDPLTREAQKMAQFLVVLGKIVNTRIKLFMNCRGKLSEAPLDSFYRFVLEPELTSGPNNRPSHGPVAKFLDIPESHLLTLNMITPEGWLVETVHSNCDLDNINLKDTERSVTAEYELEYLLLEGHCFDMTTEQPPQGLQFTLGTRSNPVVVDTIVMANLGYFQLKANPGAWILKLREGKSEDIYEITGHEGAEPETNVGNVIVVLNTFKSKILKIQVKKKSGKIQEDVLADKHENRGMWDSIKSFTKSLHKDEKKENDILNIFSVASGHLYERFLRIMMLSVLRNTETPVKFWFLKNYLSPTFKEVIPHMAKEYGFQYELVQYKWPHWLHQQTDKQRIIWGYKILFLDVLFPLAVDKVIFVDADQIVRHDLKELRDFDLGGAPYGYTPFCDSRTEMDGYRFWKTGYWASHLVKRKYHISALYVVDLKKFRRISAGDRLRGQYQALSQDPNSLSNLDQDLPNNMIYQVAIKSLPQDWLWCETWCDDESKQRAKTIDLCNNPKTKEPKLEAAARIVPEWVTYDTEIRTLLDHLENKKKSANSVHDEL

SEQ ID NO: 3794 - protein, 1984 aa, Atta colombica
LQMRGLIFFYIFLLCSSQLGADKKINKYVTTLINAKWKETPLVLEAAEYLSDENPNYFWKFIESYSKIIKHSTSHTQQNNYNIILELAQKYLSPSEIAVFKLGMSLRIYSARVEMFFQMAVNKNVSSYGFCDNFVNIGETFTCSLEDIDRLLEQLIITLFIFQDTWETVDTYDVDHKYLSTPESNKIIILYGQVGTPMFIDFHEKLKNIAETKGINYILRHFIKDYNEEREDTKLRLSGYGVELQMKSTEYKATDDSDIKDNTGKSSEMANDGMEEIEGINFMILKKLYPDHQAELDKIQTYLLETSHEIGAFKVWQFQELSHQAAERIMKSPSAEALNILTDISQNFPMQAKSLIRTKVNIDMKKEMKLNQEIFMASLNIQPTDTALFINGLYFDLEAIDILTLLESLRNELRVMEALHKIGFSNKKMSKLLALDLSGGTDNQNFAMDIRDSAINWINDIENDPRYSNWSPSLTELLRPTFPGMLRNIRRNLYNLVLIIDPLSDDSMPLIALAQSLYAHSAPLRVGFVFVTNYNTSVTGLIDASVAVNNAYHYFADTRSPKEALHFLSELGNYIGHSGVDVDDVKKVIRSRDSSASIPYILGEESEYDVGRHLASDFIKRCGFKKFPQALLNGVPLTPNQINSESYEEAVLSTIMLQTPMLQKAVYRGEVTEGDDIVDFLMNQPNVMPRLNERILKVDKNAWLNLIGTIPEDDDYTKWASQNLSTYLMKEMHYLFVPRRNMRHLYSFWIVADLKSLSGRQLLREALEYIESNADARISIIINAEDDANLKSDINKIVLAVINALSPEKAILYMRKILKEDIVALIANDNFEIEDESVAAILENQNSILSLHQHYVKAVLNMELGTRAVLCNGRVIGPLDDNEEFTNDDFSLLERFSQSTYGEKLFMKLIKDQIFDEDEYEENNITDDTIMKITSLLVPRPQTRSRYDVPFHGDDHSVVKISAINPDEVAFNFIAIVDPVSRGAQKLGPILKTLQQALNCNIKVFLNCVDKNSDMPLKSFYRFVLEPELQFTTEGDINGPIAKFTKLPTSSLLTQYIHAPENWLVEVVRSVYDLDNIKLDNVAMGVHSEFELEYLLLEGHCFEAVMGNPPRGLQFTLGTEKQSVMVDTIVMANLGYFQLKANPGEWVLRLRQGRSAEIYDFTTIDGQNVIQNGNDVKVLISSLRSHVLKVKVSKKPDKAGIDLLSDNEKDSGLWNSISRTFTATDENEDKDEKLNIFSLASGHLYERFLKIMMLSVIKHTKTPVKFWFLKNYLSPTLKDFLPHMAKEYGFEYELVQYKWPRWLHQQTEKQRTIWGYKILFLDVLFPLNVKKIIFVDADQVVRADLKELATLDLGGAPYAYTPFCDSRIEMDGFRFWKQGYWRNHLQGRAYHISALYVVDLKRFRRIAAGDRLRGQYQALSQDPNSLSNLDQDLPNNMIHQVAIKTLPQEWLWCETWCDDASKKYAKTIDLCNNPMTKEAKLQAAMRILPEWVGYDEEIKILQQKIENANRQTWRDSDLPCLALPWLRDRLGGRLLSIVRCSRTRIVRTPPRRSAWKIHDMDNSGDKSADVEILAVVAEQNNITNKFKDKAIYGYGTSIPPNNNEDEENEMSPRKVIFCVHGKLSGCCTVVKGSGDENTAANYQQNSLSPEDHCHRERNEEIDKKARKKLLIASALCVIFMIAEIVGGVLSNSLAIATDAAHLLTDFASFMISLFSIWVASRPATRKMPFGWYRAEVIGALTSVLLIWVVTGILFYLAIERIVHKDFELDATVMLITSAVGVAVNLVMGLSLHQHGHSHGGHSHGGHNHDDMENGHDDDLKGEQSKKNINVRAAFIHVLGDFIQSVGVFVAALVIYFKPSWSLVDPICTFLFSILVILTTVAIIKDVINVLMEGIPKGFDYSHVENTFMQIDGVVKVHNLRIWALSLDKTALSAHLAIKPGSSPQNILCTATRNIHDKYKFFEMTLQIEEFNERMENCKQCKALS

SEQ ID NO: 3795 - protein, 1547 aa, Austrofundulus limnaeus
  MOD_RES (164)..(164): Any amino acid
  MOD_RES (588)..(588): Any amino acid
  MOD_RES (1182)..(1182): Any amino acid
MEAVSITSRTGAELMVCSSAKMKNVLLMTLLLLNVRPGTSTPKGVTASLKAKWSTTPFLLETSEFIGEDGNEKFWQFVETVKELTVYKQGESVRSYYNLIIKKAGQFLTDLQVNLLRFALSMRSYSPAVHSFQQIASDEPPPEACPAFVSVHGERSCSAKDIKXLLKAAAGRPKPYLYKNDHTYPGVNKTDTPVVILYAEIGTKRFSSFHKVLSEKAEEGALIYVLRHFVADPKPQKILLSGYGVELAIKSTEYKAVDDTKVKDSKTVLNTEEDDNDEVQGFNFAKLKKSHPELREQLGELRKHLLESTNDMAPLKVWEMQDLSFQAAARIMSVPKFDALKVMRDLSQNFPSKARSLTRVAVKKEMRKEIEENQKRLGETVGVHPGYGELFINGLHIDLDIHNPFSILDILRTEARILEGLHNLGIKGEHQGKLLRLPVNSVDDSYALDIRHPAIMWMNDIENDPIYRSWPASVQELLRATFPGVIRQIRRNFFNLVLFLDPLQEETVELVKLGELFYKHKIPLRIGFVFVVNTKDEIDGLSDAGVGFYRLLNYIADEYDLSQAVMSIVSLYGQVDVGERLSAETISXYLKKKYPKANVERILGVDSVYDYKRKDGSLFYKTSGLGALPLALFNGVPLNPDEMDPEDLETIILQRIMDTTTAFQRAAFMGQLTDSSDVVDYLMEQANVVPRMNPVVLSTDRKYLDFTGTPVVNDWEDTSMFSFLDARDKTAVISKRLKYFTNSDADGMTPVTMWIVGDFQKVSGRKLLLNALKHVKSRPGVRVGVINNPSGKPNEDNTVVYRAVWASLLTQKNKAAAEFVQKLLKEESSQLLQQGTKMKDLLMQGMDVDAFEKKFNTLEVDFIHSQQLFCGDVLKLRPGLQAVISNGRILGPFEEQEEFTVEDFHLLERITLSGSAEKVKAEVKQMGMKPKHASDLVMKVDALLAAAPKGEVRRDVQFKDTHSVLHLSPRENEVFYDVVAIVDPLTREAQKISSLLIVLSQVVNVRLQVFMNCRAKLSEMPLKSFYRFVLEPDVAFLANESASPGPVARFAELPESPLLTLNMITPESWMVQAVSSPHDLDNIHLQEVNGVVAAEFELEHLLLEGHCFDLSTGQPPRGLQFTLGMSQDPLMYDTIVMANLGYFQLKANPGAWTLRLRKGRSEEIYQILSHDGTDSPAEAADXIVVLNSFHSKIIKVRVQKKTEKINEDLLSETSESKGIWDSLVSVWSTFEKSITGGGSKKNDGEKKKEDVLNIFSVASGHLYERFLRIMMLSVLRHTNTPVKFWFLKNYLSPSFKETISHMAESYGFQYELVQYKWPRWLHQQTEKQRIIWGYKILFLDVLFPLAVDKIIFVDADQIVRADLKELKDLDLEGAPYGYTPFCDSRREMEGYRFWKTGYWASHLGHRKYHISALYVVDLKKFRKIAAGDRLRGQYQALSQDPNSLSNLDQDLPNNMIHQVAIKSLPQEWLWCETWCDDASKVTAKTIDLCNNPKTKEPKLTAAARIVPEWVEYDEEIKKLLRHIQDGAAQKQTPPPSRHKKDKGRDEL

SEQ ID NO: 3796 - protein, 1324 aa, Eremothecium sinecaudum
MVCINRYITNLQLDQLIAMLLLLTSLLAILIQRVFAGSYDSTRLWQSVGLVGISEINEWYGVITGANDENTIEDLFESLPNDHAKLLQLTYDLHPGYTEFAGEDDTGSLNWFELNNKKYVKPDDSFYLKSDELKAQSQISDNLVLQDGELVVGTNPTAPLVVFYGSAETGDFEDFNRNLYTEAIGGKIRLLWRPTGPAKPLSDLEVPNEYAYEYSINAESWGKEVQGDFDLPAEYSSEEYIVGDIKEGTESELAVVVASLISDYYEKTNDFHKTFEYARKIINNYPILMDKLTASPESLNKTSSYVEKISNLGITYDAIGVYLNYQHWKLSDLNPWNFIAAVTYELKMFKSLFSTLKGAFPDLEKEDVKSILQKYSEVGVMNLQHLQPARYDFHRIPGFSESVIYFCDIENDEIYANLSSDTNAFFQKSKFGELPEYKENWNEFIFVIDFDNLATKDTSEIFAGFKRALEVLELGYPQRIGLLPLFRGEPSEVVKHIYALKDEGLDSLKEFLQKFDPTQKIPEIEGNQLPPVSEILHNFGIKQNSVIVNGQIHPFTKNTWHYKVANIVKNDVNFVTSALKRVKDTKAREILHFHSLTARHPEYVTDYFEDNLYTIINGSVLDQIESRVLYLNKPSDALLHTITVVDDFNTGSAIEKIINLLSIKFTGVRVRLVHRGEELENWENLNKMIVAMTSNSMLIESLRTTMNKPPVPKTFDSETYRVLRQWLPSLSKEFIEADSYALLNGRYINLSNCGPLSVDIWEAIIQRESRRTLDFVAILQDVIPDLSERGVLPALVEESVSCLSKMFYGGSGIFDNGIEYTGEAKLPRLDILKLLDKGSLNNAISSGNEDALVDVTVIIDPVEERSQKFLHLVNFVKDLSFVNVNLLTIPTLNLSIIPNHRIYSDVKLDINDDNYYTFSRDLPSNVVGEASKNDYKPTAVVVEGHVFKEDTIISKSNVEGEIGVCLEIVNSRGNVISKGISMGAFGYVQFQLPSLEKNLSIRSCDSKYDVVSFSSNARSDYLPMDTFHVQDLSPKSIVIKVKPAPNNKALVRGPVKDNAIHVYVTIHDSFEASIFTQQLMAIVTALSPTTEVHFWISSYAEPPLALRNLMRYTTSRTNNRVVFSMVSYHWPKWLRPQRFLERRLDVMRILFLDVMFPEVEIEKLILFTIRTKEIPDIEALHKINSSACFIMKKHRGEGYWKHGYWKKFLKGNNLRFYDASSTFVVNMEAYRNKMAGEALRIHYQRLSADVKSLEDIDQDLLNSLQQQIKIKSLLSKETVPLLSTKEMGSWYSELLKFITPASEEIDNNENVDPDKEEDYLHDEL

SEQ ID NO: 3797 - protein, 265 aa, Lithobates catesbeianus
YGCFLFSFTGAVNTEVKGKKTDVLNIFSVASGHLYERFLRIMMLSVLRHTKTPTKFWFLKNYLSPRFTEIIPHMAEEYGFQYEFVQYKWPRWLHQQTEKQRIIWGYKILFLDVLFPLATDKIIFVDADQIVRTDLKELRDLDLGGAPYGYTPFCDSRKEMDGYRFWKSGYWASHLGHRKYHISALYVVDLKKFRKIAAGDRLRGQYQALSQDPNSLSNLDQDLPNNMIHQVSIKSLPQEWLWCETWCDDKSKERAKTIDLLLLLM

SEQ ID NO: 3798 - protein, 1655 aa, Musa acuminata
MRGSSFSRRKFERNLLRFEMELRCRSWVLGALFISLLFCGFGGSGCLGFAFNRRPKNVQVSLRAKWAGTSLLLESGELLAKERKDLFWEFINLWLEPDKGSDCLTARCCIQKIVDDGRTLLSEPLASVFEFSLTLRSASPRLVLYKQLAEESLASFPINDEINLVPITGEKQIPDEIEAYYLSTSTTTRTHGRHCCWVDTGSVLLFNTAELLAWIETSSNISVGYLEQPELFEFDHVYLASSIISPVAILYGAIGTECFKDFHIILAEASKQGKIKYVVRPVLPPGCQAVSSYCSAVGSSDAVNLGGYGVELALKNMEYKAMDDTTIKEGVTLEDPRTEDLSQEVRGFIFSKILERKPELTTEVMAFRDYLLSSTVSDTLEVWELKDLGHQTVQRIVHASDPLQSMQEINQNFPSIVSSLSRMKLNDSIKDEILANQRMVPPGKSLVALNGALINIEDIDLYLLMDLVQQELSFADHFSKLKLPLSAIQKLLSAAPPSESNAFRIDFRSGHVHYLNNLEEDAMYKRWRSNINEILMPVFPGQLRYIRKNLFHAVYVIDPATSCGAETIDMILSLHQSSIPMRFGIILYSSKLVKMIEENGGHLPSSAVQDDKKRTEDVSSLIIRLFLYVKENYDTQLAFQFLGNVNKLWNSGDDFGEENLEAHHVEGAFVDSLLSKAKSPPHDTLLKLEKELTYKEEADGSSLFVFKLGLSRLECCLLMNGLVYEANQEASINAMNEELPRIQEQVYYGHINSKTDVLEKFLSENGYRRYNPQILSEAKGHKKFSSLISSYVGTESILQDVHYLHSYASADDLKPVTHLLAIDITSRAGMKLLHEGINYLIGGSKRARVAMLLYSTAGASSTASHFVKAFDTAVSVFSDKERVLDFLEELCSFYEDQFMTASLLDYDNFSIFTDRVCELAAKFGLPSDYYNSTFSSFSVDVINKQMEKVSGFLHGQLGLEYGSNAVITNGRIFILKDGSPFLSDDLSLLESVEYELRIKYIYEIIDQVEWVDVDPDDLTSKFYSDLIMLVSSLLSTRERSSDRAHFEILNAKHSAVNLNTGNSSIHIDAVIDPLSPSGQKLSPLLRILWKCIRPSMRIVLNPVSSLADLPLKNYYRFVVPSLDDFSNVDYSVNGPKAFFSNMPLSKTLTMNLDVPEPWLVEPVVAIHDLDNILLENLGDLRTLQAVFELEALLLTGHCAEKDHDPPRGLQLILGTQRGPHLVDTLVMANLGYWQMKVSPGVWYLQLAPGRSADLYALKESGDGSPGNRSAKLITINDLRGKLVHLEVAKKRGKEHEELLNASDDQLLEKRKEGQNSWNTNILKWASEMIGSGGLSRKGETRLDHKKAGRQGETINIFSIASGHLYERFLKIMILSVLKNTQRPVKFWFIKNYLSPQFKDVIPHMAQEYGFQYELITYKWPTWLHKQKEKQRIIWAYKILFLDVIFPLSLRKVIFVDADQIVRADMGDLYDMDLKGRALAYTPFCDNNKEMDGYRFWRQGFWKDHLQGKPYHISALYVVDLMKFRQTAAGDTLRVYYETLSKDPNSLSNLDQDLPNYAQHTVPIFSLPQEWLWCESWCGNATKAKAKTIDLCNNPMTKEPKLQGARRIVPEWVDLDAEARQLTARILGEEVDSNEPVTSTSLPPDGPQNNHEKDEL

SEQ ID NO: 3799 - protein, 1515 aa, Microcebus murinus
MAPAKAANVVRLLLRSTALWLLLLGARTVSSSKALTAHLAAKWPETPLLLEASEFMAEESNEKFWQFLGTVQELAIYKQTESDYSYYNLILKKAGQFLDNLHINLLKFALSLRAYSPAIHMFQQIAADEPPPDGCNAFVVIHKKHTCKINEIKKLLKKATSRPRPYLFKVDHKFPTNKENLPVIILYAEMGTRAFSAFHKVLSEKAQNGEILYVLRHYIQKPSSRKMYLSGYGVELAIKSTEYKALDDTQVKTVVNTTVEGEAEANEVQGFLFGKLKEIYPALTDNLIAFQKYLIESNKEMMPLKVWELQDLSFQAASQIMSTPVYDAIKLMKDISQNFPIKARSLTRIAVNQHMREEIQENQKDLQDGFEIQPGDARLFINGLRIDIDVYDPFSILDMLKLEGKMMNGLRNLGINEEDTSKFLKLNPPVWEHTYVLDIRHSSIMWINDLENDGMYVTWPTSCQELLKPVFPGSIPTIRRNFHNLVLFIDPAQEYTLDFFKLAELFYFHKVPLRIGFVFILNTDDEVDGADDAGVALWRAFNYITEESDESEAFISVVHMYQKLKAQSILTVDNVKNVLQNKFPHASIWDILGIHSKFDKERKAGASFYKMTGLGPLPQALYNGEPFSHEEMNIKELEMAVLQRMMAASIYLQKDVFMGTLNDRTNAIDFLMDRKNVVPRINSLIFHTKRQYLNLISTSVTADIEDFSTFFFLDSQDKSAVIAKNMHYLTEKDDNVISAVTVWIIADFDKPSGRKLLFNALKHMRTSVHSRLGVIYNPTSKINEENTAISRGILAAFLTQKNSFLGSLLRKLAKEETATAIYSGDKIKTFFTEGMDKNTFEKKYNTIGVNIFRTHQLFCQDVLKLRPGEMGIVSNGRFLGPLDKDFYAEDFYLLEKITFSNSLEKIKGIVENMDINSKNMSDLVMKVDALVSSLPKRASRYDVTFLKENHSIIKINPQENDMFFDVIAIVDPLTRAAQKMAQLLVVLGKIINMKIKLFMNCRGKLSEAPLNSFYRFVLEPELMSGANGNPSLGPVAKFLDIPESPLLTLNMITPEGWLVETVQSNCDLDNIHLKDTERTITAEYELEYLLLEGYCFDTMTGQTPRGLQFTLGTKNKPVVVDTIVMAKLGYFQLKANPGAWILKLRKGKSEDIYQIVGHEGPDSQPDLEDVIVVLNSFKSKTLQVQVQKKPDKIKEDILTDKDETQKGVWDSIKSFTIGLHKKYKKEKDVLNIFSVASGHLYERFLRIMMLSVLRNTKTPVKFWFLKNYLSPAFKEIIPYMAKEYGFQYELVQYKWPHWLHQQTEKQRIIWGYKILFLDVLFPLSVDKIIFVDADQIVRHDLKELRDFDLDGAPYGYTPFCDSRREMDGYRFWKTGYWASHLIRRKYHISALYVVDLKKFRRIAAGDRLRGRYQALSQDPNSLSNLDQDLPNNMIYQVPIKSLPQDWLWCETWCDDASKQRAKTIDLCNNPKTKEPKLKAAARIVPEWVEYDAEIRQLLDHLENKKKKAILTHDEL

SEQ ID NO: 3800 - protein, 1510 aa, Coniella lustricola
MIRLSQLPWGLTASMLAATFLGSRTVSAGPSVDINMNAAFSSAPYLIELLETAAQENASSYFPLLDRIADGYFATTTTDKELYEAFLELLTSGGHIPSGESLSTFKLALSTRSAAPKIEAHYQYYRTGVEPSLSGDQAGCDAWVLWQGQKYCSPSLDQPQGQTATGQERNLPFDIALGHGPSCVLYADITSPNFGDFHKVLVQKARNRECAYKLRHRRSSSATLEPLPINGYGVELALKRTDYIVIDDRKAEADASQSAIASEIVLGEEEDMADLKPLSTSELRSLGLRASSFIMHSDSPFDTLLKLTQDFPKYSTSLATQNISDGFYVEHKANRASLAPAGVNLLWMNGVQLVERQIDAYTLVDLVRRERKMIQGVMDLGLTGEEAISLLAHEAVAEAKSDDTGVQRFVWHDAQEEGRVIVWLNNIEKDKRYEEFPHNIMTLLQGGMPGQLPSIRRDLFNLVVPVDLTQKNDTVTVVKQLQDFVKRKIPIRFGFVPLSSTEASERQAKVVYYLAETYGLAAMMHYLEASLEAGKTDDADKDLFDRAIADREAREDTTALSLTDVFSSERYAEQISFSKRWVERLRADGPNPVLFVDGVPVPREGNWMPAMGQQVGMDLQMLRQAVYYGEVEEGQWLPDFFLKDAFSRRNTVIFPDDPKDVKILDVNKMLIEHSILFEKIPVIEAYQDSTKENWAVLTLVVDFTTIEGLKLAVNALQFRTNNPGVRLDVVHNPVDAAGAHKINTALKMSQPDLLAADDEETLQMILDTSSSVPDDADYDTVLPRFLISAGIRPGQNVLILNGRLVGPIQSAADFAAQDFELLLEIEQDSRILPVYEAIEELGLTNKVSGPLAAAKVTSITALSSMSDVPEGIFERGAPLRNSAFNVWNSTHTAFEIGDKSTATIQFVASLNPASEQGQRWVPILKVLSELEGVYVKIFLNPKERMEELPVKRFYRYVLESAPSFDANGKVKTLHAEFKGVPSEALLNVGMDVPPAWLVASKVSVHDLDNLKLSSFKSNVEATYELENILIEGHSRESTGGLPRGAQLVLATEKDSHFADTIVMFNLGYFQFKANPGFYNIQLKQGRSSEIYHIESVGAKGYNAALGDEGTDVVLMDFKGTTLYPRINRKPGMEEEDVLDESGSESALDVVSKGFKSIFGVKTKSASDEEHAEINIFSVASGHLYERMLNIMMVSVMKNTKHTVKFWFIEQFLSPSFKEFIPYLAEEYGFKYEMVTYKWPHWLRQQKEKQREIWGYKILFLDVLFPLSLDKVIFVDADQIVRTDMYDLVQHDLEGKPYGFTPMCDSRTEMEGFRFWKQGYWANYLKGQPYHISALYVVDLRRFREIAAGDRLRQTYHSLSADPASLSNLDQDLPNHMQFQLPIHSLPQEWLWCETWCSDEAFSKARTIDLCNNPQTKEPKLDRARRQVPEWTLYDDEIAEVDRKRRLKSVESKDDADASQKIVRGDGKVLDETVDASAKNTKSRTFEEEPKSVAPTEKTNRKASEDVKDEL

SEQ ID NO: 3801 - protein, 1504 aa, Exserohilum turcica
MRASPAALGAKALLVLSALRHTGVLASPSINVALQAAFSPAPYLVELLETAAEENATAYYPILDRISEGYFDDKTTEQELYTAFVDLLQSDGHITQPEALSSFEFALSVRSAAPRIEAHYQFYNTSVEPSLAAEQTDACEIWASFHGKQYCSVHLDEPFGKIASERTYQLPFDRILGNTSALPAILYADITAPQFKKWHKTLSSTAKQGKTSYRVRHKPSSKAPASPLVVNGYGVALQLKRTDYIVIDDRQAAESDKNTAQKPMDTDLNSEEDVADLKPLSKDDVADLGLKAASFVTQSEQPMDTLLKLVQDFPKYSSIIASHNASDAFVEEHIKNREQLLPTGYNVIWINGVQVPTRDVNPYSLLAHLRRERKLVNGIRSQGLSGPEVISLLSHSAIAETQSESEPQRYDFRDATEGGDVIIWLNDIENDDRYENWPTDLRALLQRTFPGQMPSCRRDIHNAIVSVDFTSANDVTNLLETILNLVKRGIPIRWGLVPQTLTSEALAQAKIVYHLQEAYSITAMEVYLQSSLDNKKLAQPDKAIFDATVKTSTLREEQTSLTFEDVWNSEDIARRITGAKQYLQRLAAEGPGAPVFVNGVPVPATEEWLQTVSERISMDLREIQKGVFEGAFNEESWVPLYFVFQAASRRNPLIIPEKEQNITLINMAEFEEAHGDIYNKMPRVYASESASKSDWVHIALVADFDSENGLALLKSLADFREANPNVEAVLIHNPQAGAEQSKVSENILGASKTDGKLTIETLLELLARESKPVSFPAESRLFWKAAEPIYDAFGLKPGQHSLVVNGRHVGPIPEEYTFSKDDMETLISYETKKRTDPLSKALTELQILDKIQSPFDIAKIQSLVALSTVSDVPEGIFETASTLRLSTFNEWTAEHTAIIKGDKDKAVFQIVASVDPATELAQKWVPILKALSDMEGVHLRIFLNPKQMLQELPVKRFYRYVLEARPHFNSDGSVGSLGAHFSGIPKEALLNLGMDVPPSWLVAPIESIYDLDNIKLSTIPAGSNVDAVYGLESILIEGHSRDTTNAGQAPRGVEVVLETEKDPHFADTIIMANLGYLQFKANPGFYNIKLKSGRSQEVFNLDSAGPIGYAPQPGDETTEIALMSFQGATIFPRLSRKPGQETADVLAPEESLASELAGKSAQKVNKFLGKIGVNFDSEKVFKKGADLLLGGKAVTKGTQADINIFSVASGHLYERMLNIMMLSVMKHTKHTVKFWFIEQFLSPSFKSFVPHMAAEYGFEYEMVTYKWPHWLRGQTEKQREIWGYKILFLDVLFPLDLDKVIFVDADQIVRTDMYELVQHDLKGAPYGFTPMGDSRTEMEGFRFWKTGYWANFLRGRPYHISALYVVDLNRFRQLAAGDRLRQQYHALSADPNSLSNLDQDLPNNMQFNLPIHSLPQEWLWCETWCSDEDLAKAKTIDLCNNPQTKEPKLDRARRQIPEWNVYDEEIAALAKRVKGEQKLVDVQEQEQLREKKEKDAEKIQHNEL

SEQ ID NO: 3802 - protein, 1567 aa, Pterula gracilis
MTASMKPPLLLALSLLTYTYASPPVRVSLQPSWQAQPLLTELIETIALENSLSFFGLLDAVLDPSASPPVSSLSPEALYNYVLELASSTGALRLPAAKTRVELNLALRAAAPKTEAFYHHYQTTTPPNCGSWVDWYGQQVCTVKELAGLLESHETIEAELGADHSRSFARPKTLSFDHIRPPLSASTRPLRTAVLYSNLTSPNAHELHSYLLSHSQGAAPAVEYIFRPAPLHASDVDDQRKPALTGYGVSLDLKKMDYLAVDDRQLHQGSASSNEKNSAQAVVGEESVDHITELLDQYPSLYDTVNASHPLSGQELRVLGLQAIQLIQSSSSPLFTLKTLVQDFPRYAASVSRRVNLEERLIEEEVVANSQRITQGMNLMWINGAVVPPKDINPLGLLRVLDKERLISLSLQSLGLNVSQVSDLITHSAISAAQTTASSGVTSGLFDSSDRQEGEGTIIWWNDIEKDVRYAKWSSSIHQILRPIYPGQYHNLKINLFNVVFALDLSNTNALDFVSGSIYTIIARSFPFRFGVVPVVESEAGAKMARLFYHVVKTQDSQMALKFCKAISTNHLARESEPTFSDVDWTLVRSAYEDVLSEVPHDDFDTVVAGTEDGDVANAKAYAKRLSITLSESPKGQAFVNGRPITMDEKVLRALPQEVAKQLQHLQEKLYVGELTEDPAALATYFYDLPSTNARRNSYIYPDPSNPSSLRIFNLVEEYSKAGFSLSAGAFAAPHESESLPLTILVVADFDTAPGLELAIEALKSITPNSKARISLVHNPTEQTTSGKRDASKLIFNLMSSKLISRLSPQSVIEKLQNLDATSGVEAETYAAYVDTCKQLVWQLGMGKGSLGVVANGRVVGPIKEGDFGSGDFSALEGYELKARTEPVEEAVRSVMPASEQLDRSSFADLVSMASSIVASLQLPDPSESGLFDAPARPRARSYDVMDGEQTRFVVGNKQTAMYQVVLIMDPLSSSAQKWSSYLEWLLAIPDVYLEVYLHPSFYQEMPLKRFYRYNLQQALAFDDAGNEVYAEAVFEDLPTDPIYTMAMDVPSSWLVRPREAVYDLDNIQLGKLYPEDRDIGVTAVFGLDYLVVEGHAREAHNMSPPRGLQIQLLESDGSSIDDTQVVANLGYFQFKAKPGVFKLEIREGRGRQVYRMESVGSQGWESPDVESAGDEISVTNFEGLTLYPRLAKKAGMEMSDVLSYVEEEGVEEEGLFQTLTNKVFSIFGGSKGGSTDMVVKGSSQAEINIFTVASGLLYERFVGIMILSVLRNTNSTVKFWFIENFLSPSFLEFIPHMAREYNFDYELVTYKWPSWLRAQTEKQRIIWAYKILFLDVLFPMDLKKVIFVDADQIVRADLKELVDLDLHGAPYGYTPMGDDNYDMEGFRFWKTGYWAEFLRGKPYHISALYVVDLVRFRQTAAGDMLRGQYQQLSADPNSLANLDQDLPNNLQHQVPIFSLPEDWLWCETWCNKDRLDRAKTIDLCQNPLTKEPKLARARQIPEWEVYDSEIAQFARRLTDKGLVRSRISSADSNVLAAEGVVAPEESGATDVDAESAEESGVVRDEL

SEQ ID NO: 3803 - protein, 1486 aa, Colletotrichum salicis
MVRLSQLPVGFSLSLLAVVNVAAVPSVTVDMKAAFPSGPYLLELLETAAGENATAYFPLLDHIASGHFSEAKTDKEVYDKFLDTLNEDGHITTPDALSTFKLALSLRTAAPRIEAHYQYYRTAVEPKLGAETQDGCEIWAEQGGKQYCTPSLDSAKDSTLDGAKVLPFDRVLGSGKEAILYADPTSSSFGSFHKALAQKARNGEIEYRLRYTKPAGKYEEPLPVSGYGVELALKRTDYIVIDDREAHQDDSQKTVKTEEVLDAAEEVADLKPLSKSEVQELGLKAASFVMQSQNPFETLVKLSQDFPKFSTSIAAHNVSAEFLAEHQLNRQQLVPSGMNVLWMNGVQLIERQIEAFTIIDLLRRERKLIDGVRDLGFTGGQAVSLLGHPKVADSKSDEEPPRFDWTDDLEEEQVIMFLNDLEKDERYQDFPDQLTSLLQRVYPGQLPPIKRDIFNLIIPVDFSKMEDLSVVAQMNSFVQRKLPIRFGLVPLTPTEDAFQISKVLYYLLDNYGLDVFIEYLDAAMQASKTEKPDQGSFDKAIQDREPLPDADSKILSFAEVVESDELDGIVKLAKNWAKRLNANTPVPPVFINGIPVPRENNWLQAMSMKASSDLQAIQRAVYLGMVDEKSWIPDFFLEKAVKRRNTYIYPEDEKSLQVLDVNKIYTEYDGLFSKVPVIEAYSDSTKENWAVMTVVGDFNSDEGANLLLSALAFRRNNPGVRLDIVHNPSASASASGVNAALKNGGDKFAEAETLADIKDLLKAATSDSDAVFTAALSEFLSFAAVKTGSNVLILNGRVVGPFTENDPFQGDDFQFLLEFEQKARILPVYAAVDELGLTDKISGPLAAAKITSVTALSTISDLPAGIFESAPSLRVSAHDAWNSTYTAIEIGNLETSSIHLVGVLNPASEQAQRWAPILKVVSELEGVYLKLFLNPKDKIDELPVKRFFRYVLESEPTFDEAGKVRALEASFKSLPSEALLNAGMDVPPSWLVAPKVSPFDPDNIKLSSIKSNVHASYELESILIEGHSREGGQSQPPRGAQVVLGTEKEPHFADTLIMANLGYFQFKANPGFYNIELKEGRSTDIYTIDSIGAKGWAPVPGDEGTEVVLMDFQGTTLYPRLSRKPGQEESDVLAEPEDNSIVGRGLKFAEGILGKKKSASDEEHAEINIFSVASGHLYERMLNIMMVSVMNNTKHTVKFWFIEQFLSPSFKDFIPHMAKEYGFKYEMVTFKWPHWLRQQKEKQREIWGYKILFLDVLFPLSLDKVIFVDADQIVRTDMMSLVNHDLEGKPYGFTPMCDSRTEMEGFRFWKQGYWANYLRGQPYHISALYVVDLRRFRELAAGDRLRQTYHSLSADPNSLANLDQDLPNHMQFQIPIHSLPQEWLWCETWCSDESQRVAKTIDLCNNPQTKEPKLDRARRQVPEWTVYDDEIAALDRKRKGLPAEAPKVVVDESEQKPVVVKEVEKNTKSRNWEEPPSEQTHVRDEL

SEQ ID NO: 3804 - protein, 1485 aa, Chlorociboria aeruginascens
MGLFSLPWSLTGAVLASTYLHSISVAASPSINVGLKASFSSAPYLIELLETAADENATSYFPLLDRIADGYFEKASTDQELYEEFIQILRKDGHMTDPESLSSYQLALSMRSAAPRIEAHYQYYHTAVEPSLKTKQDSSCPSWVLFNGKQYCSPSLDESRGEIAGDLQILELQFDRILGNPTGPVSVLYADITSPTFGQFHKTLVKTAREGRTSYRIRHRKGLSSESKPLIIPGYGVELALKRTDYIVIDDRDEDNSIAAKTTSETVKFEDEEFADLKPLSSSELLSLGLKASSFIMQSSNPFDTLVKLSQDFPKYSSAVASHNASQEFLAEHEYNRGQLVPAGYSVWWMNGVRLIERQIEAESLLDTLRRERKLINGVRDLGLTGAEAIQLLSHKDIATVKAEDESQRYDWRDEIEGGKVIIWLNDIEKDKRYQDFPDTLSSMLQRTYPGQLPPVRKDIFNLVLPVDFNVPEDLQLVVGTLTSFVKRKLTLRIGLVPLIRTTHAEEQAMIIYHLLETYGLSGAVAYLEASFENKVTHPSKTSFNTAVEGRKLRGEKVALSFEDALQSEESRHRVDASKKWISRLSADSTIPPFFIDGAALPRDEGWLQAMSTQVTADLQAVQQAIFTETFTQETYIPSLFLLGSATRRNALIAPEDEKLLRFFDVNTIVGDNEGLLNTLPRIQADASSPKADWAHMIVIADISSEPGRNLILSAVTFRESNPSIELIIIHNPASTEPEAGFGNHLFAHVRDGSYKPFSDIAHLQTVLVSEGLGQADKDKKAAYQYWQAAESLVKSVSLLAGQNGILLNGRLVGPIPAETTLSQEDFEQLLSYERRKRITPAYSAMEALGLSDKIKDPLEGAKISSIVAISTVSDMPDGIFEQASTLRMSQFDVWNSSYTAIEVGDASTATIQMIVLVDPASEQGQRWIPLLKVFSELDGVYIKLFLNPKERLQELPVKRFYRYVLDSKPTFDEFGALIAPGASFSGVPQEALLTVGMNVPPSWLVAPKISVHDLDNIKLSSIKTDVDALYGLEHILIEGHSRELPGGAAPRGAQLVLGTEREPHFADTIIMSNLGYFQFKANPGFYKIGLQEGRSSEIFNIDSVGSKGWSPVPGDESTEVFLMSFQGTTLYPRISRKPNMELEDVLEAKPDSKLDFVSNGLKLAHGILSGKGKEVVVKDEQAEINIFSVASGHLYERMLNIMMVSVMKHTKHTVKFWFIEQFLSPSFKDFIPYVAAEYGFKYEMVTYKWPHWLRSQSEKQREIWGYKILFLDVLFPLSLDKVIFVDADQIVRTDMMDLVNHDLQGAPYGFTPMCDSRTEMEGFRFWKQGYWKNFLRGLPYHISALYVVDLKKFRQIAAGDRLRQQYHQLSADPGSLSNLDQDLPNHMQSMLPIHSLPQEWLWCETWCSDEALKEAKTIDLCNNPQTKEPKLDRARRQVPEWTVYDDEIAAVDRRRKGLGNVNGEEKNEKSRNHEETTKNKKDEL

SEQ ID NO: 3805 - protein, 1506 aa, Tetraodon nigroviridis
APKGVTASLKAKWNMTPFLLETSEFIAEGGNEKFWEFVDTVKELTVYKRGESVRSYYNLILKKAGQFLTDLQVSLLKFALSLRSYSPAIHASQQIAGDEPPPETCPAFVSIHGQRSCSTKEIKKLLKAAAGRPKPYLFKNDHIYPGANKTDVPVVILYAEIGTMKFTSFHNSLSKKAEEGTLVYVLRHFVVHPKPQKMLLSGYGVELAIKSTEYKAVDDTKVNDTKTAANAEDDDSEDVQGFLFRTLKKSHPELTEQLGELRRHLLESSNDMAPLKVWEMQDLSFQAAARIMSVPKFDSLKLMRELSQNFPSMARSLTRVTVKQEMRKEIEENQKHLSETIGVHPGDGELFINGLHIDLDIHNPFSLLDILRREGRILEGLYSLRITGEHQISLYPALYPAVPLCCSYLKLSFLLMLSHFLTSACNFQWMNDIENDPAYRSWPSGVQELLRATFPGVIRQIRRNFFNLVLFLDPVKEESVKLIKLAELFYKHKIPLRIGFVFVVNTEDEMDGLSDAGVGFYRLLNYIADEYDVPQALMSMLSVDVGETLTVETIAEYMKRKFPKANAKRILGVDSEYDDQRRDGALFYKKSGLGALPVALFNGVALSSDEMDPDELEAIILQRIMDTTTTFQRAVFTGQLTEGVNVVDYLMEQPNVVPRINPHILSTDGHYLDFTASPVVDEWEDATMFSYLDTRDKTAVLTKRMKYFTNNDEDGMSAVTVWIVGDFEKDSGRKLLLSALRHMKTDRGVRVGVIDNPSAKASEDNTLLYRAIWATLLTQKKKAAAEFVQKLLKEESSQLLQQGTKVKDLLIQGMDEDAFEKKFNTLEVDFIRSQQMFCQKVLKLSPGQQAVISNGRILGPFEDQEEFTVEDFHLLKKITLSGYAEKVQIKVKQMGLKQKQASDLVMKVDALLSAAPKGEVRRDVHFIKDSHSVLQLSPRENEVFYDVVAIVDPLTREAQKMSALLIALGQVVNMRLQVFMNCRAKLSELPLKSFYRFVLESDVSFLANDTVSPGPVARFVEIPESPLLTLNMITPESWIVQAVRSPHDLDNIHLQEVSQPLDHLVIFCLYSLLRWCFVLPCQVSGIVTAEYELEHLLLEGHCFDLSTGQPPRGLQFTLGMSQDPLTYDTIVMANLGYFQLKANPGAWILRLRKGRSEDIYQILTHDGTDSPADAGDVIVMLNSFHSKIIKVRVQKKADKINEDLLSENSESKGIWDSIASITAGGSHKDDAAKKEDLLNIFSVASGHLYERFLRIMMLSVLRHTKTPVKFWFLKNYLSPSFKDTISHMAQAYDFQYELVQYKWPRWLHQQTEKQRIIWGYKILFLDVLFPLAVDKIIFVDADQIVRADLKELRDLNLEGAPYGYTPFCDSRREMEGYRFWKTGYWASHLGQRRYHISALYVVDLKRFRKVAAGDRLRGQYQALSQDPNSLSNLDQDLPNNMIHQVAIKSLPQEWLWCETWCDDASKAGAKTIDLCNNPKTKEPKLTAAARIVPEWLEYDNEIKQLL

SEQ ID NO: 3806 - protein, 732 aa, Zea mays
MMEKVYTLAAETALPVDDYKAWFKSFSADTVLKGMDKLSDFLFGQLGLVFGSNAVITNGRVFIMNEGKSFLANDLGLLESMEYDLRTKYIFEIIEEVEFASVDPDDLTNQFYSDIAMLISSSMSVRERTSERAHFEILHAEHSAIKLNNANSSIHIDAVIDPLSPTGQKLAPLLRILWKQIQPSMRIVLNPISSLADLPLKNFYRFVLPSMDDFSSTDHSVHGPKAFFANMPLSKTLTMNIDVPEPWLVESVIAIHDLDNILLENLGDVRTLQAVFELEALLLTGHCMEKDRDPPRGLQFILGTKQRPHLVDTLVMANLGYWQMKVSPGVWYLQLAPGRSADLYELPPKLIAIDSLRGKLMHIEVQKKKGKEHEDLLNAADDYHFQEKTDNKGWNKNLLKWASSLITGDASSKSKADKTTDRKDARQGETINIFSVASGHLYERFLKIMILSVLKKTQRPVKFWFIKNYLSPQFKDVIPHMAREYEFEYELVTYKWPTWLHKQKEKQRIIWAYKILFLDVIFPLSLRKVIFVDADQIVRADMGELYDMNLKGRPLAYTPFCDNNKDMDGFRFWKQGFWKDHLRGRPYHISALYVVDLAKFRQTASGDTLRVFYEQLSKDPNSLSNLDQDLPNYAQHTVPIFSLPQEWLWCESWCGNATKARAKTIDLCNNPMTKEPKLQGARRIVPEWTGLDSEARQFTARILGDDVEPADATPPPSEAPKPEDDQDVKDEL

SEQ ID NO: 3807 - protein, 1485 aa, Trichuris suis
MDLLLLRMWRNVVQGGILPLLLVYFYAARPSSCRATQKNVIAYVQSKWADTPLVVEASEFMAHEGDGYFWKFIEVLGKNETDLGSATDEGIYERLIGIAKSVLDSKSRVKLFQFALAIRCHSPSVEMYRQLSLSLSGRPAGHVFVDVHGQLSSNINSLDELLSQAKQRSPAIFSFDHIYATRSNKAKKWTILYANLESNEFIAWHDLLKSRAIKGELNYVFRHLPRVGKGKVPLSGYSVELAIKSTEYKAQDDTKIRSKPTAGANLTDDGDEEEADLDGFNIRLLKLLHPELRDRLDEFKLHLLEADELAPLKVWQLQDLSFQAGQRVLLAAKEDVLHTLQELSQNFPLMARSISLTAVKPEFRSEVETNQEAFSEIGIEPGNSAMFINGLRIDLDEIDIFSLLDKLKKEERLLAGFFDMGFRKETQSLLYRISSETSWSKFALDYTQWLPDFVNDLENDPQYRQWGNSVQLLLQPYFPGMIRPIARNFFTLASFQLFREEKRDDFVICRVGLILATNPDKKISGYSDGGVALLNAYNFIKGDTSIERALKFVLHVYNRVPSGNVTPSDVIDVFKQKYPDEDLSNVFDVDSDYNSGRQRWAQFAQNSGLSKLPSVLLNGFPMADNDVTSDQFEEAVVLEVSQVTSELQKDVLEGKLTDGVDVQKFILNKPFVLPKLNPKVLATDNEALILTDVMEYKVRTVDELKELGRKQQNQYIVQSRRYLTKNDESVLRPVTLWVVANVATKDGRDLYLAAIRSLKQLPNERVGLIHNVAPNDRVGYAIASLIQACLKLPLHQAKVIITKMLEKQLKTIDELEKLDIHGVDWSFLRNELTKKGEDIVAIDSYYSTHILNIPSGKVGLIINGIILSDVTSKDFSSTEDFALIEKYLLSSGCKVIASQIRKWNVPHDDGRSSDLVMRVFSLLKAYGPDTKRQWVTPLMQNNSCVDILSKDMTSATFEVVAIVDPLSASAQQISHLLSTIGHVVNADIRLCMNCKPKLSDIPLKRFLRVAIPTQLEFNQDGSLKRQPVARFSILPQKQLFTLNVIAPHSWLVEATEAAYDLDNIKMSDAFTDVVGIFELEHLLLEGHCFDEVTGSPPRGLQFTLGTAEQPVMFDTIVMANLGYFQLKANPGAWLLRLREGRSKEIYKVNSLDGSQVANDEDMVVILDSFGGRTVKIKVAKKPDKYEEELLPTSGEEDEESSLWQSISKKFTSPKDDYDVLNIFSLASGHLYERFLRIMMLSVLKHAKSPVKFWLLKNYLSPHFKAFLPFMAKRYNFSYELVQYKWPRWLHQQTVKQRVMWGYKILFLDVLFPLDVKKIIFVDADQVVRTNLMDLMRLDLEGAPYGYTPFCDSRKEMEGYRFWKSGYWKQHLGDRKYHISALYVVDLKRFRQIAAGDRLRGQYHGLSKDPNSLSNLDQCNNPMTKEPKLQSAMRIIEEWRDYDAEIKKLLDEYDRQRGIDRSASNEEEEEEEPQQPSGPIPHGEEL

SEQ ID NO: 3808 - protein, 1453 aa, Malassezia sympodialis
MWWVPWAVLFAVFCSISRGRAENEVHVKLRHHWHNYSESALHAAPLLEMVEAVGQVWPHDFFHIVSRIWSKETADHFIHYTQKETFEWVKSAIIDYLAEQEVSQYREVLDEWHVNVAQHWSAASVEAHYQVYNTSKEIKALSPSCATFVHFNGRAICSPEEARLTLNQTVHGSPIAHPQDHAYPTLHPARYIAILYADPYSESFLNFHNMLMSLAEEQPFTYVLRWRPSVARVELRKSMPYISSFGTSLHLKKVDYLVLDDRQVDLQHSANKDSEHLEDPISEMRADLLRQLYQRSKTKSHPSIQEAVQIQSNLSAPDFIYLGQATSKFILESKDPLSTLLALTSDFPIYAAALSHYSAHVSKSDPIYALLNDHSTRFVQPGHSQFWINGISLSEEELDPQKLIERIQEERRLQATFNVPELGISPEGTEAILTSEPVTLAFGAQRPSIFLYDVSDEREAKSSPVGTRVIAWVNDLEDGTFSQWPQTVEQMVEYRWPSGFPLVARNFFQLVVQIDLGDPDALLFMNSMLDHSLTEMPLRWGVVPLLVNSESETLAQVLWYAVDHLRPHEISLLFKRLAQSTLNQVGRVDAARARAILGQMLSLNDMDEKDLLESFVKESHTSSSFRLRLSRLRDYLDRIFVVPRPDTFGTAYLNGQPVSLNENLFSDISQAMSYQLRLASHEIFTGQLDEDNMYESFFYHLEDTKSSRSMLRTMLEETKASLRPSRFVNFPHIFRQIGNLGDPLRHFVYSRNDSLISIRLVGDLDSESTLSEITVILDAMYPVVEPFRLSFVHTGSDEGFVSQWFLSAMYSGALSDISPQLLSEALKSPDRVAALTQLSSDYGMSLKAYSWKPIASAFLLASNIDHEQGITLLINGHILSGVTGLRTKDVKEALSWEQSTHVDALLEAVNVPLAPPDVRSQVMEFVLSAVGSAFTEILNKGRSFSPSSNRMPVSLALQAGADLCITQGDPSSSVHITGVLNPLDSKASYFASTLRMLSSMSGVRFTVRMNPSLRVTSLPLQKFSRFNMRVTPAFNSDGYEIAPATVFTGIPPRSVLTMQLHTPRSIVAMAEEALYDLDNLRLSDVTGVVEAIFSVNSILIEGHARADQEPTPSGLQLSLSTDDDSSSLDTIVMETLGYFQFRGQPGRWKLSIRPGVSSDLYEMKSVGAWGWQSPSVDVTGSYIVLNQLSGVLTFPIVRKRLGKEMDSLVAQVNELKNVSFKDHVKAKVNDMVSFVLGRRSLHADINIFTIASGHLYERMTYIMILSVLRHTKSTVKFWFIENFLSPSFKAYIPHLANAYHFKYELITFAWPSWLREQTEKQRMIWAYKILFLDVLFPLDLDRVIFVDADQIVRTDLKELIDMDLHGAPYGYPPMGDDSEDMDGYRFWKKGYWKSFLRGMTYHISALYVVDLKRFRYVGAGDILRRHYQRLTADKNSLANLDQDLPNHRKFIWN

SEQ ID NO: 3809 - protein, 1752 aa, Histoplasma capsulatum
MYSDYFMTAVRTGGPGADGISFLLIPRTEGIRTRKIEIGADGLSATTYIIFEDVRVPVEYLIGSEGQGFRYVMSNFNHERLWIAFQALRNARTCLQDAMAWAMKREAFGMKLIDQPVVRYKFGSMAKEVEALQAWTEQIVYELDHMSYQDGNRHLGGVTALLKVKGGQMNKFVADNCVQIMGGLGLTKTGQGSRIEAISRGTHSLIVPGGSEDVLIDLGVREALKLSAAKVKKGAKISIYVKDKTYYDVICYMAHGVKRSHLYGRLHYHNMIFRYYTFPWRLGGLVLFVAASLFTSHATGGPSVNVALQTSFNAAPYLVELLETAADENSTSYFPLLDRISEGTFTEITTEKGLYERFIQLLQEDGHLTHPESISSFKFALSLRSTAPRIEAHYQYYNTSVEPSLMIAQDAVCTVWAHYDGDQYCSPSLEYAQQSVSWDGCSPLFGGFHHQLMQQARDGQFSYRVRYRPASSATSRPLFVNGYGVELALKRTDYIVIDDRDAEQRVLKDTDTTKPELAPAEDLENEQPADLKPLSASEVSTLGVNAASFIMSSDDPFATLLRLSQDFPRHSSAIAGASRTSEFTQEFEQNKANHLQTGRNVIWVNGLQIEAQTVDTFSLLDHLRRERKLINGLRKFGLSARQAVDLLTNPTISKSLGTDDSIRYDYRDELEGGGVIVWLNDLEKDHRYEGWPRDLHSLFIMTAHGQLPPVRRDIHNVVFPVDLASSEDVSVVSQSLLRAIKARIPVRFGIVPLVHNENAQGQAKIVHHLLDTYGLGAVMNYLQASLSADKVGSPDQASFTAALENHELRKDRTPLTFEDVLSSDNYDPIISNTKSYLKRLAVEGDILPFFVNGATLMREGNFLQNMIAALSKDLEHLQRRVYEGDFEEDIWIPSHFLQEALQSRSPLLIPENPSEIQITDLNEICANHQNVFDTILRIPASVESDDPMLDWNSIILIADLDSGAGAELLSSLLELHKKHPGVEILLLHNGESSSTPEALSTRLYSIRNGRDLDLAVVTATLASRNDDSASDSAAASAYWNTVQFLAKEIGFGTSEIGMVVNSRILGPLPSSTILDTEDLESLLMYEHSKRIGVLARVASEMDLDSNILDPLSLSRMQAVLSLSVTSGISESIYNYGPSARTRVFEKWSGIHTAISVSNSDDPSINIVATIDPTTEEAQHWVPILKVLSELVGVSLKLFLNPREEIKELPIKRFYRHVLDVAPSFNEDGSLAKPQAVFHGIPGEALLNLGMDVPPAWLVAPKESIHDLDNLKLSTLRAGTNVDAIYELEHILIEGHSRDITQGGPPRGVQLLLGTEKSPHFADTIIMANLGYFQFKAQPGCWKITLKPGQSERIFHIDSVGGLGSKPTPGDESNDVALLSFQGKTLFPRISRKPGYENEDVLDEVNKPAAAAKVFLAKGLNFASGILHRLAGPAQGRHADINIFSVASGHLYERMLNIMMVSVMKHTKHSVKFWFIEQFLSPSFKSFLPHLAAEYGFSYEMVTYKWPHWLRAQTEKQRIIWGYKILFLDVLFPLSLDKVIFVDADQIVRTDMYELVTLDLEGAPYGFTPMCDSRTSMEGFRFWKQGYWKNFLRGLPYHISALYVVDLKRFRAIAAGDRLRGQYHTLSADPQSLSNLDQDLPNNMQRMLPIKSLPQDWLWCETWCSDESLATAKTIDLCNNPLTKEPKLDRARRQVHEWTVYDEEIAAVQRRVLEKEEKERMGAVIEGGDEEVPQNEGGDHGDGKNEKRKKDEL

SEQ ID NO: 3810 - protein, 1607 aa, Gymnopus luxurians
MFWLLHLLLLFGKSASASPPVKVSLRTSWPAPPFLVEVIEAVALENPKSFFPFLDRVTDPEIVSVTPNEAPEAIYSSALEVAKSIGLFSEPGALASVEINLALHAATPKIEAFYQYYGETVEPSGQHKECGSWVDWYGSVVCDVESLAQLAGLDTIDSTEGHSANYTRPKTLPFDHIYPPPASKLETPPRTAILYASIHSPNFRELHTYLWKLAKHAEPRIEYILRFVPPENVDASKRSYLTGYSVALDLKKMDYLALDDRHLGAAHINDQTRPEELETEDIAAADAILKLLDAYPENPAAPDANTPPTEEELHLLGFQASQLIMGSPNPLLTLKHLSQNFPRYVTTLARRVTINDNLALEIHENQLRVQSGLNVMWINGLHLTERDINAFGFLRLMKKEREIMLELTSLDLERGEAIELLTHPLVAAAQDSKDVLDGLVDASDRPEGGGVIIWWNDLEKDKRYNQWSSALTTLLRPMYPGQFPTLKLNLFNNVLVLDLSRPANMLFVAGTMHSIIERGFPFRFGVVPIAETEDGIKMARLVYFLLENFGRKLTMTFMKRAATPFTRPGAPDSFQWSEIRRDFDDLMAAEAQAGESEEKTNVEFEAIVSGTTPSVKSLDNVQAYAQRLSATLSAFPAGHGFINGKHYPFDENFLRNMQIETGRQLMHFQEELYAGHLTDDDSEKASTYFFDLPTTARRRNKYVVPSKETLDILSLPELLVGSGYGSGPASFIYPAETEVIPITMHIIADFNSKDGLDFIKEALLSMEKNSTARVAFVHNPSMPLDEEASQSLSMSSIFAHLVDSNQLSKVTPSQLLQALEGGKIATEVEEVTQQVPLSTVKAIKNALELDDLNSQKSAKNSNFLDSCRWFVSSVGLDPAQNAVLINGRVVGPITPKEFVAADFHALQEYELLKRIRPVLSALESIRPNLKSLDRASIAHIVSMASSIISAIQVPDPSEIGLFDAPKRPRSRNYQLLESSHTLFKLGDNSTALYQISAIVDPLSETAQKWSSLLQWLSHFPDTYIEVRLNPTQYSEVPLKRFFRYNLRNSLTFDESGQEVYSQTIFENLPIDPIYTLAMDVPSSWLVRPREALYDLDNIQLGKLAPEDSSVDTIFDLDHIVVEGHARDTTTQAPPRGLQLELDSSSVPIDDTLVVANLGYFQFKAKPGVFKLEIREGRGRDIFVTESVGNDGWDSPSVEAVGNEITVTSFEGLTLYPRFSRLPGMEREDVLAEEEEEEDSAGVFESVFSSVKSLFGAAEEKKEIVELANEQADINIFTVASGLLYERFVGIMILSVLRNTNSTVKFWFIENFLSPSFLEFIPHLAEAYNFKYELVTYKWPSWLRAQKEKQRIIWAYKILFLDVLFPMDLKKVIFVDADQIVRADLQELVDLDLHGAPYGYTPMGDDNEAMEGFRFWKTGYWKDFLEGRPYHISALYVVDLVRFRQIAAGDMLRGTYQQLSLDPNSLANLDQDLPNNLQREVPIYSLHEDWLWCETWCSKDRLHRAKTIDLCQNPLTKEPKLDRARQYPEWEEYDAEIARFARKLAEDGKIRSRIAAADANALAQTASGVAPDPAGAGDAEGADKGESGIEEERQAQGTEKTAEIRDEL

SEQ ID NO: 3811 - protein, 1951 aa, Temnothorax curvispinosus
MKGLIFCYILALCSSQLGADKKINKYVTTLINAKWNETPLVLEAAEYLSDENPIYFWKFIDSYSRRISNLVLATQKENYDVILELAKKYLSESEIAVFKLGLSLRIYSSRVEMFSQMAVNKNVSLYGCNNVVNVGGTFTCSLEDIDNLLEQDTWESIDTYDVDHRYLSTPESDKVMILYGQIGTPTFSDFHEKLKNIAETKGINYILRHYVKEREDKRLRLSGYGVELQMKSTEYKATDDSDIKDNTGKDSEVANDGMEEIEGINFMTLKKLHPDQQAELDKIQTYLLETSHEIGAFKVWQFQELSHQAAERIMKSPSAEALNILTDISQNFPMQAKSLIRTKVNSDMKKEMKLNQEIFMASLNIQPTDTALFINGLFFDLEAIDVLTLLESLRSELRVMEALHKIGFSNKKMSKLLALDLSGGTDNQNFAMDIRDSAINWINDIENDPRYSNWSPSLTELLRPTFPGMLRNIRRNLYNLVLIIDPLSEDSMPLITLAQSLYAHSAPLRVGFVFVTNYNTSVTGLMDASVAANNAYHYFADTRSPKEALHFLSELGNYIGNYADVDDVKKVIRSKDSSASIPYILGEESEYDVGRHLASDFIKRCGFKKFPQALLNGVPLTPNQINSESYEEAVLSTIMTQTPMLQKAVYRGEVTEGDDIIDFLMNQPNVMPRLNERILKVDKNAWLNLIGTIPEDDDYTKWSSQNLSTYLMKKMHYFFVPRRNMRHLYSFWVVADLKLLSGRQLLREALEYVESNTDARVSVIINAKDDANLKSDINKIVLAAISALPPEKAILYLRKILKEDNAALIANGNFEIEDESVAAILETQNSILSLHQHYVKTVLSMETGTRAVLCNARIIGPLDSSEEFTSEDFSLLERFSQSTYGEKLFMKLIKDQIFNEDEYEENNITDDTIMKITSLLVPRTQTRSRYDVPFHGDDHSVIKIPAANPDEVAFNFIAIVDPVSRGAQKLGPILKTLQQALNCNIKVFLNCVDKNSDMPLKSFYRFVLEPELQFTPEGDISGSIARFTKLPTSSLLTQYIHAPENWLVEVVRSVYDLDNIKLDNVAMGVHSEFELEYLLLEGHCFEAVMGNPPRGLQFTLGTEKQPVMVDTIVMANLGYFQLKANPGEWVLRLRQGRSAEIYDFTTVDGQDVIQNGNDVKVLISSLRSHVLKVKVSKKPDKARMDLLSDNENDSGLWNSISRTFTATDENEDKDEKLNIFSLASGHLYERFLKIMMLSVIKHTKTPVKFWFLKNYLSPTLKDFLPHMAKEYGFEYELVQYKWPRWLHQQTEKQRTIWGYKILFLDVLFPLNVKKIIFVDADQVVRADLKELATMDLGGAPYAYTPFCESRVEMDGFRFWKQGYWRNHLQGRAYHISALYVVDLKRFRRIAAGDRLRGQYQALSQDPNSLANLDQDLPNNMIHQVAIKTLPQEWLWCETWCDDASKKYAKTIDLCNNPMTKEAKLQAAMRILPEWVGYDEEIKTLQQKVENANRQTEKDSANPFSIARVPVSFALLLADGPSRTFHDMENSGAKSANIEFLTVVVEQNNRANEFKDKAIYGYGTSIPPNNNEDEESEMSPRKVIFCVHGKLSGCCTVVKGSGDENASADYQQNPTMSPEDHCHRERNEEIDKKARKKLLIASALCVIFMIAEIVGGVLSNSLAIATDAAHLLTDFASFMISLFSIWVAGRPATRKMPFGWYRAEVIGALTSVLLIWVVTGILFYLAIERIVHKDFELDATVMLITSAVGVAVNLVMGLSLHQHGHSHGGHSHDRGSDVESELDGDLKGEHQKRNINVRAAFIHVLGDFIQSIGVFIAALVIYFKPSWNIVDPICTFLFSVLVILTTVAIIKDVVNVLMEGIPKGFEYSQVENTFMQIDGVVKVHNLRIWALSLDKTALSAHLAIKPGASPQNILRTATRNIHDKYKFFEMTLQIEEFNERMENCKQCKALSQ

SEQ ID NO: 3812 - protein, 1370 aa, Oncorhynchus tshawytscha
  MOD_RES (198)..(198): Any amino acid
  MOD_RES (629)..(629): Any amino acid
  MOD_RES (637)..(637): Any amino acid
MADAGSYQAGFGPRMWQQCALLLFLSLLPVVSGEADSKAVTTSLTTKWASTPLLLEASEFLAEESQEMFWDFVEANQNIKGEHDDTDQAYYDLIVKRASALLSTVQLNMLKFALSLRAYSATVHSFQQIATNEPPPSGCSAFFNVHGEKSCDTEKLTALMETAAERPKPYLFKSDHRFPGSNPDTPVIILYAEIGSSXFTMFHQLMLSKVNKGLATYVLRHYLASPSSRRVYLSGYGVELAIKNQEYKAKDDTQVQGAEVNATLMGENDPVDEVQGFLFGKLKTLYPELKEQLKELRKHLVESTNEMAPLKVWQMQDLSFQTAARILAAPSSDALNVMRDLSQNFPTKARSITQTVVSSEIRKEMEENQKFFKGTLGLQPGDSALFINGLHIDLDTQDIFSVFEVLRSEARVMEGLRSLLIETPFIHDILKLNVQPSDSDYAVDIRNPAVNWINNLETDSRYGSWPYNVQELLRPTFPGVIRQIRKNFHNLVVILDPTHESSAELLNVAEMFYSNNIPLRQTWCGSAPGFNYITEELDAPAAFDTSSRREKSTAVANSMNYMTKKGMAPKDHHDDGYIRPVTFWVVGDFDQPSGRQLLYDAIRHMKTSNNVRLGLINNPSDSPSEENSXVARAIWAXMQTQTANNAKNYITKLAKEETAKALETGADVTQFTVGGMDVALFKSAFEGPKFDFLLSHAVYCRDVLKLGKGQRAVISNGRLIGPLEEGEVFNQDDFLLLESIILKTSGERIKSKVQQFGVEEDRASDLVMKIDSLLSSQPKGEARIEHAFADDRYSAIKIRPTEGEVYFDMVAVVDPVTRDAQKLAPLLLVLKKLVNVNLRVFMNCQSKLSDLPLKSFYRYVLEPEVLFQTDGSFSPGPLAKFLDMPQTPLFTLNLNTPESWMVESIRTRYDLDNIYLEEVDSIVAAEYELEHLLLEGHCFDVSTGQPPRGLQFTLGTPSDPVIVDTIVMANLGYFQLKANPGAWILKLRRGRSDEIYKIYSHDGTDSPADADDLIVVLNNFKSRIIKVKVQKRPEKFSEELLSDGTQENDSSFWESLTRGFTGGVKTEESKQEKDDVINIFSLASGHLYERFLRIMMLSVLKNTKTPVKFWFLKNYLSPAFKEFIPYMAEQYGFQYELVQYKWPRWLHQQTEKQRIIWGYKILFLDVLFPLSVDKFLFVDADQIVRTDLKELRDLDLEGAPYGYTPFCESRREMDGFRFWKSGYWASHLAGRKYHISALYVVDLKKFRKIAAGDRLRGQYQGLSQDPNSLSNLDQDLPNNMIHQVPIKSLPQEWLWCETWCDDNSKKKAKTIDLCNNPQTKEPKLQAAVRIVAEWSDYDQEIKRLQNRVQERGAENHTTQKDKPDDTHTEL

SEQ ID NO: 3813 - protein, 1614 aa, Fistulifera solaris
MKSPMAKHSIIFSNLLLCPLLLIVVWVVEGNDELHTMVSPLVNRELETSVVANHWPSTPHNVFCEAFVYHNREEKGVEFLDRLVEENLDRVMSDAIAAELVMKVTPLMGAAKQLLQLSLALRAQSPHCELYRGLARETLQQQQSHHLFLHPSDAFAVVDGEIVAVDTLSSFLVTKPQTAVKTIPKETIIPASGENAYVILYGNMGTPLFAATYRLLRNLKIPFVVRHMGAVDYEERNKSNATGLPLQGYGVWLDIRNVEYKVFDDQGNDLFHSDNEIMVDLTKDDLDVPPEFLSGVNLTALGLDKDKALVRKLWSAHHNQNLHSSLIPPVWRRRQLPLQATTAILNSATDPLVTLQQISQNLPSMASSLVHLEVPDNLRKAVEVLEESGALRPGLLYINGKPLPIDMASFNLFDILNVIQKEQRNLDEIAEMLKDLPQAALHDVQAAWMNGKRFLEGSAGDKKDAKSKTLRIDVARGWKNAVIYLNDVEKDSLYSRWPTSLHHMRMNMEYGGPPSVRRNLFTLLAVMDPIEDPENVALNLGLQLMQAAYPVRIGLLLVDTKHFQECSTFLSKQGTTTSEPCPIPSIFDTKSEPDISKATATTQTVHHLLLTAIRDLRAYPGGIFSYIEYIMSFLRDARSNNESVSIGQLLDFHGKLYQSLNLKPAEEAVSDATTSMKAGDKNDDVIAYGHSIKFAVQRGLKPGMGFVNGRPLPVNMADESINRLFGEEQNHMLSLISQGKITDTSPKSVYAYLLEGDNVYAKIHPLLIDQSSGPIPKFLNLNDSFGEEALCSPNKMTKDEADRVNATKFVIDGIFDFSTELGMAHAAAFLSVMKSLPDKNERVAYRILPSNIKAASTAICSIFAQASFVESDALETILDPKYKSLTTKQLLDKLVDLSPEARGKMLSNDGLCSSQKYLQRKTSANNLIVGNGRTFLLDDELVTLSDVEMLLSVQMASSRAVTRILSPYFPVESPQYFLSVARVVALVSEHAEASSRTRLRDIISDLDVRSKEDLRKLSLSWNNGPNENREALKVHLGAVLDPLSEAAQRLSSILLIARDHLQFAIDLVLLPKSVLDNESKIPLTSYYRFVADHRSFFNFESPVASFSNLPECHTLTVRMDVPEPWDVQQSWALQDTDNLLCDTKTRCGDGPLLNGKGSTKVVYELKSLLVFGQCFETKGTPPNGLHLTLNRDTEVGVQIKQPLVEVDMDGSIAESSSNQFIPTNRAEMNYSDTVVMKTVGYWQLRASPGIWELAIAEGSKGATMFDMVDGSARGGRLVVDPNNIPKEVRMPIIVQDFSNRGELLVLQRKSGFAESTSLFHSEENGVVEADDTIHVFSLATGHLYERFLKIMMLSVTKRTTSKVKFWLFENFLSPTFKQSAQAMARNIGCEVEFVTYKWPQWLRSQSEKQRIIWGYKILFLDVLFPQSVKKIIYVDADQVVRGDLKELWDMDLKGAPYGYTPFCSSRKETLGYQFWREGFWKNHLRGKPYHISALYVVDLEVFRRNLVGDTLRSIYQQLSADPNSLANLDQDLPNYAQHSVPIFSLPQEWLWCESWCSDESKANAKTIDLCNNPMHKEPKVSMAKRVIQGDLFHESWVELDAEVRQYEEEYALTE

SEQ ID NO: 3814 - protein, 1502 aa, Pestalotiopsis fici
MLRLFKLPGGLAAALLAAICLNAGNASAGPSVSVDMKAAFSAPPYLLELLETAAQENATAYFPLLDRIAGGHFADATTDKLLYEKFLETLQNDGHISSAEALSTFKLALSMRSAAPRIEAHYQYYDTGVAPTLEALDSNCKDWVLMEGKQYCSADLSEVKSSVESGSQGRILPFDRKLGRGPEAVLYADITKPEFGAFHTALSEMARKGKVSYQLRYRPERRELLEKLPVSGYGVELQLKRTDYIVIDDREAEAKEESTETANLKVNLDAEEEVTDLKPLSSSELSALGVKAASFIMQSDDPFNSLLKLTQDFPKYSASFAAHNESEDFLREHYFNRGQMVPQGMNVLWMNGVQLIERQIDPYTLVDLLRRERKLIKGVTDLGLTGKQAVSLLGNREVTIAKSNDEVGRFDWRDEIESGRVILWLNNIEKDKRYAEYPTSLMSLMQRTYPGQIPPIRKDLFNLIVPVDFTDPDDLSLVVEQLRAFITRLLPIRFGLVPLTSSPEAEQQAKVVYYLIENYGLASLMVYLEACNTGKQVTKVDQSKFEKAIKDRAPREEAQPLPYAEIFDSEYYAQQIEHAQHWVSRLNAGTPVPPIFLNGQAISREKNWLQEMSIKLGQDLQLIQQGIYMGQIDEDMWIPNIFLEGAPARRNVYIFPSKENQLTVLDVNKVYTEHDDLFSIVPVIEASPDSSKETWAALSVIADLTSEAGLKLLLSALDFRRNNPGVRLDIVHNPLNSEDGDRVNTAIKDNIEQLLGADTLETLRLLVAHDESRTTLESSFDIALSQFLGAANLPPSTQILLLNGRVIGPIANDVEWTEDDFQQLMDFEQTSRILPVYQAIEALNLTENVSGPLAAAKLTSITALSTISDLPEGIFESAPTLRTTIFDTWESAQTMISVGDESTASIHFVAVLNPASEQGQKWAPILKVLSELDGVYLRIFLNPRERIDELPVKRFYRYVLGSSPSFDAAGKVQSLGASFKGIPSEALLNLGMDVQPAWLVAAKDSIHDLDNLKLGSINTDVEATYELENVLIEGHSRDSTGSPPRGVQLQLGTESDPHFADTIIMANLGYFQFKANPGYYNIQLKEGRSSDIFTIISVGAHGYNAASGDEGTEVVLMDFQGTTLYPRLARQPGQELEDVLEESGSSGSDLLSRGLKFAEGILGGSKSKSKSVSDTEHAEINIFSVASGHLYERMLNIMMVSVMKNTKHTVKFWFIEQFLSPSFKEFIPHLAKEYGFKYEMVTYKWPHWLRQQKEKQREIWGYKILFLDVLFPLSLDKVIFVDADQIVRTDMIDLVNLDLEGAPYGFTPMCDSRTEMEGFRFWKQGYWANYLRGLPYHISALYVVDLRRFRELAAGDRLRQQYHTLSADPASLSNLDQDLPNHMQFHIPIHSLPQEWLWCETWCSDESQKEARTIDLCNNPQTKEPKLDRARRQVPEWTVYDDEIAAVAKRVKTHVLTGDEQQKVLGGDKVEVEKNIKSRRFEEEPEVKTRVLEDDGHVKDEL

SEQ ID NO: 3815 - protein, 1498 aa, Diaporthe helianthi
MIRLSQLPGGLLASLLAATLFKAQPICAGPSVEIAMKASFPSPPYMIELLETAAQENESSYFPLLDRIADGYFSELKTDAELYESFLSALQEDGFITSDEDLSILKLALSTRSAVPRIEAHYQYYQTGVEPTLQGEQAGCDAWVIWEGQQHCIPSLDAGQARGDVSERQDRDLPFDRSLGDGPSCILYADITSPRFAPFHKVLSEKALNRECNYKLRHRRLSHENLEQLPVSGYGVALQLKRTDYIVIDDRKAEEDASQKVIASEIVLDQEDEVTDLKPLSTSELSSLALKASSFIMQSEDPFGTLLKLTQDFPKHSSSLAAHNVSDEFYNEHKGNRAELVPAGTNVLWMNGVQLVERQMDAFTLVDLLRSERKLINGVTNLGLTGEEAIDLLTHQSVAAAKASDDAQRFVWHDGPEDGKVIVYLNNVEKDKRYEGFPKHLMSLLQGGGMPGQLPQIRRDIFNLVFPVDLTNEEDVTLVSKQLQEFVRRKLPVRFAIVPLAFTDASERQAKIIYNLVETYGLGAMMTYLQTAIEDKKTADADKAIFEMAITNRTVREDATALSFEDVLASEHHAEQTRLSKVWADRLRAHGPSPVFFVDGLPMPREGNWLPPMSQAIGMDLQMLRQALFYGEVNDDMWIPDFFLQNAAKRRNTVIFSNDPKDLKVLDVNKLHSEHADLFEMIPVLESYPDSTKENWAVLTLVLDLTSPEGVKLAASALQFRSNSPGIRLDIIHNPLESEEAYKINSALKASQSDLAAADSEELLKRVIDTSEGLTEANDLYDSALRRFLVTAAIRPGQNMLILNGRIVGPVASAEDFNADDFQLLLDIEQKARILPVYTAIEDLGLAEKVSSPLAAAKVTSITALSTMPDLPEGIFESGSPLRISAFNVWNSTHTAFEIGDKSKATIQLVAVIDPASEQGQRWVPILKVLSELSGVYLKVFINPKEKLEELPVKRFYRYVLDHAPVFDESGKVKSPAAEFKSLPSEALLNVAMDVPPAWLVAAKESVHDLDNLKLSSIKSDIEVVYELENILIEGHSRESTGTLPRGAQLALSTEKDAKVADTIVMFNLGYFQFKANPGFYNIQLKEGRSSDIYYIESVGAKGYSPVPGDEGTETALMNFMGTTLYPRINRKPGMEEADVLEETDQGGVFNAVSKGLKFGKDLFGVKTKSSSDEEHAEINIFSVASGHLYERMLNIMMLSVMKNTKHSVKFWFIEQFLSPAFKDFLPFMAEEYGFKYEMVTYKWPHWLRQQKEKQREIWGYKILFLDVLFPLSLDKVIFVDADQIVRTDMYNLVQHDLEGAVYGFTPMCDSRTEMEGFRFWKQGYWANYLRGQPYHISALYVVDLRRFRELAAGDRLRQTYHTLSADPNSLSNLDQDLPNHMQFQIPIHSLPQEWLWCETWCSDETFAEAKTIDLCNNPQTKEPKLDRARRQVPEWTPYDEEIAALDRRRKGVVDGDKEKVVRGDGEELKEPQEEKNSKSRAFEGEAPEATPHVKDEL

SEQ ID NO: 3816 - protein, 1556 aa, Drosophila virilis
MLRLVCVLLLTAGTLTILSPASVSVEAAESSQSYPITTLINAKWTQTPLYLEIAEYLADEQAGLFWDYVQAVTTLDTALNDYDTESKQYNAALQLVRSHLSVPQLPLLKLVVSMHSLTPRIQTHFQLADELRAAGACQGAIYAQVGTELACTYAELEQKLKLPHAASSLDAEVGSYSFDHVYPGSENNTRTVVLYGDLGSAAFRPYHKLLEKAANAGKVRYLLRHQLAERSGRPVRLSGYGVELHLKSTEYKSQDDAPKPEAGNGSTAEAEESTNETDVQGFDFKLLKSKHPTLKRALDQLRQRLLQGNDEIAQLKAWEFQDLGLQAAAAIAEIQGDEALQLLQYTAHNFPMLARTLLAHKVSDELRAEIKHNSESLGRSLNVAPPDGALFINGLFFDADTMDLYTVVETLRSEIRVLESLHGNNVHGRLASALLALDLNSANKREFAIDIRDTAVQWINDIEQDAQYRRWPPSVMDLLRPTFPGMLRNIRKNVFNLVLVVDPLQPEARSVIKLAESFVIHQAPIRLGLVFDARAEEDATAADYVAIACAFNYVSQQKDARAALSFLTDIYAAVGETETVTKQHIVKQLTKEFSSLSSTKAKELLGEESDYDYGRQLATEFVQRLGFGAVRQPQALLNGAPMPSNIISADSDFEEAIFTEIMSQTTALQKSVYRGELTDNDEMINYLMNQPHVMPRLNQRILSQEDVKYLDINGMPAKQLGNAAALNKLSNRDMTATLMANLKYFGGKQSTERIGRASLQFLTIWVFADLETPEGCELLTHALDYVRGSESVRLAFIPNTEGVSDKRSLNRLAWAAMHSLEPAKATDQVLKWLRQKKQRIEDIPKQMEDILGSTELHLKMLRVYAQRVLGLSKSQRLVIGNGRLYGPLGAAESFDSADFALLARYSDLQYGDKVREVLKESATEVDSDFNSDTLLKLYASLLPRQTKTRFKLPSDLKTDHSVVKLPAKQQTQPHFDIVAVLDPASRAAQKLTPILILLRQTLNCQLHLYLTPVAQHSDMPVKNFYRYVIESEVQFEANGARAEGPLAKFSGLPANPLLTQQLQVPENWLVEAVRAVYDLDNIKLHDIGGPVHSEFGLEYLLLEGHCFDAASGAPPRGLQLVLGTKSQPALVDTIVMANLGYFQLKANPGAWTLRLRDGKSTDIYAISHAEGPNTLHQQQTGAVQVLITSLRSHVTKLRVSKRPGMQHAELLSDDTAPSQSGIWNSIASSFGGNSGTPGTDEDTETINIFSVASGHLYERLLRIMMVSLLKHTKSPVKFWFLKNYLSPQFTDFLPHMAKEYNFQYELVQYKWPRWLHQQTEKQRTIWGYKILFLDVLFPLNVRKIIFVDADAIVRTDIKELYDLNLGGAPYAYTPFCDSRKEMEGFRFWKQGYWRSHLMGRRYHISALYVVDLKRFRKIAAGDRLRGQYQALSQDPNSLSNLDQDLPNNMIHQVAIKSLPDEWLWCQTWCSDSSFKSAKVIDLCNNPQTKEAKLTAAQRIVPEWKDYDAELKALLARIEDHENHNIGSNKDNTEDDEEEHVVVITEPPPPEYVHGEL

SEQ ID NO: 3817 - protein, 1303 aa, Trichomonas vaginalis
MISFVLFSLVSSTFRPDHEVVMSTVAPWDESPLFDHVLFFMTDFSKEFATSFLKEIILNHDQINNETYIWNTAYKILPSYHHAYLKSQIELGFYTLRGEMYREMARTKGGSNFPDLIVIGKKLDTKEISCHYLPSDEIDVQPFELQYGVPQSIVYANILNKEVANFVLNLIETNIPFSLRPTSKTGKFGVHLRGFGVEMRPFKYSMEYGVKDSIILESKNEVHLHKDETTENISGIPESFYDIQNEQYFSEKFTSWVEKHNDTDLVRLMRDFSNNYPLYINEILKTNVTNTSIKDLDRLYSLRYNGRMVSSINGRVVEPNNLDIFSLIDIINKERTSRQILRDEFKLNKTQLNKVFKSRKIDISVVFFDTRSKYVQWYDNVTEDPRFENYNDDFEIFYGPLYQMPRVRRALAQYVSFVDPTTFGGFYQLYWGSNLVEDGFPVNFGIVPSFNLGNKVSRRVAFAFYHLARNVNSSEAIQFLIDSFLIAGIDKKTNYANMATLATYSAAYKLHCNSKCLKWSKLHKLYAGSPELDMILETNKYISDTQVQIPSNFMNGKDIETKSGMQSIHYHAQMQITEIGRMIAQFGIKETDPFDSLDLISRNFFLAKTLDNKVLNYNPVSLKISSLTYDRQLEFLKFISNTKWDHIDEGKINNYYFLFCNESVNTSTFFSFAKKNRFNKSKFKVNPEIPHSLQSIFPQDRTTCTLVVNGRIYSDIDPNNEEFLQLVDDWNTYFVMDQIYPLSSNISCNFSEFNCYLSSLYIDWMSDDIVRRFQSDDMFNINNSLIYKTKESSTDIVWELLIDPTKRSFQRISSIINYVEKHDLARIHLCILPPLELNESFTTLTTYYRNTLDCDYAVFSFLNDTTTYSAMPDMPMSWVYESMRASTDLDNILLSELTTHSQEGVYVVTNLLVEGMCLTTQQDTASGTELQLTNEMNERESDTIVMQNGYYQLQGKPGIWNIELGGSRSASIFELSKSQVVIDSFVSPMKIIKVKYLPGKEGMEVNNVSSSDNYKTTDRVDVFSVASGHLYERLLKIMMLSVRKQSTHNVKFWIVKNFLSPTFKATLPIMSSKYNFSYQLVSYKWPTWLRPQYEKQRIIWGNKILFLDTIFPLDLERVIYIDSDQIVRTDLNELMRMDFHGAPYAFTPMCNSRNETEPFRFWKQGYWLEYLQGKPYHISALFAVDLVRYRDLSAGDQLRFHYQQLSADHGSLSNLDQDLPNYAQHTIPIFSLPQEWLWCETWCSDETMSTAKTIDLCNNPLTHAPKLRIAQTRIEEWPGFDSLARNISASPDDYQYQFFKNGI

SEQ ID NO: 3818 - protein, 1582 aa, Esox lucius
MCLLNITQTQVYTKDLSMTNITRTMRNVLLLSLLLLKVQYVQSTSKGVSASLKAKWSMTPFLLETSEFIAEDGNEKFWHFVDTVKELTIYKNGESVRSYYNLVIKKAGQFLTELQVNLLKFALSLRSYSPAVYASQKIASDEPPPEACLAFVSVHGQHGCSTKDLKKLLKAAAARPNPYLYKNDHKYPGLNGTDVPVVILYAEIGTKKFGSFHKVLAEKAAAGKLIYVLRHFVAEPKPQKMLLSGYGVELAIKSTEYKAVDDTQVKGTINTEEDDIDEVQGFLFGKLKKSHPNLQKQFGELRKYLLESTNDMAPLKVWELQDLSFQAAASIMSVPRFDALKLMRDLSQNFPSKARSLTRVAVNQEMRKEIEDNQKGLSETMGIHPGDGGLFINGLHIDLDVHNPFSILDTIRGEAKILEGLHNLGIKGDHLGKLLRLPMNPVEENYALDIRHPAITWINDIETDSMYRSWPSGVQELLRATFPGVIRQIRRNLFNLVLFLDPVQEESVELVKLAELFYKHKIPLRIGFVFVVNTDDKVDGNTDAGVAFFRLLNYIADEYDLSHALMSMVSLYHKVEIGETLSVNTVSAFIKKNFPKASASRILGEDSEYDDKRKAGALFYKKSGLGSLPLALFNGVPLSADEMDPDELETVILQRIMDTTNFFQRAVYMGQLTEGTDVVEHLMDQPNVVPRINPLVLSTDRTYLDLTASPVADEWEDTTMFSYLDYKDKTAVIAKRMKYFTKNDEDGINGVTVWIIGDFEKASGRRLLLNALKHMRASSGVRVGVIDNPSGRVASEDNTVIYRAVWSTLLTQKSRATLEFVQKILKEETVHLLQQGTKMKDLLAQGMDSDAFEKRFNTMEVDFIRSQQLFCREVLKLNAGQGVVVSNGRILGPFEDEEEFSVEDFHLLEKITLRSTAEKIKARIKQMGRKGKQASDLVMKVDALLAAAPKGEGRRDVRFVKDKHSVLNFAPREKEVFYDVVAIVDPLTRDAQKMSSLLIVLTQVVNVKLQVFMNCRAKLSEMPLKSFYRFVLESDVSFLANETVSAGPVARFLELPESPLLTLNMITPESWMVEAVRSPYDLDNIHLQEVKGVVMAEYELEHLLLEGHCFDLSTGQPPRGLQFTLGMSQDPLMQDTIVMANLGYFQLKANPGAWILNLRKGRSEDIYHIQSHDGTDSPADSGDVKVLLNSFHSKIIKVRVQKKADKMNEDLLTEATENKGLWDSIARRDGALGARLRYYSVRSNAKRMCFCRPRIWSTFEKSLTGGGSSSEDEDKKREDVLNIFSVASGHLYERFLRIMMLSVLQHTKTPVKFWFLKNYLSPSFKESIPYMAETYGFQYELVHYKWPRWLHQQTEKQRIIWGYKILFLDVLFPLAVDKIIFVDADQIVRADLKELRDLDLEGAPYGYTPFCDSRKEMEGYRFWKTGYWASHLGNRRYHISALYVVDLKKFRKIAAGDRLRGQYQALSQDPNSLSNLDQDLPNNMIHQVAIKSLPQEWLWCETWCDNASKTTAKTIDLCNNPKTKEPKLSAAVRIVPEWVDYDNEIKQLLTNVQKRKEEATQIQTQAHSLSSPEKTGSQRDEL

SEQ ID NO: 3819 - protein, 1585 aa, Ganoderma sinense
MLGALIPLLAWPILCASAGKPPVNVELRTSWQATPILLESLESVAIEEPSSFFHLLDGVTDPSVFPLSKDKSTPKHAHKHVFDIALAMDHLAAPGAYVAAEMHVALHSASPKLEAFYQYYNDHHAARKRAFGKRGEECESWVDWYGSIVCDAKTLARLVEMETLDPAEGDTKATCSTAPPAPKLLPFDHVLSDPARLLDLPPKTAVLYGTLDSPNFRELHSYLYAAARAPSPHLTYVFRPIPPPPSASSERTYLSGYGVALDLKKMDYLAVDDRLQSGSGGSHEEDSGTAVQDDEEVDPIVTLLQQYPIDESVDVALPLTEEELHEIDFQAAQLIYDAEDKHKLRTLKHLAQNFPRYAGALARRVAVFPALLAELAENQPRARGGVTMAWLNGVALDERDMTPSALLRLVRRERGVMAGLMGGRLGMSSKEGIEVLTHRAVARAQSEGGGPMDGLFDASDRAEGGGVVGYFNDFEKDERYDRWGRNLKIILRQMYPGQFPTLKLNLFNVVLAVDLSQLSSVDFIATTVQMLISRGLPFRWGVAPIVETEDGSRMARLFYFLMENFGGDETLAFFLNISQRDEPMESLKPTVDWALVRSAFKSLLERKAEDLAEDLGLETDLDKILEGTAGDLEKQRAYALRLGTSLASAPQGHAFFNGKHFDLDDDFLRYLQTESAEHLQHVQLKVYKGELTDEEHADGMATYFYDLPTTAKRRNAYVHPSAKAGAGDLRIFGLPDLIEANGLKSSPGAFVYPAESQQVPLTTYVVADFDSEEGAKFLKEALASVTPDSLSRLSFIHNLASSSTRGKSDALESPSRSIAQLIVSDTLSKVAPERLLEALQPKELEESTGEGKQAPFSLSLDELADAEGRVLTAVEHEQYLNACRLVLRQLELKPGEHAVIVNGRVVGPIKPGEFVAGDFETLAAYEHHRRVQPVVDALLEVHGASAEATREDFAELVSVASSIVSSIQQPDPSEAGLFNAPQRPRLRNYQRLSSTYTGFSIGDNSTAIYHFGLLLDPLSEVAQKYTALFEWLQEMPGVYIEFHINPTRFEELPLKRFYRYNIAPRLTFDDNGNEIHATTQFTQLPVEPIYTLAMDAPQSWLIRPKEALYDLDNIQLSKLSGKDRVSGLKAIFDLDYLVVEGHARESVSSAPPRGLQMQLVTSDSTPIADTLVMANLGYLQFKTKPGVYKLEIRPGRGREIFEMESVGNEGWNSPTVGEAGDEVTVTSFEGVTLYPRLATLPGKEGEDVLLATGAHAEEASVVENLMAKVTSLFGSKHKGETAVVPVGDGQAEINIFTVASGHLYERFASIMILSVLRHTKSSVKFWFIENFLSPDFLEFLPHFASEYGFQYELITYKWPSWLRAQTEKQRIIWAYKILFLDVLFPMDLKKVIFVDADQIVRTDLKELVELDLHGAPYGYTPMGDDNPDTEGFRFWKTGYWKDFLRGLPYHISALYVIDLVRFREIAAGDMLRGHYQQLSADPNSLANLDQDLPNNLQREVPIFSLPEDWLWCETWCSKDRLHRAKTIDLCQNPLTKEPKLDRARQIPEWEVYDGEIAAFARRLQSNQTSGSEDESAANPVKHVEL

SEQ ID NO: 3820 - protein, 1673 aa, Phytophthora kernoviae
MRPTTLLSAGLAALLVSVQPSTTSARGVHVNLTASWPSSPLFPLLETSEFLAEENPLYFWQFLERLQTRTTDVQKLGDDVDALGELAVNVAEDIAPESKNILELMLATRTYAVKVEMFRQLALDSGVRPCGDDAETWAVYYHEAHCVEAVACSLDELAVLLHGETQTSESCVAAGVNDVELQVDHKYPHVESGNNPASVILYGLLGTPTFHAFHEKLVVQAKSNKIQYMVRHYPRDSPLDTLLQGYGVALDIKNMEYKTIDDSKKTEEEDGIVDDEEDEDDEDDDAIDDEEVEGLLFKPLMARHDAIAGELKQFYDVLIKKADNEQEEELKAWHLKDLGVSAARAIVDAKDPLKKLQTLSQDFPLQARKLAFSRRTLTSEFRGEIENSRAQIAFKRLKNKFILNGIAVDPTELSFNVFDFMKTLKEEWSVAKQLNGLPLNQSELENMLEHVRETSSEQPTVRINVRGSMGGSTPLYLNNIETDPNFANWSPDVNTLRRPSWNLIFLRKNMYECVLALDPLTSTGRSALSHIGFMRMRGAPVQWGLLVSSKELMASKTPDDRRALLETYKSLTTKAKATAWHFAKLLMLAQSKDVAEAGITDEENEEALDDAEETSKEASEQKEPKDQIIPTKIASAFIQHVGDDGNTDVLIENLLDAYANAAKVIGTTEENGVEARECLQSDRYDDEILSMTEYIHLKHVPLNSFLFNGVLQKNLDIQKSMMGNFGRDQPLYVALAHQGMLDDDMDLVEELMTSQDAYPAYLSVFEKSEAKHPGDIEVTSPKHLFADDVDGRLEDAIKTAISYLHAPGSRSLPKKQTVIFPADLNDPRDAGHVFQAVKAVLQDSEQALRIGIVHELSTAGKKKQSDSSVGELVAAILDTVGDSDNEVYLKFVLEALSCVVKKKTADATQAKLVGVWNKLTEDNKKQDPTSKKILALLRGKPKTWLTSKHRDALTQCNALLRSRFPPVFAEDIEEKTADKTLPHLFINGQRVNLPSQALSDEDVATIVSFDFKYRTQPVSKALVKRSAHLTIEEADNLSFAIMKTTGIVDKYVVTPRTSRYNVAENSLNTVRLSGDPSLQVAAYIDPLSEAAQKISPMLRMLHTQLNATIELVLVPADEITEFPLQRFYRYLFDKKTSLVATSVEFRKLPVHPILTMKIDTPEAWNVQILQAGDDLDNLRVDPNSPAEVKSTTSAVFQLENLLVYGQCRDMTFNMYSPPNGLQLVLDREVGAKLIHRDTLVMKNLGYFQLQATPGVWSLHLARGRAADLFDIIDPDTDLPLETQPIVVYDFGSHISQLIVRKKDGMENEELLQLTEEDDLSSDKPKSTSKSSDSTSAKDAGALRSYWNSMLSMMGKEGDGTTNKQQAAVADGDDASPSTTSDESALASPKVRTGETIHVFSLASGHLYERFVKIMMSSVLKRTNNPVTFWLLENFLSPDFKKAVPVLREQFGMDIRLVTYKWPNWLRQQTEKQRIIWGYKILFLDVLFPLGVQKIIYVDADQVVRADLKELWELDMQGKPYGYTPFCDSRNVGFQFWRQGYWKDHLRGKPYHISALYVVDLALFRQTAAGDMLRAVYSQLSADPNSLSNLDQDLPNYAQHQIPIFSLPQEWLWCESWCSDETKATAKTIDLCNNPKHKEPKLDMAKRVIAGELFNESWIELDQEIKDAEAKHTA

SEQ ID NO: 3821 - protein, 1592 aa, Agaricus bisporus
MAWALAVLGACLALQHANAGSPPVRVSLTPSWPDPPVVAEVLESVALVNPDGFFQLLDQVTDPDASIFAQSSTPQSLYQSGISSAVTHGVIQGAGDLAEVHMNLYLHAATPKLEAFYQHYEDRHKDSTGTVCGSWVDWYGQVVCDLESLVQLVERQLYPRPKILTFDHIHPSHSTTIDRPHRTAILYATLDSENFRGLHSYLYSEANKPEPRIQYVLRHVPPQGPRSKLNYLSGYGVSLDLKKMDYLAIDDRYSSEKHSQVDDKDSSRNMDDVFSLIQAHPENETLIDAKATLTEEEFNTIGYKAVQLIAESTNSLQTVTTLSQNFPKYATSLSRRVQVNSSIEEELGKKARKIAPGANYFWFNGQTVAPRDVHVFGLMNLLKKEKSLMKQLIGLGLERSEALEVMTHAEVTSAQKDGLVTDGLLDASDRPEKGDVIVWFNDIENDPKYMRGNPSVRGVLQAYPGSMPNVRRNLFNIILVLDLRQSSNIQLIGTLVYNVVSKGLPYRFGLVPLIENEDSLKMAKVISYMLKNFGWKITTNLCQSIANPTTIYEDHPEKVPEYVSLETVKGTYIALMSNEMDKSQFLPFDDLVGDKKFARPAFTIPTDKITRYVERLGAGTKQSASGRGHVFFNGKPLPLNAVLADALQAEAGQQLQYLQEKVYLNIVTDETHPDISTYFYDLPTTQKRRNQYIVPSTSKVKVVSVPEVLTKSGLDGVLEGGSWMYPSKSFYVKPVIVSLFVVADFDSEEGKETLKQALEFLAQTSESRVTFLHNPSATPNDSTRTSISSTLAHLISTHTLSKVTSQKLSEALDLSMTVTTGESDKQAPLDIVDIEDKFDSDSYGRYVKASRLAARALGIKGGETGIVINGRVIAPLGKDQFSTADFVSVVNFENKRRAVAVADALRSVKNGVDELDGTSYANLVSMLTSTIGASQQPDPSEVGLFDTPPRPRSRNYQILDSEYTAIKIGNNETALYHVAVVMDPLSLLAQKWSSLLQWLSTVPDVFVEIHMNPGRYTEMPLKRFYRYNVIPHATLSFDKATGNEIPSEVVFDDLPIDPIYTLAMDVPPSWLVRPRVALYDLDNILLTQLSPEDKSVDATFSLDYLVVEGHARNTKTLEPPRGVQLELVKTSDKTPIDDTLVVANLGYLQFKAKPGVFQLQIREGRGRKIFEMESVGNEGWNSPSVKEAGDEIVLDSFEGSTLYPRLERLPGMEWEDVLDEEENSEASVMGSFTNKFMSMFGKEEKGMTAVEEQADINIFTVASGLLYERFASIMILSVLRNTKSSVKFWFIENFLSPSFLEFIPHMAEKYGFKYELVTYKWPSWLRAQSEKQRIIWAYKILFLDVLFPMDLKKVVFVDADQIVRADLQELVDLDLQGAPYAFTPMGDDNTAMEGFRFWKTGYWKDFLQGLPYHISALYVIDLWKFRQMTAGDILRGQYQALSMDPNSLSNLDQDLPNNLQRQVPIFSLHEDWLWCETWCNKDRLDRAKTIDLCQNPLTKEPKLSRARQIPEWEEYDSEIAHFARELAKEGKIRSRFATADADVLASASAALVTDEILPVMGEPDYMEEYEDTDAPEEPSAAEESKISGRDEL

SEQ ID NO: 3822 - protein, 1370 aa, Chondrus crispus
MSEKCNYELKPKIVIYADLDSKEFASWLREVEDVVGHCEYHFLLRFWLPSRMNPESDDLRPSLQGFTVQAALKNTEYKVIDDRVFSTKLFQDCRYGETACDSPAPEFENDEYEWSEANSNASEEYTGLQAFRFLTRSDKGDLDDALKRLQAFTEDTPSVLSSNRFTDQESYDKTEEKRVLAAVRRFREQFGENDCLFINDRSFDVGSLTQGTEELLRCLSVTSVAEMKLRMLSEENGEHRIPIQTSGPSSDSSNRLRVNLDVQNSLKSSLVWVNDLLKDSRYRKWKPLNVRSEDDVMGFKTEVKRTRSDKGSDEDHLQLVKVKAHHLSLTILLDPGDPQQFPYTGIPQSVVHADLPIHVGMALIPNGQVSSLITATFHYFLRMKGRKTGFRFLQMIQQILQYMGGGYQQVELSEQVVELAFKQIAPEIEGGYGSARETLDGDEEIGGILDEARTFAEENGLLANASRAKDRSKENDSKLFSMLGIFNGIVLKDISADVIRIAIVEQERISALLGSSSLESDLVDSKIGGWVEADSSLIVVESLSEEMKAGDERVSQIKTKGELTRISGTVLFSVRHELEELRYEQSVSSGNVKREPMITVWLVASDQSSTEFKSASSLMNQLAKSKFAERTRSRFALINPELLLHRKALEASSNGDGLADIVFVINGRILPFSKAPSLGELKTEVASEYKDMPPAQRSADTELIRSMLMKDVAQACTSQQSSAAGTGHVDFGDFANAVSSSNLSEYMFSSEGDQKRQADTALRISAVVNPIGQRPYILSSLLMAMREVYGRKDMFMTLAIVPLEKQMQMKHHVSSTYSKFVLGIPQTSDAVGGIANRLTALFRRLPIARVLTFAVIPPRPWFVSSYSTNYDMDNVLLPTSGAKRLHAEYEIKSLIVEGSCIDEDDKPPQGLKLILENGNGISVDTLVMANLGYFQLKVPTPGRWFLRLAPGPSAEIFSLRIMEMYTGMVKSIYTVDSEGRVPILVASLSGAGGILLRVERKPGMENMSVLDPNRIKGDTKSLTERLKTSISSMYKVTAPKSSPVRILERDGGYIHVFSVASGHLYERFLKIMMSSVTRHASRPVKFWLLENYLSPSFKKMLPLFAKQLGCEVGMVTYKWPGWLRAQTEKQRIIWAYKILFLDVLFPLDVSRVIFVDSDQVARGDLAELMDIDLEGAPYGYVPFCDSRKEVEGYRFWKQGFWKETLRGAKYRISALYVVDLARFRETAAGDTLRYIYQSLSADPNSLSNLDQDLPNYASAGSLGAGASVPIFDLPAEWLWCESWCDDESKKTAKTIDLCNNPMTKEPKLESAKRIISEWEEYDDAASRMTEEIYERLAGATVDLTIQTSRVGTCDAKGPCTPPEDTAKDEL

SEQ ID NO: 3823 - protein, 1722 aa, Bremia lactucae
MRRQVHNRGPHATGAHLPLGRHLTVRIRIAHDKTAEQEHGIDSLQMVLYLKQIHVEHQSSFRKTMRRSTWLGTVLAALLAAVPPLMVYARGVHVKLKASWPTSPFFPLMETSEFLADENPLYFWQFLEQLEERTSYVELMSSDVDALAELAVVVAEFVAPGLQNVLELMLATRTYSVKVEMFRQLGLDSGVRPCGVYADTWAVFYREPHCVEAVACSVVDLDDSLRNMKQKISKKTCIAAGFNDIELRVDHKYPCVASTNEEITPMTAILYGLVGTTSFHAFHSTLVNEAKQSKIQYIVRHYPRDSPLETLLQGYGVALDIKNMEYKTIDDSRMAGGDETAANGENEVDEDEDKDIDDEEVSGFLFKPLLARHVAIAFKLKQFHDMLVKKSEQDQELRAWHLKDLGASAVRAIVDAKNSLKRLETLSQDFPIQAKRLAFSQKLISTELREEIASTRMQASMRGLTNKFIMNGIAIDPTERSFNVFDFMKTLKTEWSVAKQLASLTLNQTELEDMLTHVRETNQEQPIVRIHVRGSMDGTTPLYLNNIETDANSADWPSDINVLKRPAWSLIFLRKNMYECVLVMDPLTGTGRAALSHVEFLQARNAPIQWALLISSKELIASNTFDERQALVEKYKTLKGTDKANPWHFTKLLMLAQAKEKCSKVTIDGEKKQAKGGDDDTSNEKEKVDQVRSMKIVSGFLQRVGNDDSSIILIDRLVEAYAEAAAEIGSPEENEDEAMACLSSDQFDEEVLSMTEFIILKHLPLNSFIFNGVIQKDLDIQGAIMANFGRDQPLYINMAYRDMLNNEMDLIEQLLMEQNAYFAYLSIFESSRDRLGDKEVDLPNHLVADDVDGRLKAAAQQAISYLHPRGSRNLPKKQTVIFPVYLNDPRDADHAYRVVKAVLEDSDKSLRVGIVPQISSDVKSEGVGELLAAILAITGDSDNEVYLKFVLEALTCIVKKKSVEASRGKLKEIWKGTADSRDENDSIYIKVLTLLSQKPGKWLSTKQRGVLTRFNALLRSRFPSTFTDESLSKSALPYIFVNGRQVDLPRHSLSDEDVATILSFDLKHRSQPVAKALIKRSATLNAKEADKLSFSIMKTTGIVDKYVKIDRTSRMEVNENSLNTVRLDGDPSLQVTAYVDPLSEAAQVMSSLLCMLHSQLNASIELVLIPANEYASFPLQRFYRYLFDKKLSLAETSVEFRKLPVQPILTMKIDTPEAWNVQTFLAGDDLDNLRVDPESLAAVRSTTRAVFQLESLLVYGQCSDITFNMYSPPNGLQLVLEREVGAQLLHRDTLVMQNLGYFQLQATPGVWSLHLAEGRAAKLFDIINSDTELRLEARPITVFDFGSHMHQFLVRKKAGMEHEVLLQSIEDAVSEDTTKTDSNTLSSSHGEGALRSYWNSLLNVMGKNDDNLDTISQAAVKEVNETSAVHQNSTSLPQKRRTGETIHVFSVASGYLYERFVKIMMSSVLKRTNNPVTFWLLENFLSPDFKKSIPILREQLGMDIRLVTYKWPNWLRQQTEKQRIIWGYKILFLDVLFPLGVQKIIYVDADQVVRADLKELWELDLEGKPYGYTPFCNSRNIGFQFWRQGFWKDHLRGKPYHISALYVVDLALFRQMAAGDMLRAVYSQLSADPNSLANLDQDLPNYVQNQIPIFSLPQEWLWCESWCSDETKATAKTIDLCNNPQHKEPKLDMAKRIINGELFDESWTELDQEIKDAEGKHA

SEQ ID NO: 3824 - protein, 1539 aa, Penaeus vannamei
FKDIIILKVRQINAMREILGPLLGLLCFLLTGTTVKCQGKVKPVTTHLSAKWSHTPLLLETAEYMREESIATFWEFVEAVSQKDFTLFTKGSDKAAYNEILGTAGQFLSPSQVSILKLSLSMRVYSPKIEMFRQIALDRNLPTGEDCIAVFDVNGELTCNIEAMKKLVEVGSGTKPVSYDMDHHYPGGENSKVGVTLYAELGTKEFRIHHLAVKELVGLGKIDYVLRPYIKGNSKKKVRLSGYGVELAIKSTEYKAQDDTKVQDDGGRQEEDDEQEVEVEGFLFSKLESLHPEKMEELEQLRNHLVESRHEMAPMKVWQLQHLSMQAAQRIMTTPREEQLSVFVHTAQNFPMLARSLVRTKVDDKMKREILKNQNQLSAQMDVNPSDAALFINGMYFDMDFTDIYTLLDHIRTEDRVMGGLYKLGVPGESLSTLLNIDLSESKQDYGIDIRDTAIVWMNDIENDRAYSKWSSSVGELLRPTYPGMLRSIRKNFHNLVIVAEPEKATTADLIRLVEGFLTHNAPVRIGIVMSVNPDQTLRGYDDAGVAMLCAFNYVAQNLEGREDANYKALQFLVDLYSNVQGDITVDDVTSHFKSKYRSVDLEDVFGEDSDYDVGRMLAQEFVEKAGITSLPQALMNGVPLPEKHLNADEFEEVVLMDVMRTTQTLQRAVYKGQLEDKHDVVDWLMSLPNIMPRLNERILSTKNSKFIDLTGTSGETLSSVPVESFATQKAPEMTATLANSCRYITTKNDHTLRPLTVWIVGDFDTYEGRAILLEGVKYLRESNSIRICAIHNTDLSSESPKLFSRAVEVAQTTLPPAVARQFLAKVLEKDNAKKIIAGTKKWKDFEIAGLDIDAFTSRMNSFKDSVFKAHSVFCKKVLALSPGQRTVVANGRHLGTFKATEKFVMEDFGLLEKYVHSTFGEKLTEVLIGEDPPVNSDISDLTMKVAGVLQTKPQSKGRTTVNLRSDQYSVVKIPARNPNMPVFDIVAVCDPVSNAAQKIGPILMVLQEIVNAEIRVVLNAREKHSEMPLRRFYRYVLEPEPQFTEAGDMTAGPYARFTGLPESSILTLNYHAPENWLVEVVKSVYDLDNIKLDLVETGVHSEFELEHLLLEGHCFEQSSGNPPRGLQFTLGNRQQPVLVDTIVMANLGYFQLKANPGAWLLRLRQGRSADIYTIASHEGTDTPVGSEDVEIIISSFRSHVVKVRVGKQPGKQHLELLADENEESGGLWNSITSTFSSSGAKEDETEKVNIFSVASGHLYERFLRIMMVSVRRHTKAPVKFWFLKNFLSPNFKDILPLLAKEYGFEYELVQYKWPRWLHQQTEKQRIIWGYKILFLDVLFPLDVKKIIFVDADQVVRADVKDLNNEELDGAPYGFVPFCESRKEIEGFRFWKQGYWRNHLAGRKYHISALFVVDLKKFRRIAAGDRLRGQYQGLSQDPNSLSNLDQDLPNNMIHQVRIKSLPQDWLWCESWCDDESKKSAKIIDLCNNPMTKEAKLVAAQRIIPEWTEYDNEIKAVLKGFKENKSYTEEQPSQSPHIEL

SEQ ID NO: 3825 - protein, 1532 aa, Brugia malayi
MKSLWLFIIMKSLWLFIILSAFPKMIHSSPSKKSVITSLHAKWSQTSFIAEASEFMAQESDTLFWAYIDEIVEKLNVDEWHTYSDAKQYDLAVRLASYLLEETRMNLLKFALSLRAHSPTVLLFQRLGTERKKSCAAFADVHGTLTCDVNDLEKVIESDDRGPVPTVYSIDHVFPVSKEHNVTLIIYGELATPSWRKFHLAAKALSRSGKVKYVLRHFVKDIRDDKPLLSGYGVELAIKSTEYKAVDDSNAVTDKVAVEESSEEYIDNEEDNYGFNFNTLRRLHSDLKESIGQFRLHLLERDELTPLKVWQVQELSYQAAQKIVQADPQKAINIMVDSSQNFPLAARSLSRQIVRKEFISEVSANQEQLMEYGISEGESTFFINGIMVDIDALDVFQVLNVLKQEEKLANGFFHMGIKNEYLSILMDLELNSERVSYALDFRPAFPEYLNNLDTDKQYRQWANSVGLLLQPYFPGMLRPIARNLYTLIFIVDPSQKETRDLLQYALRFYAHEIPVRLGVVFVANDEKEITGFDDASVAMLNLYNFIKSNNGIQKALDVLIEVLNVKEESVSPKDVLSYFQMKYPNHDPNSVFGSNSDYDNGRSTGHKFLRDSGLGLTPKVLLNGVVLDDSGITADHFEETVMMEIMRVTSRLQKAVMEKKLKDQDNVMNWILSQPEVMPRINKLILDSPLSPDALYLDLTSVKKCTSVSPTQYYKLPPKEQNQCMLKRMRYITRTEEMKTYFSTVWVVTDLETAEGRLLAYNAIRHLKRSHTMRVAIINNPKNIEKATTSGSITMLVNIASRILIPKQMKSFITKLVKEEIVSELLNKQITLDDLSVNDMNMTLFYKEAKQINSDEIIVYAKYSKSILGLKPGQLALVVNGLLIGPFGDSEVLDVADMELIDKLTLLRGGKVVKDYMEKWGIQTRYGESSDMVARSMALIGSVGVTKKRRFIPLLREKESVLTISGNNEEGLILALCIVDPLSTQAQRLGHLLTVIQKIVNVEVKLVMNPRAKLSELPLKRFYRLVLQPSVMFDNSGRISDAAYEARFTALPNKQLLTLAVVPPDAWMVQSVYAVYDLDNIRLENVPGNVLAKFELEHILLEGHCFDDMTGSPPRGLQFTLGTLVNPSRYDTIVMANLGYFQLKADPGAWILNLRDGKSKDIYNIVSHVNTESEDEAGVNVLIDSFSGRTIRVRVAKKKGKEKENLLSEGKSEGESEDHHSIWSSISTTSISGDEKHDAINIFSLASGHLYERFLRIMILSVMKHTKHPVNFWLLKNYLSPNFKETLPQMAKHYGFNYEFIEYRWPRWLHQQTEKQRVMWGYKILFLDVLFPLGVRKIIFVDADQIVRTDLMELMELDLGGAPYGFTPFCDSRTSMDGFRFWKKGYWANHLAGRKYHISALYVIDLVKFRQVAAGDRLRGQYQGLSADPNSLSNLDQDLPNNMIHQVRIKSLPQEWLWCETWCDDASKEKAKTIDLCNNPQTKEPKLDSAMRIIPEWKDYDAEIKALFDIRSKNHTGQTKSGHERTDKHTEL

SEQ ID NO: 3826 - protein, 1537 aa, Malassezia pachydermatis
MTAIFGWIGLLLWCVVQLAIAGDVPVHIRLRHGWHNYTNAATHASTFVEMMEAAHEVFPNELFDMVSHVWPACGKDTTKVMRTAGHKDLFDSIEDFLRTYATSVGIPRVEERLDEWRIHVAQHWQAPRVESMYQIFNTSRELQGHSPTCDTFVYFDDRVLCSPNDLRAAITKPPRTLPTVFPHDHVYPSGQSALPALILYADPYSTTFGAFHSELMTLAGEQRIRYVLRWRPTLATVSEPRSTNYFSGFGASMHLKKVDYLVLDDRQIDAAEASEAVPIQSDRIGSLYRDVQDQLYSLGGERTSSVQEAVLKQSNFSLVDGLYLGQAAAHAILTAEDPLSTMESIVHDFPAHAVALQAYAAHLAENDPIIEYLNERNYRLIGAGSSQIWINGRAVPKSDLELLTFFKSIQEERRLLDDFGAPELGVSPEGVESLLTQEAINLQFSPSPRDIVLYDTSDTIEQESGFGTTVIAWINNLESEEYKLWPNTLEMMMEYRWPSGFPLIARNFFQVVMLLDVGHPEALEFMSEALEAMMTDYPFRWGLVPLLRDDASEEIAQVLWHAINMLQPREIAPFLLHLAKGPTVNGRVDPEAARAHLGSIVRNIKKRGIDLVQEFVHYKQVSPLFKYRLELAHAYVERVYPNPRPGTYGVAFLNGQEISLSERFIEDLASAVSYQLHLAHDDITRGRIEKTENYETYFFDLKGTVKERSQLADMLEDAKALLRPYKFVSLPEVFRRLGSLADPLRHFLYDPKAHDSLVSLRVVGDIDSDVGRHSVVEVLKAMEAEGPSFRVSFIHTGADHGVLSHFLLSAMMSGALSDIPPSRLRSAIEAADISSALDALSHEFTSPKSDMVWSQIAPTFVSAAGLDVGLLPTLILNGQVLPHIRHLKAREVTAAVEWEQQKHVSTLLNTLTVPERPRDVRAQVVEFATAILGKVFVKQVTDTGSSEASSNPRVPIAPLIASSPVAFKVGDASAAIHVSVIMDPIAEEAPQLTSILRMLSSVRGVRLSILMNPRMRVTAMPLQRFTRYDVRIRPEFDAQGHERIPGIAFNHLPQQAVLTMQLHAPRSMVTMADEAIYDLDNIRLSDVHGSVDAIYAIKSLLLEGYAQALPNSIPRGLQLVLETDDQSTQLDTIVMENLGYFQFRAQPGHWHLSIREGRSSDVYEMLSVGSQGWRSPPVNETSSSVLIDSRLGLTVFPQFRKRLGKTVEELISERPKDDSGLASVSHGLQKQWGKALRLLRGTKSKHADINIFTLASGHLYERMTYIMILSVLRHTKSSVKFWFVENFLSPSFKAFIPHLAEAYGFKYELITFAWPEWLREQTEKQRMIWAYKILFLDVMFPLDLDRVIFVDADQIVRSDLKELVDMDLRNAPYGYPPMGDDSEDMDGYRFWKKGYWKAFLRGRTYHISALYVVDLQRFRYMAAGDILRRHYQRLTADPNSLANLDQDLPNHLQTYLPIYTLDKTWLWCETWCSYDWLSQAKTIDLCSNPKTKEPKLDRARRQIPEWTELDNEVAALAHSLQAKSFDSNAPVEMHDEL

SEQ ID NO: 3827 - protein, 397 aa, Aphanomyces astaci
MNIGQVRRSGEIFCVLPDQHVIYVNGRPLELVAPVTPSLFDGLVTYESATRSKAVSKAYVSQFKHNVLTAEDAADKTLQLNVVLSMVDSYLKTPRVAAVLPDDVQRPTYSYVTPSGSSSLDVVAYLDPLSDTAQRASGILRMLHSVLHAKITLVLVPPPSYDEFPLKRFYRFLWGGTSSSLVEFDRLPRHPVLTLNIETPELWNVQMVQSDVDIDNIQQNASATFTIKDVLVYGQCVDKTNAQYPTLPNGLQLVLERSVAKLHSHKDTVDERVDAVPVIVYDFLSKTLQLEVKKQPGQEGVRLLDDGPEATKAPAQPEETSVWTSLTDKQRIIWGYKILFLDVLFPLGVDKIIYVDADQVVRADLKELWTMDLQGKAYGYTPFCDSRNVGFQFWRKG

SEQ ID NO: 3828 - protein, 1609 aa, Aegilops tauschii
MATAGGSRSGVSRAAFALVAVVLVGCLGGGVSVAEIRRQKNVQVALRAKWAGTPLLLEASELLSKERRDYFWEFIGHWKELDKGSECLTAKCCAQKIVEDVRSFLSEPLASIFEFSLTLRSASPRLVLYKQLAEESLSSVPVKDDALEQISGSGAVEGTCCWVDTGNTLFFNSDDLHKWLEGSGKGATDSTGQPELFDFDHVYPRSNITAPVAIFYGAVGTKCFKELHVHLAEASKQGKVRYALRPVLPSGCQATSSFCGSIGAADAVTLSGYGVELALKNMEYKAMDDTAIKKGVALEDPKTEDLSQEVRGFIFSKILERKPELNAEIMSFRDYLLSSTVSDTLEVWELKDLGHQTAQRILHASDPLQSMQEINQNFPSVVSSLSRMKVDDSIKDEIIANQRMVPPGKSLMALNGALINIEDLDLYLLMDMVREELSLADQFIRLKLPQSAAHKILSAAPPAESNSFRVDFRSSHVHYLNNLEEDALYKRWRSNLNELLMPVYPGQMRYIRKNLFHAVYVFDPASACGAETIDTILSLHQDSVPVRFGIIMYSSRLINVIEENDGSKSDEDTSTLIMRLFLYIKETYSTQLAFQFLSDIHRLRNGGDDYSEEPVEVHHVEEAFVDSLLSGAKSHPQDVLLKLQKENLYKQEADENSRFVHKLGLYKLQCCLLMNGLVHEPNEDATMNAMNDELPRIQEQVYYGHIQSHTDVLEKFLSESSYKRYNPSITGKSTEKKRFVSLFASYHQEDSVLHDISYLHSHGTRDDAKPVTHLLAVDLSSVTGTKLLHEAIRYLMDGSNRARVGLLLYACSDSVSTILLMKDIIDRTISSFSGKEKVLDFLYGLCKYYEGQHMVASSAAGDTLSSIKDKVYSLAAETALPVDDYKAWLTSFSADTILKGIDKLSDFLFGQLGLEFGSNAVITNGRIFVVDDGDSFLNEDLGLLESMEYELRTKYIHEIIEEVEWAGVDPDYLTSKFYSDITMLVSSSMSIRERPSERAHFEILNAEYSAIKLNSMNSSVHIDAVIDPLSPAGQKLSPLLRILSQQIQPSMRIVLNPISSLADLPLKNYYRFVLPSMDDFSSTDFSVHGPKAFFSNMPLSKTLTMNIDVPEPWLVEPVVAIHDLDNILLENLGDVRTLQAVYELEALLLTGHCMEKDREPPRGLQFILGTKQRPHLVDTLVMSNLGYWQMKVSPGVWYLQLAPGRSADLYELPSKLIAIDSLRGKLLHIEVQKKKGKEHEDLLNADDDNHVQEKTDNKGWNTNLLKWASSFISGDASLKKKAEKNTVSISSDLKDARQGETINIFSVASGHLYERFLKIMILSVLKKTERPVKFWFIKNYLSPQFKDVIPHMALEYGFEYELITYKWPTWLHKQKEKQRIIWAYKILFLDVIFPLSLRKVIFVDADQIVRTDMGELYDMDLKGRPLAYTPFCDNNKEMDGYRFWKQGFWKDHLRGRPYHISALYVVDLAKFRQTAAGDNLRVVYETLSKDPNSLSNLDQDLPNYAQHTVPIFSLPQEWLWCESWCGNATKAQAKTIDLCNNPMTKEPKLQGAKRIVPEWVDFDAEARHFTARILGENVEEIAEAIPPSSESDAPKPDHDDSSQDAKDEL

SEQ ID NO: 3829 - protein, 1595 aa, Alligator mississippiensis
MACGGWGRGVLSGRLAVGRKRKLSARKSGSDGRSRKGAWRTLTGAGSAAAPSARAAGISYKMGIFIAVLGIWFSSSLVKADSKAVTTSLTTKWYSTPLLLEASEFLSEESQEKFWSFVEASQDIRSSSPGGNNYSSYHAMLKIASQNLSPLQKNLLKFSLSLRSYSATVQAFQQIAADEPPPEGCSSFFAVHGEKTCEFNTLENLLQTASKRPKPFLFKGDHKYPVSNYESPTVILYAEIGSEEFSRLHNWLVSKAKAGEITYVLRHYVANPSKEKVYLSGYGVELAIKSTEYKSKDDTQVKGTDMNATVIDENDPIDEVQGFLFGKLRQLYPELKEELKELRKHLVESTNEMAPLKVWQLQDLSFQTAARILAAPTVDALMVMKDLSQNFPTKARAITKTAVSSEIRTEIEENQKYFKGTLGLQPGDSALFINGLHIDLDTQDIFSLIDVLRNEARVMEGLHRLGIEGLSLHNVLKLNIQPSDSDYAVDIRNPAISWINNLEVDSRYNSWPSSMQELLRPTFPGVIRQIRKNFHNFVLIVDPTHESTAELLNVAEMFFSNHIPLRIGLVFVVNDSEDIDGLQDAGVALLRAYNYVAQESDNNYAFQTVISMYNKVKTGDQLKVEHVVSVLEKQYPYVEVNSILGIDSAYDQNRKEGRSYYEQTGVGPLPIVLFNGMPFQKEQLDPDDLETVTMHKILETTSFFQRAVYLVELSNDQDVVDYIMNQPNVVPRINSRILTSDREYLDLTATNNFFVDDFARFTVLDSKDKTAAIANSMTYLTKKGMSSKEIYDDSFVRPVTFWIVGDFDKASGRQLLYDAIKHQKSSNNVRISMINNPSEEPSNENTLITRAIWAALQTQTSNNAKNFITKMAKEEIAKALEAGADIAEFAVGGMDINSFKDAFESPKVDFVLSHAVYCRDVLKLKKGQRAVISNGRIIGPLEDGEMFNQDDFHLLENIILKTSGQKIKSHIQQLGVEEDLASDLVMKVDALLSAQPKGEARIEYHFFEERYSAVKLRPKEGETYFDVVAIVDPVTRDAQRLAPLLLVLNQLINMNLRVFMNCQSKLSDMPLKSFYRYVLEPEISFTADDNFAPGPIAKFLDMPQSPLFTLNLNTPESWMVESVRTPYDIDNIYLEEVDNIVAAEYELEYLLLEGHCYDITTGQPPRGLQFTLGTSTKPVVVDTIVMANLGYFQLKANPGAWVLKLRKGRSEDIYRIYSHDGTDSPPDANEVIVVLNNFKSKIIKVKVQKKLDMMNEDLLSDGTSENESGFWESLKWGFTGGQKNEDVRQEKDDVINIFSVASGHLYERFLRIMMLSVLKHTKTPVKFWFLKNYLSPTFKEFIPYMAENYSFQYELVQYKWPRWLHQQTEKQRIIWGYKILFLDVLFPLAVDKFLFVDADQIVRTDLKELRDFNLDGAPYGYTPFCDSRKEMDGYRFWKSGYWASHLAGRKYHISALYVVDLKKFRKIAAGDRLRGQYQGLSQDPNSLSNLDQDLPNNMIHQVPIKSLPQEWLWCETWCDDASKKRAKTIDLCNNPMTKEPKLQAAMRIVSEWQDYDLEIKQLYSRFQEEKEIGTIKTTGETKHQSKEDPAAHVEL

SEQ ID NO: 3830 - protein, 1511 aa, Ceratotherium simum
MAKAANVARLLLGSSTLWLLLLGFGTASASKAVTAHLAAKWPETPLLLEASEFMAEESNEKFWQFLETVKELAIYKQTESDYSYYNLILKKAGQFLDDLHINLLKFAFSIRAYSPAIQMFQQIAADEPPPDGCDAFVVIHKKHTCKINEIKKLLKKATSRPRPYLFKGDHKFPTNKENLPVIILYAEMGTRAFGKFHTVLSEKAQNGEILYVLRHYIQKPVSQKTYLSGYGVELAIKSTEYKALDDTQVKTVTNTTVDDETETKEVQGFLFGKLKERYSDLKDNLTAFQKYLIESNKEMMPLKVWELQDLSFQAASRIMSTPVYDAVKLMKDISQNFPIRARSLTRIAVNQHMREEIQENQKNLHYRFEIQPGDACLFINGLRVDMDTYDPFSLLDMLKLEGKMMNGLHNLGINGEDMSKFLKLNSHVWDSTYALDIRHSSIMWINDLENDNLYVTWPASCQELLKPIFPGGIPSIRRNFHNLVLFVDPAQEYALDFIKLAKLFYYHKTPLRIGFVFIVNTDDEVDGTKDAGVAFWRAFNYIAEEHDASQAFVSMLKMYQKVKNQNILTVDSVKSVLQNKFPQADTGDILGIHSKYDDKRKAGASFYEMTGLGPLPQALYNGESFNHEELNNKELEKAVLHRMMDTAVYLQREVFMGRLNDQTSAVDFLMDKNNVVPRINPLILHTKRQYLNLISTSVTADIEDFSTFSFLDSQDKTAVIAKSMYYLTQEDYDVVSSVTLWIIADFDKPSGRKLLFNALKHMKTSVHSRLGVIYNPTSKINEENTAISRGILAAFLTQKNSFLRNFLRKLAKEETATAIYSGDKIKTFLTEGMDKNAFEKKYNTIGVNIFRTHQLFCQDVLKLRPGEIGVVSNGKFLGPIDENLYAEDFHLLEKITFTNVVEKIKGIVESMEINSKNMSDLIMKVDALVSSLPKRASRYDVTFLKENHSIIKINPQENDMFFDVIAIVDPLTREAQKMSQLLIVLGKMINMKVKLFMNCRGKLSEAPLKSFYRFVLEPELMLMANDSIGPVAKFLDIPESPLLTLNMITPEGWLVDTVHSNCDLDNIHLKDIERTVTAEYELEYLLLEGHCFDIITEQPPRGLQFTLGTKNKPVVVDTIVMANLGYFQLKANPGAWILKLRQGKSEDIYQIVGHGGTDSQPDVGDVIVVLNSFKSKILEVQVQKKPDQIKEDVLSDEDEKKGMWDSIKSFTRRLHKEKDKKETDILNIFSVASGHLYERFLRIMMLSVLRNTKTPVKFWFLKNYLSPTFKEVIPHMAKKYGFQYELVQYRWPRWLHQQTEKQRIIWGYKILFLDVLFPLAVDKIIFVDADQIVRHDLKELRDFNLDGAPYGYTPFCDSRTEMDGYRFWKTGYWASHLLRRKYHISALYVVDLKKFRRIAAGDRLRGQYQALSQDPNSLSNLDQDLPNNMIYQVAIKSLPQDWLWCETWCDDESKERAKTIDLCNNPKTKEPKLKAAARIAPEWVEYDAEIRQLLDRLENEKKNAILTHDEL

SEQ ID NO: 3831 - protein, 1700 aa, Camelus bactrianus
MASIPKEQGETEESGKPLQIDFAISRQSIRPKSQFSSVPHILCVSRYGAAGASVKLRTRAPPAPTWLGGPPAGAPGRARRACARRKPGPGRSNGLELPPPEVGGHAAGGVGGSVAAAGCGRGVRAARTALSAPWQRPPTCPRGGRVRRGCGRPGTPAAPRTPPPSRPGRPFLASVVLVKCKRKQKLKKKLVRKKEAVFGNLGESQPIQIAKGAKIGKLSVENACSVKQAKCVAGYLLLYSEFMAEESNEKFWQFLETVQELAVYKQTESDYSYYNLILKKAGQFLDNLHINLLKFAFSIRAYSPTIQMFQQIAADEPPPDGCDAFVVIHKKRTCKVNNIKKLLKKATSRPRPYLFKGDHTFPTNKENLPVIILYAEMGTRAFRKFHTVLLEKAQNGEILYVLRHYIQKPSSQKMYLSGYGVELAIKSTEYKALDDTQVKTVTNAGVEDKTETNEVQGFLFGKLKERYSDLRDNLTTFQKYLIESNKEMMPLKVWELQDLSFQAASQIMSTPVYDALKLMKDISQNFPIKARSLTRIAVNERMREEIEENQKHLRDRYEIRPGDASLYINGLHIDINAYDPFSLLDMLRLEGKLMHGLHNLGVDKEDVSELLKLSSHNWDDIYALDIRHSSIMWINDLESDDLYVSWPANCREVLKPVFPGSIPSIRRNFHNLVLFIDPAQEYTLEFIKLAEHFYFYKVPLRIGFVFIVNTDDEVDGTADAGVALWRAFQYIAEEYDTTQAFISIVNMYKKVENRNILTVDNVKSVLQSTFPHANIWDILGTYSKYDGKREAGANFYKMTGLGPLPQSLYNGEPLQDEDFVKLEVAILQRMVDTTVELQKYVLTGILNDQTDTVDFLMVMNNAVPRINPLILHTEWQYLNLISTSVTADIEDFSTFFFLDSQDKSAVIAENMHYLTPEDDRLSPVTFWIIADFDKPSGRKLLFKALKHMKTSVHSRLGVIYNPTSKIDEENTAISRGILAAFLTQEKRFLRKFLRKLTKEETATAIYSGVKIKTFLAEGMDKNAFEKKYNTIGLNIFQTHQLFCQDVLKLLPGEIGVVNNGRFLGPLDENFYAEDFYLLEKITLTSLGEEIEDFAQSTKSIDLKVMSDFVMKFDALVSSLPQSASRYDITFLKENHSVIKINSLEDDMVFDVIAIVDPLTREAQKMAQLLIVLGKIINMKIKLFMNCRGKLSEAPLKSFYRFVLEPELMLTANGIVGPAAKFLGIPEAPLLTLNMITPEGWLVEIVRSNCDLDNIHLKDVEGAVTAEYELEYLLLEGHCFDVTTEQAPRGLQFTLGTKNRPVMVDTIVMANLGYFQLKANPGAWILKLRQGKSEDIYQIIGHKGTDSEPDLGDVIVVLNSFKSKILDVQVQKKPDKIKEDILSSKNEEKKKGMWDSIKSFTRRLHTKRDTQETDVLNIFSVASGHLYERFLRIMMLSVLRNTKTPVKFWFLKNYLSPTFKEVIPHMAKEYGFQYELVQYRWPRWLHQQTEKQRIIWGYKILFLDVLFPLAVDKIIFVDADQIVRHDLRELRDFDLGGAPYGYTPFCDSRKEMDGYRFWKRGYWASHLLRRKYHISALYVVDLKKFRRIAAGDRLRGQYQTLSKDPHSLSNLDQDLPNYMIYQVAIKSLPQDWLWCETWCDDESKQRAKTIDLCNNPKTKEPKLKAAARIVPEWVEYDAEIRQLLDHLDNKKTSAILTHDEL

SEQ ID NO: 3832 - protein, 1512 aa, Meriones unguiculatus
MARAGAADERRLLLRSVALWLALLGARTTAASKAVTAHLAAKWPETPLLLEASEFMAEESNEKFWQFVETVRELAVYKQTESDHSYYNLILKKAGQFLDDIHINLLKFAFSIRAYSPTIQMSQQIAADEPPPDGCNAFVVIHQKYTCKINEIKKLLNKAASRPRPYLFRRDHKFPTGRENLPVVILYAEIGTRAFAEFHRVLSKKSQNGKILYVLRHYIKKPSSRKMYLSGYGVELAIKDTEYKALDDIQIKTTADTSLENETEADEVQGFLFGKLKEIYSDLKDNLTLFQTYLIESSKEMMPLKVWELQDLSFQAASQIVSTPVYDAIKLMKDIAQNFPIKARSLTRIAVNELMRKEIQENQKDLRNRFEIKPGDARLFINGLRVDLDVYDPFSILDMLKSEGKLMNGLKNLGLSEEDMNKILTLNLPVWDYDYVLDIRHSAIVWINDLENDGMYVTWPTSCWEFLKPVLHETVPSIRRNFHNLVLFIDPAQEYTLDFISLAEFFYYNEIPLRIGFVFILNVDNEVDGAADAGVALWRAFNYIEEKYDVLEAFISMTHMYQKVKDNQILTVDNVKSILQNKFPNADILDILGTHSKYDRRRMAGASFYKMTGLGPLPQALYNGEPFDLKELNTEELKGVVLEKMTDTFVYLQRDVFMGILNDEINAIDFLMDKNNVVPRLNSLILHTEPQYLNLLSSSVTADIEDFSTFSFLDSQDKSAVIAKNMHYLTQDNMISAVTLWIIADFDTPPGRKLLFNALEHMEMSVHSRLGIVYNPTSKINEENTVISRGILAAFLTHTSSVLRRFLRKLAKEETAEAIYSGDKMKTLLTGDMDKNAFEKKYNTVGVNIFRTHQLFCQDVLKLQPGRMGIVSNGKFLGPLNEEFYIEDFYLVEKVTFSNSVEKIKDVVENMEVNPKHTSDLVMKLDVLLSSLSVRATRYNITLLKENLSVIKINPPENDVFFDVTAIVDPLTREAQKMAQFLIVLGKIANVRIRLFLNCRDKLSEAPLRSFYRFVLEPELLTGANNSPSNGPVAKFLDIPESHLLTLNMITPEGWLVEIVHSNCDLDNINLKDTERVVTAEYELEYLLLEGHCFDMTTEQPPQGLQFTLGTRSNPAMVDTIVMANLGYFQLKANPGAWILKLREGKSEDIYEIVGHEGTDSETDTGDVIVVLNSFKSKILKVQVKKRSGKITEDILADKHENRGMWDSIKSFTKSLHEDKKKENDILNIFSVASGHLYERFLRIMMLSVLRNTKTPVKFWFLKNYLSPTFKEVIPHMAKEYGFQYELVQYKWPRWLRQQTEKQRIIWGYKILFLDVLFPLAVGKVIFVDADQIVRHDLKELRDLDLGGAPYGFTPFCDSRREMDGYRFWKTGYWASHLVKRKYHISALYVVDLKKFRRISAGDRLRGQYQALSQDPNSLSNLDQDLPNNMIYQVAIKSLPQDWLWCETWCDDDSKKRAKTIDLCNNPKTKEPKLEAAARIVPEWVKYDTEIRKLLDHLENKKKTATSVHDEL

SEQ ID NO: 3833 - protein, 478 aa, Ancylostoma duodenale
MKHTTKPVKFWLLKNYLSPQFKKNLPFLSAEYGFEYELVEYKWPRWLHQQKEKHRIMWGYKILFLDVLFPLDVQKIIFVDADQVVRSDLMELMEYDLGGAPYGYVPFCDSRKEMDGFRFWKQGYWANHLAGRRYHISALYVIDLQKFRQIAAGDRLRGQYQGLSSDPNSLSNLDQDLPNNMIHQVKIKSLPQEWLWCETWCDDASKSKAKTIDLCNNPMTKEPKLDSAIRIIPEWRDYDNEVKEVLKRAQQQTGKMSATLPRLWQPGNKQKYTFLADFWMTVASNPTAGRMRLPRNCVKFEVDPRMSKRDIRDYLSKIYKLPVRDVRTEVQMGEISWSTPADAQYKKAMWKDDDKKYAYVFMSKDFEFTFPNIFPDEDENAELQKVKEQQKKMTLNSSFANRDRNKQKGNVGEKSGECRAWAKFPSLVPAIFLALVAWRLLGRFPGQGSSHNTGLSEQAGLRGYAYVYRGEPGRRLAG

SEQ ID NO: 3834 - protein, 1469 aa, Ophiocordyceps australis
MKAAFAAPPYLLELLETAASENETAYFPLVDCIASGHFAAAKSDAQLYTAFLDVLDTQGHISSPEALATFDLALSLHAAAPRIEAHYQYYSTAVEAAVTNISCPNDWVWLDGKQYCTSSSLDHGIRDRLLSAQAKELPFDRTLGAGPDAILYADMTSDSFAPLHATLSTAARQLGLRYRIRYRHSILDKAQPLTISGYGVDISLKRTDYIVIDDRAAEKDGVQKPLASAAFLDDSSQAADIRPLSTSELALLGMKTASFILESENRLETLIKLTKDFPRYSSSIVAHNVSADCAAEFEQHRADIGRGGINFVWINGLQLAERQMEPFALVQLLRRERKLMDSIRDIGLNGKQAVSLLGHKAIVASKSNKESLRYDWTDQSESSQAIIWLNNIEEDARYQEYPASLNATQFLQYTHPGQLPAVRRNVFHIVIPADLTKTEDLAFANDIISLMTRGIPIRFGLVPLTSSANAKTRAQVLYYLAESHDTAALTAYIKELSHDEEPESEEKLLNDAMEYGQLLPEAQKSRLEDIVKSESYLQQIEMARKWVGRLNADGKVRSLLVNGVSLPLEGDWMHAMSMIITQDLQTIQKGIFQGIIDEETDIPAIFLQDAVKRRNAYISLDDDKALDVLDVNKMYHEHAELMAMIPVLGPSSSSSKDNWAVLTVFADMTNVHGLKLVTAALDFKRSNPGLHLEIVHNPKDGMASSRVNSALKSAQSLLSTIDSVEALSSIIEITEGLEGLDSYWTMLSQLHASTNIRPGASVVILNGRLVGPLVANATLTPDDLQQLFDFEHSRRILPVFAAMDSLDLTDKLTSPHAAAKITSMVARSTISDIPEGIFESAPSIRSTLYDSWNTKHSAIEIGDAETATIHIVGLLDPASDKGQRWAPIFAVLSELKGVYVKLILNPQQTLTELPIKGFYRHVMESKPSFDQEGNVIQLRATFRNLPSEALLTTAIHVPPAWLVAPSKSVHDLDNIKLSTARSDIDATYKLEHILIQGHSREDQGGAPRGAQLVLATEKDPMITDTIIMANLGFFQFKANPGFYKIELKQGRSAEIYTFESTGANGWEAVAGDQGNELVLMDFQGATLYPRLKRRAGMEDEDVLEPATKPSGDSLLSRGLELASHLFNSASSPQALSAQAHADINIFTVASGHLYERMLNIMMVSVMRNTKHSVKFWFIEQFLSPSFKDFIPYLADEYGFKYEMVTYKWPHWLRQQKEKQREIWGYKILFLDVLFPLSLDKVIFVDADQVVRTDMMDLIKLDLEGAPYGFTPMCDSRTEMEGFRFWKQGYWASYLRGRPYHISALYVVDLRRFRELAAGDRLRQQYHALSADPNSLSNLDQDLPNHMQFQIPIHSLPQEWLWCETWCSDESLASARTIDLCNNPQTKEPKLDRARRQVPEWTVYDDEIAALDARRRQQQQPQQQNRAGLEQEIEQEEMQTSHGDGSNNVNTMSRNWDEVKLGQSNTKDEL

SEQ ID NO: 3835 - protein, 1448 aa, Fusarium verticillioides
MPRLSQCLAMALVAATASLASPSVNVGMNAAFPRAPYLLELLETAAGENSTAYFPLLDKIAGGHFQSTNSDAELYDRFLEVLQQDGHITKPEALSTYKLALSLRVAAPRIEAHYQYYTTAVDSVSKGDTNDDCSTWALIDNKKYCSETLGKAVEGDFSARQVNLLPFDRVLGFGKDAILYADPTSASFGPFHIALSKAAKQGDVSYRLRYRRSAGAHNTPLSVSGYGVKLDLKRTDYIVIDDREASQEEVADLKPLSTSELASLGLKTASFILNSENPLDALVKSTQDFPKFSASIATHEVAKEFAAEQEKNVAAGIPSGINFLWMNGVQLIERQIEPFTLIEMIRRERKLIDGVRDLGFNGQQANSLLGHSEVASSKAEDEPPRFDWTDRLEEGKALLWLNDLEKDARYQKLPSDLTALLQRTYPGQLPQVALNLFHIVAPVDFTNIEDGRAFGQLAQFMQRGVTLRFGILPLVTTPASAAQAKVVYHLMETYGFESLITYLQESEEGPEGAANKKAFTRAIDGRETLPGANKMTLAEILEADTYKQRVEASKAWANRLNADTTVRPVFVNGLAIPREKSWVQAMGQRLTEDQQAIQKAVYFGQIEEGTPVSDLFLRDAISKRNTYIFPDDEKALRVVDINKLHKDFAGLFGNIAVLPSDSKAPKESWAVLTAVADLATDDGQDLLLAALEFKRKNPGVRLDLVHNPPSSAEAHVINGAFKLNEGKLAEMKNKDDLKAILEASWTAEDDGLGTALADFLSASNILPGTKGLLLNGRVVGPLPSDVSFNEDDLQQLLEFERRNRILPVYAAIKDLGFEDKLSDPIAAAKLTSITALSTISDLPQGIFESAPSIRSSMYNTWNSTHSAIEVGNPETASVHIAGLLNPTSEQGQRWAPILKVLSELDGVYLKLFMNPKEVVAELPITRFFRYVLDSKPSFDQAGHVHSPKATFKGLPSEALLTAGMDVPPAWLVAAKESVQDLDNIKLSSVKADIDVIYELENILIEGHSRDGKRGAPRGAQLSLATEKEPLITDTIVMANLGYFQFKANPGFYNIQLKQGRTSKIFTIESVGAHGYAPVPGDEGTEIALMDFKGTTLYPRLNRKPGMEEIDVLESPDSEDSGIVAKGLKFAESLLGGAKTPKEISAEEHAEINIFSVASGHLYERMLNIMMVSVMRNTKHTVKFWFIEQFLSPSFKEFIPHMAAEYGFKYEMVTYKWPHWLRQQKEKQREIWGYKILFLDVLFPLSLDKVIFVDADQIVRTDMIDLVNHDLEGAPYGFTPMCDSRTEMEGFRFWKQGYWANYLRGLPYHISALYVVDLNRFRQLAAGDRLRQQYHALSADPNSLSNLDQDLPNNMQFTIPIHSLPQEWLWCETWCSDESLAQARTIDLCNNPQTKEPKLDRARRQVPEWTVYDEEIAALDRRRKVVGNSSEKNSKRRTMEEAVHTKDEL

SEQ ID NO: 3836 - protein, 1444 aa, Schizosaccharomyces japonicus
MRWKSLLLFLSSGISLCLGARPLEIGLEAVFSKPSYLALFAETLHAESPEAFYWFLNSVSDRPLESSSPKAAYDDLLIRLQNENVLDDETLSSFQFALALSSGAPKLAAFHSLVDEKNVECNSWILGRDGPSCKVPTSFSSIPKINVYEKNNLDYVYDDCSVETPTVIAVTDFGVEFAGFHKQLMPLAESCKIRYVIRYSPSPKTTEEPLRVAGFGAHASLKRTDYLVVDDREVKISSQEAGSVSTDNEQKLFADLDDNLEAVPEEQLEQLGSLTAQYISQQEDPLTVLRKLSQDFPLYAHKIAGEQLNKQFIENITAFQERIIPEGTNIVSFNGIPVDVNELDAFSLLSMLRSERAIVNDLKKLGLSPHEAQQVLCSDKFGRDSNEIVLPKFDYRDDTEGGNVIVWANDLENDPRYSEWPTEVQNFLRPLYPGQLHMVRKQLHTVIYPVDPSSSISAQFVRDLLMTTQRVIPIQTGMVCRASGDNVVGQVLCRAFHFLRNEADIDTALSFLLNCLQEDDKTDVWSLVEKHMPPLLRDDESLDSLHNILYSPFFDALMANSNSWMNRLSIDPHNRDIIVNGRIIDYGNDFHQNMLGIFIEDIPQVQTAVAMYKLTDDDDLLDFALSDALPKRNALVYPSSKNVQRNVNLQASLNSLGLTLNDVLLFGRKSAPITLWLITDFSAPEFGTFITTLEELQQDVSDISVVLLPNSNTTDSVSLQLVERVKARIAPRLSQLEDLYDLYQPEHKVKAETKELMEKYLKLVSIIGVSEHETGILMNGRLITPLSPDSLNVDDLAELAYIERNNFVEILEDLIKNPRVCLPFLSSYLKELKTRPFQAVGYGQTQMSFPRDSYVDKLKQHATFSYGDVETAMYSVVAIINPLSAEAQKLSVFLETLSKMNSVFIMVILNPQQKLEELPLKRYYRYSIASVPQFDEQGNMVPPSVIFDNLPADVLLTMDLETRDAWVVMQKDVQLDLYNVKLPHTESNENLTPLTATYELKNILVQGYSTERQSGRPPRGMQVLLSNKDGSYKTDTIVLANYGYFQLKGNPGIFTIAPKSGRSEEIFSIDGVNHGTTDNSLTISGFEGVILHPTVSRNPGYENEDVLKPDAPSHKFLNKLLRPFRGAQKDEHAEINIFSLASGHLYERFIYIMTRSVMEHTKHTVKFWFIENFLSPSFKRDIAILAEKYKFKYEFVTYNWPHWLRKQTEKQREIWGYKILFLDVLFPLDLEKVIFVDADQIVRADLKELMDLDLKGAPYAYTPMCDSRTEMEGFRFWKQGYWKKYLRGMKYHISALYVVDLDRFRHMGAGDLLRRQYQLLSADPESLSNLDQDLPNHLQRMIPIYSLPQEWLWCETWCSDESLKKAKTIDLCQNPLTKEKKLDRARRQVTEWTTYDDEIHDLLEHELHKEEARPESIRQPQQVLQLSQQSTQSNPSSNEGVDEL

SEQ ID NO: 3837 - protein, 1512 aa, Linderina pennispora
MRVTVQLFGSLATLAAMSGHAFGASSESAPIRTKLEASFHAPPLLLEIAEGIATHNASAFFPFIERLAENRQVFDKPDSAAYAQALEWISNDQLLTPVAMSLLKLELATRTYAPAVVAQYQLYNATVVPEIKQVRKTFDDSRHAPVEALDEMLNIEKFYGTTYIEEAKTEPQVLDLDHVYRTDAPASDKLVVLYADPRADDFLKLHQNAKELAESAQATYVLRYRPWASAERPLGLAGYGVELALKSTEYKVIDDRDLDFAGERSKGGAGVKLAVQDAGRNGEIELFDSDAEPATQMILGASDKLAVLKQLAQDLPRYAHLLSEVELNTTLTDSIEQFRQIAPHDSFFVNGVRLTPDELDPFKLLNHLRKENSIIAALEDIGFTQQQALDLMLSEDLAQPDQAEEDMPTFDMRDPSKSVVAWLNNLEKDSRYGMWPKDLRNLMRIFTPGQIQRIRHNTVQVVFALDLSSSASWTMILDEIMTNIEHGLPMQFGIVPLVDYANPNSDADSNKMAKLHYYLRQAFGKKKVLSFWQGAMIAFTKNSGKMSFTESTRGLYAAFAKSTKTKSGDGALSWDQVISLSDEKLSEWWTASVKYCARLDLSTTSSPDGLVFVNGGVISLSDNYQSALYQAVQMQMWQLAQALRRTDLDPEGNVQDYIYSQPGVMSTRSALIYPSDESPLRFLTLGKPAVQGWVDSSVPYLSFRKDTDTELQTPDDKRMRVGLVHSPSPAAASEYRADGEEDEDQPEGFSAEIPLAVHQLGSVTDVPADVVASFAARLLSSADLDQGILADEQFSAHSDAFAEIFEPSDDAVDSADIAFAANKAALHALGVPATVAGSGHVVVNGRLLPPITEDMPFTADTVSALVSYELSERINNVYNAIKDIVPDPSSIDLPALVMKATAILSHGQTLVKVNGIFQRPWSDTRRSIEKLVRSKRDTLIQINDPATARFRIQAVLDPLSEYAQKWAPVFQALASLPSVSVEVYLNPSVGMSELPVKRFYRYLWPSQLSFGSDGAVATPEVQFNGVPADPLLTLGMDVPAAWLVTAVESIHDLDNIRLSSVKDKSTGVSAIYRLVNILLGTSLKPSITDTIVMANLGYLQLKANPGVWNFSIRDGRSSDIYRIADISEGRWNYVAAKRAQTSNAESAKPILLTSFNGVTIFPVVTKRAGKENEKLLLEKGADDTAKAAGGSGSKGSLWGKLKGAISGGVSTGDSRPHFDVFAVASGHLYERLMSIMILSVLKNTQSHVKFWLIENFLSPSFKAFVPHMAEEYGFDYEFVTYKWPHWLNHETEKQRTIWGYKILYLDVLFPLNLDRVIFVDADQIVRADLQELADMDLKGAPYGYVPFCDDRKEIEGYRFWKQGWWKDHLKDKPYHISALYVVDLKQFRLLAAGDRLRGQYQTLSRDSNSLANLDQDLPNNMQHIVPIHSLPQEWLWCETWCSDSSLKKAKTIDLCNNPMTKEPKLERARRLLPEWEAYDKERGNLEGAQIAKAEAVVIDKPKEERKKEHDEL

SEQ ID NO: 3838 - protein, 1490 aa, Scytalidium lignicola
MGVFSLPWSFAAALLASTYFYSPCVSASPSINVSLKAAFDSAPYLLELLETAADANVTSYFPLLDRVADGDFAKAKTEEELYTEFIKVLKDDGHIPDAESLSLYQLALSVRSAAPRIEAHYQYYHTAVEPSLTAEQDDSCPVWVLFNGKQYCSPALDKAFGEVKNSIQAQELPFDRVIGNESAPASILYGDITSPTFWKFHRSLTKAAREGKTSYRVRYRKPLDQEAKPLIIPGYGVELALKRTDYIVIDDRVEGDKEITKQTVEADINLEDEELSDLKPLSTSELFNLGLKASSFIMQSDNPFDTLIKLSQDFPKYSSIVAAHTTSEEFIREHEYNRAQLVPAGYNAWWINGVQILERQIDALSLLEILRRERKLINSVRELGLNGSEAIQLLAHDEISNSKAEDEPQRYDWRDKNDGSNVIIWMNDIETDKRYADWPTHLTAMLQRTYPGQLPQVRKDIFNLVVPVDFTATNDIRLVVEILQSFVKRKLSLRIGLVPLTKTADAVEQARILYHLLDTYGLSSVIAYLEDVLLSQKPSHPSKASFQKVISGRKLRAEKTAADADVVFNSNIHQDQIDAARRWISRLAADSEIPPFFIDGVALPRDENWLQSMSNRVTSDLQQIQQGIFKEVFTEDTWIPTYFLFSAATKRNPLIIPENEDTLKVFDMNKFAAEHQTLSTLPRLEIDTSLPRADWAHMILIADFNTEAGQKLLSTAGEYCEANPTIELVLIHNPSSIHSTTNISDRLYTSLHDRSYKPYNSINDLRTVMTTESLEGTISSNQDAVQYWSAAQPLVNSIGLLPGQTGILLSGRLIGPIPEELEFIYTDFEQLLAYERSKRLLPVYTAMNALGLSDKIINPLVAAKFSSIVATSMIVDAPEGVFEQAPLLRYHQFHIWNSSYTAIEVGNADTATIQLTVLVDPTSEQSQRWIPILKVLSQLDGVYLKLFLNPKERLQELPVKRFYRYVLESKPSFNENGALRSLGATFSGVPQDALLTVGMDVPPAWLVSAKVSTYDLDNIKLSSIKTNVEAIYELEHILIEGHSREVPSGNPPRGAQLVLGTERDSHFADTIIMANLGYFQFKANPGFYRISLLEGRSSEIYNIESLGSKGWAPASGDESTDIALMSFQGATLYPRLSRKPDMETEDVLEAKPESTMDILHRGYKFAESLLAPKEKAAVPAKAQAEINIFSVASGHLYERMLNIMMVSVMRHTKHTVKFWFIEQFLSPSFKDFIPYMAAEYGFEYEMVTYKWPHWLRGQKEKQREIWGYKILFLDVLFPLSLDKVIFVDADQIVRTDMIELVNHDLEGAPYGFTPMCDSRTEMEGFRFWKQGYWKNYLRGLPYHISALYVVDLHRFRQMAAGDRLRQQYHQLSADPGSLSNLDQDLPNHMQAVLKIHSLPQEWLWCETWCSDESLANARTIDLCNNPMTKEPKLDRARRQVPEWTVYDDEIAALDRRRKGLDDSTKEEKEGGTNPRSRNHEEVVSTRKDEL

SEQ ID NO: 3839 - protein, 1626 aa, Unknown
  Description of Unknown: AAM60113.1 Sequence 19 from patent US 6399321 sequence
  MOD_RES (2)..(2): Any amino acid
  MOD_RES (4)..(4): Any amino acid
  MOD_RES (7)..(8): Any amino acid
  MOD_RES (10)..(13): Any amino acid
  MOD_RES (18)..(18): Any amino acid
  MOD_RES (20)..(21): Any amino acid
  MOD_RES (23)..(23): Any amino acid
  MOD_RES (26)..(26): Any amino acid
  MOD_RES (28)..(30): Any amino acid
  MOD_RES (33)..(48): Any amino acid
  MOD_RES (50)..(50): Any amino acid
  MOD_RES (53)..(56): Any amino acid
  MOD_RES (58)..(58): Any amino acid
  MOD_RES (60)..(65): Any amino acid
  MOD_RES (67)..(69): Any amino acid
  MOD_RES (72)..(76): Any amino acid
  MOD_RES (79)..(79): Any amino acid
  MOD_RES (81)..(81): Any amino acid
  MOD_RES (85)..(85): Any amino acid
  MOD_RES (87)..(88): Any amino acid
  MOD_RES (90)..(90): Any amino acid
  MOD_RES (93)..(93): Any amino acid
  MOD_RES (95)..(95): Any amino acid
  MOD_RES (99)..(105): Any amino acid
  MOD_RES (107)..(107): Any amino acid
  MOD_RES (109)..(109): Any amino acid
  MOD_RES (111)..(112): Any amino acid
  MOD_RES (114)..(115): Any amino acid
  MOD_RES (118)..(122): Any amino acid
  MOD_RES (124)..(127): Any amino acid
  MOD_RES (129)..(129): Any amino acid
  MOD_RES (131)..(135): Any amino acid
  MOD_RES (137)..(144): Any amino acid
  MOD_RES (147)..(150): Any amino acid
  MOD_RES (153)..(155): Any amino acid
  MOD_RES (158)..(161): Any amino acid
  MOD_RES (163)..(164): Any amino acid
  MOD_RES (169)..(172): Any amino acid
  MOD_RES (174)..(176): Any amino acid
  MOD_RES (178)..(181): Any amino acid
  MOD_RES (183)..(183): Any amino acid
  MOD_RES (185)..(186): Any amino acid
  MOD_RES (188)..(189): Any amino acid
  MOD_RES (191)..(191): Any amino acid
  MOD_RES (195)..(196): Any amino acid
  MOD_RES (199)..(199): Any amino acid
  MOD_RES (202)..(211): Any amino acid
  MOD_RES (214)..(214): Any amino acid
  MOD_RES (223)..(224): Any amino acid
  MOD_RES (231)..(232): Any amino acid
  MOD_RES (235)..(241): Any amino acid
  MOD_RES (243)..(257): Any amino acid
  MOD_RES (260)..(260): Any amino acid
  MOD_RES (262)..(263): Any amino acid
  MOD_RES (266)..(266): Any amino acid
  MOD_RES (268)..(268): Any amino acid
  MOD_RES (270)..(270): Any amino acid
  MOD_RES (272)..(274): Any amino acid
  MOD_RES (276)..(278): Any amino acid
  MOD_RES (280)..(281): Any amino acid
  MOD_RES (283)..(286): Any amino acid
  MOD_RES (289)..(289): Any amino acid
  MOD_RES (291)..(291): Any amino acid
  MOD_RES (294)..(294): Any amino acid
  MOD_RES (301)..(302): Any amino acid
  MOD_RES (306)..(307): Any amino acid
  MOD_RES (309)..(321): Any amino acid
  MOD_RES (323)..(329): Any amino acid
  MOD_RES (334)..(335): Any amino acid
  MOD_RES (338)..(338): Any amino acid
  MOD_RES (340)..(344): Any amino acid
  MOD_RES (347)..(348): Any amino acid
  MOD_RES (351)..(351): Any amino acid
  MOD_RES (354)..(355): Any amino acid
  MOD_RES (357)..(368): Any amino acid
  MOD_RES (370)..(372): Any amino acid
  MOD_RES (374)..(374): Any amino acid
  MOD_RES (379)..(380): Any amino acid
  MOD_RES (382)..(385): Any amino acid
  MOD_RES (387)..(387): Any amino acid
  MOD_RES (391)..(393): Any amino acid
  MOD_RES (396)..(396): Any amino acid
  MOD_RES (398)..(404): Any amino acid
  MOD_RES (406)..(406): Any amino acid
  MOD_RES (410)..(416): Any amino acid
  MOD_RES (419)..(429): Any amino acid
  MOD_RES (432)..(432): Any amino acid
  MOD_RES (434)..(434): Any amino acid
  MOD_RES (436)..(443): Any amino acid
  MOD_RES (447)..(453): Any amino acid
  MOD_RES (455)..(456): Any amino acid
  MOD_RES (460)..(460): Any amino acid
  MOD_RES (463)..(463): Any amino acid
  MOD_RES (465)..(466): Any amino acid
  MOD_RES (468)..(469): Any amino acid
  MOD_RES (472)..(472): Any amino acid
  MOD_RES (476)..(476): Any amino acid
  MOD_RES (479)..(479): Any amino acid
  MOD_RES (481)..(482): Any amino acid
  MOD_RES (485)..(485): Any amino acid
  MOD_RES (488)..(488): Any amino acid
  MOD_RES (490)..(490): Any amino acid
  MOD_RES (494)..(496): Any amino acid
  MOD_RES (503)..(516): Any amino acid
  MOD_RES (518)..(522): Any amino acid
  MOD_RES (524)..(524): Any amino acid
  MOD_RES (526)..(526): Any amino acid
  MOD_RES (528)..(528): Any amino acid
  MOD_RES (535)..(542): Any amino acid
  MOD_RES (544)..(545): Any amino acid
  MOD_RES (548)..(548): Any amino acid
  MOD_RES (550)..(551): Any amino acid
  MOD_RES (557)..(558): Any amino acid
  MOD_RES (561)..(563): Any amino acid
  MOD_RES (566)..(567): Any amino acid
  MOD_RES (569)..(570): Any amino acid
  MOD_RES (573)..(589): Any amino acid
  MOD_RES (592)..(596): Any amino acid
  MOD_RES (598)..(600): Any amino acid
  MOD_RES (602)..(606): Any amino acid
  MOD_RES (608)..(610): Any amino acid
  MOD_RES (612)..(612): Any amino acid
  MOD_RES (615)..(616): Any amino acid
  MOD_RES (618)..(626): Any amino acid
  MOD_RES (629)..(634): Any amino acid
  MOD_RES (636)..(636): Any amino acid
  MOD_RES (639)..(639): Any amino acid
  MOD_RES (642)..(651): Any amino acid
  MOD_RES (653)..(653): Any amino acid
  MOD_RES (655)..(655): Any amino acid
  MOD_RES (657)..(658): Any amino acid
  MOD_RES (660)..(662): Any amino acid
  MOD_RES (664)..(666): Any amino acid
  MOD_RES (668)..(670): Any amino acid
  MOD_RES (672)..(672): Any amino acid
  MOD_RES (675)..(676): Any amino acid
  MOD_RES (678)..(678): Any amino acid
  MOD_RES (680)..(681): Any amino acid
  MOD_RES (683)..(684): Any amino acid
  MOD_RES (686)..(690): Any amino acid
  MOD_RES (692)..(692): Any amino acid
  MOD_RES (694)..(695): Any amino acid
  MOD_RES (697)..(697): Any amino acid
  MOD_RES (700)..(700): Any amino acid
  MOD_RES (702)..(702): Any amino acid
  MOD_RES (706)..(706): Any amino acid
  MOD_RES (709)..(713): Any amino acid
  MOD_RES (715)..(715): Any amino acid
  MOD_RES (718)..(723): Any amino acid
  MOD_RES (725)..(726): Any amino acid
  MOD_RES (728)..(729): Any amino acid
  MOD_RES (731)..(735): Any amino acid
  MOD_RES (737)..(739): Any amino acid
  MOD_RES (741)..(749): Any amino acid
  MOD_RES (752)..(753): Any amino acid
  MOD_RES (755)..(758): Any amino acid
  MOD_RES (760)..(771): Any amino acid
  MOD_RES (773)..(774): Any amino acid
  MOD_RES (780)..(783): Any amino acid
  MOD_RES (786)..(787): Any amino acid
  MOD_RES (789)..(791): Any amino acid
  MOD_RES (793)..(800): Any amino acid
  MOD_RES (803)..(805): Any amino acid
  MOD_RES (807)..(807): Any amino acid
  MOD_RES (809)..(826): Any amino acid
  MOD_RES (830)..(832): Any amino acid
  MOD_RES (834)..(836): Any amino acid
  MOD_RES (839)..(842): Any amino acid
  MOD_RES (844)..(845): Any amino acid
  MOD_RES (847)..(851): Any amino acid
  MOD_RES (853)..(864): Any amino acid
  MOD_RES (870)..(871): Any amino acid
  MOD_RES (873)..(881): Any amino acid
  MOD_RES (883)..(889): Any amino acid
  MOD_RES (891)..(898): Any amino acid
  MOD_RES (901)..(901): Any amino acid
  MOD_RES (903)..(903): Any amino acid
  MOD_RES (905)..(905): Any amino acid
  MOD_RES (908)..(908): Any amino acid
  MOD_RES (911)..(911): Any amino acid
  MOD_RES (915)..(915): Any amino acid
  MOD_RES (920)..(920): Any amino acid
  MOD_RES (922)..(922): Any amino acid
  MOD_RES (924)..(924): Any amino acid
  MOD_RES (926)..(927): Any amino acid
  MOD_RES (931)..(931): Any amino acid
  MOD_RES (934)..(943): Any amino acid
  MOD_RES (946)..(955): Any amino acid
  MOD_RES (958)..(964): Any amino acid
  MOD_RES (966)..(967): Any amino acid
  MOD_RES (969)..(970): Any amino acid
  MOD_RES (972)..(985): Any amino acid
  MOD_RES (987)..(987): Any amino acid
  MOD_RES (989)..(991): Any amino acid
  MOD_RES (993)..(997): Any amino acid
  MOD_RES (999)..(999): Any amino acid
  MOD_RES (1003)..(1005): Any amino acid
  MOD_RES (1008)..(1017): Any amino acid
  MOD_RES (1020)..(1020): Any amino acid
  MOD_RES (1027)..(1029): Any amino acid
  MOD_RES (1034)..(1035): Any amino acid
  MOD_RES (1038)..(1042): Any amino acid
  MOD_RES (1044)..(1044): Any amino acid
  MOD_RES (1046)..(1051): Any amino acid
  MOD_RES (1055)..(1057): Any amino acid
  MOD_RES (1060)..(1061): Any amino acid
  MOD_RES (1070)..(1073): Any amino acid
  MOD_RES (1075)..(1076): Any amino acid
  MOD_RES (1080)..(1080): Any amino acid
  MOD_RES (1082)..(1090): Any amino acid
  MOD_RES (1092)..(1093): Any amino acid
  MOD_RES (1096)..(1097): Any amino acid
  MOD_RES (1102)..(1103): Any amino acid
  MOD_RES (1105)..(1106): Any amino acid
  MOD_RES (1108)..(1108): Any amino acid
  MOD_RES (1110)..(1110): Any amino acid
  MOD_RES (1114)..(1114): Any amino acid
  MOD_RES (1116)..(1118): Any amino acid
  MOD_RES (1128)..(1137): Any amino acid
  MOD_RES (1139)..(1139): Any amino acid
  MOD_RES (1143)..(1143): Any amino acid
  MOD_RES (1145)..(1146): Any amino acid
  MOD_RES (1150)..(1150): Any amino acid
  MOD_RES (1152)..(1152): Any amino acid
  MOD_RES (1154)..(1154): Any amino acid
  MOD_RES (1156)..(1158): Any amino acid
  MOD_RES (1160)..(1160): Any amino acid
  MOD_RES (1168)..(1168): Any amino acid
  MOD_RES (1172)..(1173): Any amino acid
  MOD_RES (1176)..(1178): Any amino acid
  MOD_RES (1180)..(1180): Any amino acid
  MOD_RES (1193)..(1195): Any amino acid
  MOD_RES (1202)..(1202): Any amino acid
  MOD_RES (1205)..(1206): Any amino acid
  MOD_RES (1212)..(1213): Any amino acid
  MOD_RES (1216)..(1216): Any amino acid
  MOD_RES (1218)..(1218): Any amino acid
  MOD_RES (1221)..(1222): Any amino acid
  MOD_RES (1225)..(1228): Any amino acid
  MOD_RES (1230)..(1236): Any amino acid
  MOD_RES (1239)..(1241): Any amino acid
  MOD_RES (1244)..(1249): Any amino acid
  MOD_RES (1251)..(1251): Any amino acid
  MOD_RES (1253)..(1253): Any amino acid
  MOD_RES (1259)..(1262): Any amino acid
  MOD_RES (1267)..(1269): Any amino acid
  MOD_RES (1271)..(1273): Any amino acid
  MOD_RES (1275)..(1275): Any amino acid
  MOD_RES (1277)..(1278): Any amino acid
  MOD_RES (1281)..(1284): Any amino acid
  MOD_RES (1286)..(1297): Any amino acid
  MOD_RES (1299)..(1301): Any amino acid
  MOD_RES (1308)..(1308): Any amino acid
  MOD_RES (1312)..(1312): Any amino acid
  MOD_RES (1323)..(1324): Any amino acid
  MOD_RES (1329)..(1331): Any amino acid
  MOD_RES (1334)..(1334): Any amino acid
  MOD_RES (1344)..(1344): Any amino acid
  MOD_RES (1349)..(1349): Any amino acid
  MOD_RES (1352)..(1354): Any amino acid
  MOD_RES (1356)..(1357): Any amino acid
  MOD_RES (1360)..(1360): Any amino acid
  MOD_RES (1364)..(1364): Any amino acid
  MOD_RES (1369)..(1371): Any amino acid
  MOD_RES (1382)..(1384): Any amino acid
  MOD_RES (1389)..(1389): Any amino acid
  MOD_RES (1405)..(1405): Any amino acid
  MOD_RES (1407)..(1407): Any amino acid
  MOD_RES (1420)..(1420): Any amino acid
  MOD_RES (1423)..(1423): Any amino acid
  MOD_RES (1426)..(1426): Any amino acid
  MOD_RES (1430)..(1430): Any amino acid
  MOD_RES (1432)..(1432): Any amino acid
  MOD_RES (1446)..(1446): Any amino acid
  MOD_RES (1456)..(1456): Any amino acid
  MOD_RES (1459)..(1460): Any amino acid
  MOD_RES (1464)..(1464): Any amino acid
  MOD_RES (1467)..(1470): Any amino acid
  MOD_RES (1482)..(1482): Any amino acid
  MOD_RES (1499)..(1499): Any amino acid
  MOD_RES (1502)..(1502): Any amino acid
  MOD_RES (1530)..(1533): Any amino acid
  MOD_RES (1542)..(1542): Any amino acid
  MOD_RES (1544)..(1544): Any amino acid
  MOD_RES (1548)..(1548): Any amino acid
  MOD_RES (1559)..(1559): Any amino acid
  MOD_RES (1563)..(1563): Any amino acid
  MOD_RES (1566)..(1567): Any amino acid
  MOD_RES (1569)..(1569): Any amino acid
  MOD_RES (1573)..(1573): Any amino acid
  MOD_RES (1575)..(1575): Any amino acid
  MOD_RES (1580)..(1580): Any amino acid
  MOD_RES (1583)..(1584): Any amino acid
  MOD_RES (1586)..(1622): Any amino acid
  MOD_RES (1624)..(1624): Any amino acid
KXIXTSXXAXXXXWSLLXEXXEXLAXEXXXLFXXXXXXXXXXXXXXXXEXDTXXXXYXAXXXXXXRXXXLSXXXXXLLXFXLSLXSXXPXIQXFXQIAXXXXXXXGXCXSXXFXXVGXXXXXCXXXXLXKXXXXXLXXXXXXXXVLXXXXDHXXXGSXXXXPXXILYGXXXXGXXXFXXXXHXLXXKXXNXEGKXXYIXRHXXXXXXXXXXPVXLSGYGVELXXKSTEYKXXDDXXXXXXXGXXXXXXXXXXXXXXXGFXFXXLKXLXPXLXXXLXXXRXXLXXXXDEXAXLKXWELQDLXXQAAXXIXXXXXXXXXXXXXLXXXXXXXQNFPXXARXLXXXXXVSXXLRXEVXXNXXXXXXXXXXXXGXXXLXINGLXXDXXXXDXFSLXXXLKXEXXXXXXXHXLGIXXXXXXXILXXXXXXXXXXXFAXDXRXXXXXXXXDIRXXXXXXXAXXWVNXIEXDXXYXXWPXSVQXLLXPXXPGXLRXIXKNLXXXVFVVDPXXXXXXXXXXXXXXFXXXXXPXRXGXVFAVNDXXXXXXXXDXXVAXLXXFNYVSXXSDXXXALXXLXXIYXXXXXXXXXXXXXXXXXLEXXXXXDXXXAXXXXXLXXXSXYDXXRXXXXXXXXXLGXXXXXXPXVLXNGXXXXXXXXXXDXNXEXXIXXXIXXXTXXXQXAVXXGXLXXDXXVXXXXXLXQXXVXPRXNXRILXSAXXXXXYXDIXXXXXXNXXLXXVXXXXXLXXXDXXXXXXXXXKYXXKXXXXSXXXXXXXXXXXXTXXWVADFXXXXGRXXLXXXLXXXXXXXXVRXXXIXNXXXXXXXXXXXXXXXXXXAALXXXPXXXAKXXXXKXXKXXXXXEXXXXXXXXXXXXVGGMDXXLXXXXXXXXXKXXXXXXXLXXXXXXXXVLXLXKXQRXVIXNGRXIGPLXSXEXFXXADFXLLXXXXXXXXXXKIXXXXXXXXXXVNXXXXXXXSXXLXXLXXXXXXXXXXXXXXKXEXXXPXXXXXDXHSVXXXTLXXXXXXXXXXDVXAVLDPLXXXAQKLXXILXXXXXLXNXXXXXXLNPXXXLSXXPLKRFYRYXXXXEXXFDAXGXXXXXXXXXFXXLPXXPLLTXXLXXPXSXWVEXVXXXYDLDNIKLEXXXXXXXXXXVXAEFXLXXLLLXGXCXDXXXGXPPRGLQLXLGTXXNPXXXDXTIVMANLGYFQLXXXKANPGAXWLXXRDGRSXXIYXIXSHXXGTXXXXDXXXXXXXQVXXXSFXXXXXXVXVXKKPGMXXXXLLSDXXXEXXXEXGXXWSXXXXFXXXXXXXXXXXXDXXXINIFSVXASGXHLYERFLRIMXXSVLKXXXTKXPVKFWFLKNXYLSPXFKXXXPXXAKXYNFXYELIXXXYKWPRWLHQQXXXEKQRXIWGYKILFLDVLFPLXVXKVIFVDADQIVRXDLXELXDFDXLXGAPYGYTPFCDSRXEMDGFRFWKXGYXXWHLXGRXXXXYHISALYVVDLXRFRKIAAGDRLRGQYQXLSXDPNSLSNLDQDLPNNMIHQVPIKSLPQXXXXWLWCETWCXDXSKKXAKTIDLCNNPXTKEXKLXXAXRIVXEXWDYDXEIXXLXXXXXXXXXXXXXXXXXXXXXXXXXXXXXXXXXXXXXHXEL

SEQ ID NO: 3840 - protein, 1487 aa, Elephantulus edwardii
LAVRLVLGAVWLLGVASASKEVTAHLAAKWPETPLLLEASEFMAEESNEKFWQFLETVKELTIYKHAESDYSYYNLILKKAGQFLDNLHINLLKFAFSLRAYSPTIQMFQQIAADEPPPEGCSAFVAIHEEHTCKISGIKKLLKKARKAKSRSRPYLFKADHIFPTNKENLPVVILYAEIGTKGFGKFHKVLSKKAQNEEIMYVLRHYIQAGLFVSLFLVSRLKGSRHHSMNASDVEDKTEAGEIQGFLFGKLKEIHSDLKDNLTTFRKYLIESSKELMPLKVWELQDLSFQAASQIMSTPVYDAIKLMKDISQNYPVKARSLSRIAVNKQMREEIQENQKHLQDRFDIRPGDTRLYINGIHIDIEGSDPFSMLDMLKLEGKLMNGLQNLGINGDDISKFLKLNSQLWEYTYALDIRHSSIKWINDLENDDVYITWPTSCQELLRATFSGNIPFIRRNFHNLVLFIDPAQEYASDFIRLGLLLHYNKIPLRIGYVFILNTDDEVDGMKDAGVALWRAFTFMTKEADVLQAFMNIAHMYLNLQDQNILTVDIVKNGLQDYFPHANLGDILGIHSKYDQERKAGASFYKMSGLGPLPQALYNGEPLRPEEMHVKEIETAVFRRMMDTNAYLQREVYMDRLNDHTNVIDFLMDKSTVVPRINSLILHTKPQYLNFIPTSVTADIEDFATFSFLDSQDKTVVIAKNMHYLTQGDAVISPVTLWIIADFDKPSGRKLLHNALKHMKRSVASRFGVIYNPTSKVTEDNTIISRGILTAFLTQKNKNLKSFLRKLTTEEIATALHSGEKIKTFLTEEMDQKTFEKKYNTVGVNIFRTHQLFCQNVLKLSPGEIGVVSNGKFLGPLDEALYVEDFYLLEKITYTSLVEKIKDIVKNMETNSQNMSDLIMKVDALISSLPERVSQYDVTFPKENHSVIKINPKENDTFFDVVAVADPLTRETQKMAQLLVVLDKIINMKVKLFMNCRGKLSEAPLKSFYRFVLEPELMRGTGGINSLGPAARFLDIPETPLLTLNMITPEGWLVETVHSNCDLDNIHLKDIERMVTAEYELEYLLLEGHCFDVATEQPPRGLQFTLGTKTRPVLVDTIVMANLGYFQLKANPGAWILKLRQGKSEDIYQIVGHEGTDSGRNVSNAVVLLNSFKSKILEIKVQKKPDKIKEDVLADKDEKKKGMWHSIKSFTMKLIKDDGEADVLNIFSVASGHLYERFLRIMMLSVLRHTKTPVKFWFLKNYLSPTFKEVIPYMAEKYGFQYELIQYRWPRWLHQQTEKQRIIWGYKILFLDVLFPLAVNKIIFVDADQIVRHDLKELRDLDLGGAPYGYTPFCDSRTDMDGYRFWKTGYWASHLSKRKYHISALYVVDLKKFRKIAAGDRLRGRYQTLSQDPNSLSNLDQDLPNNMIYQVAIKSLPQDWLWCETWCDDESKQRAKTIDLCNNPKTKEPKLKAATRIIPEWVEYDREIQQLLEDIKNEKKNASYED

SEQ ID NO: 3841 - protein, 1499 aa, Aedes albopictus
MRICYGLVLLGLVALLETATGESKSHPVTTQLSAKWGITPVELEIAEFIEEENVNLFWDYIDLLNKIPNGLHSIGTERDRYRKSIELAESLLGVGQTNLLKLALSLHSFSAKVQAHLQIANQVLKQGDCETSAFVTIGGKVACDEDELRSILKALDKDPTKVEVHILDHVYPASENNSLTAILYAQIGTELFEKLHGILKEKAEQGAVRYVLRHFVKTVPNRKMRLSGYGVELHLKSTEYKSQDDSPRPQDQETMFSDDSAEPEVEGFDFVKLKERFPHLSHSLDRFRNALQEKHEEIAPLKAWEFQELGLQAAQRIAQIQGEEALQILQFTAQNFPTQAKSLLAQTVSEDFKKEMRHNIEVLGRNLNLQPPDSALFLNGLFFDADTIDTITLLDTLRSEMHVLEGLNRINLRGKAAAPLLALDLSSTSKEFAIDIRDSAITWINDLENDAQYRRWPGSVMDLLRPTFPGMLRNIRKNLFNLVLVIDPVANSDNGRGIVKLAESFVVHSAPVRVGLVFDTRGSSDKEMDYRSIVCAFNYVHQKKSSSEALGFLTDLFATTSKRDITYDDVRKQLKKTFSKLKSDEVEEILGEDSDFDYGRQLSQEFVGRLGLKSTPQALMNGVLLAQNTLNTDDFEETILTEIMQQTPTIQKAVYKGDLNDGEPVIDYLMKQPHVMPRLNQRILSAEDPTFLDVSGNPHPDLEDVSALAQLSNSDLTATLMKNLKYMGGKSTYEKFMGYRLHFHSVWVVADLKHSDGRKLLQNALRFMKSTSGTRVAFVPNVDGSDAARSQLKKDLNALVWATINTLRPEEATELVVKLLKQAEEGKDYEVPDSVLGFLPATQLHLKMLRAYCQRVLKLKASTNGLVANGRVLGPFEHGEVFDSEDFGLLEKFISLQYTDKIRKALKEASVDGEDIEVSSDTIFRLVAILVPRQQSKSRFNIPTELQEHHTVVKLPPKSNDLPFFEIVAVLDPASRGAQKLSSLLILLRNVVNCNMRLVLCAVDRHSDMPVKTFYRFVVEPELQFMPDGKHAPGPYAKFVGLPANPLLTQSLNVPENWLVEVVRSVYDLDNIKLSEINGPVHSEYELEYLLLEGHCFDTTTGSPPRGLQITLGTEEHPIVVDTIVMANLGYFQLKANPGAEDTRVVVSSLKSHVLKLRVTKKPGKANADLLGDDKESGGGIWDSISSMVGTGDAQDKEVLNIFSVASGHLYERLLRIMMLSLLKHTKTPVKFWFLKNYLSPQFIDFLPYMAKEYNFQYELVQYKWPRWLHQQTEKQRIIWGYKILFLDVLFPLDVKKIIFVDADQIVRADMKELNDFDLGGAPYGYTPFCDSRQEMEGFRFWKQGYWRNHLQGRKYHISALYVVDLKRFRKIAAGDRIRGQYQALSQDPNSLSNLDQDLPNNMIHQVAIKSLPQEWLWCETWCSSDTLQYAKTIDLCNNPLTKEAKLTAAQRIVPEWKDYDAEIKRLQAKVDELEHEAGQISHSQGEASSNQEAQHTEL

SEQ ID NO: 3842 - protein, 1647 aa, Ascoidea rubescens
MSSSRWFSYALLLYFSYMLAIASSLASSQNSVNVKLYSSWLNPPFALQILETISNQNESLYLPTILKLLNINDIDALSIHDIDAINSIDLSDACELSPVFNDKFYYDNTFNTLLNNDSKLVYDIYLANHYYSPTVISHYNYYNSSVIPNFNIPQSSPRDSWILFDDKIISDPTDLFALQIDNSNNNNNKINELILPFDRVIGNYSTNNLPLLILYGNINDPSFKNFFISLYQNVLAKKLNFVWRYIPEYNTKIDYELLSGYGVDLTLKRTDYIVIDDRDVFNNSNSNSNSNSKQNSNIEKIDTDDSDILNTHFSDIQSVPKKRIKNLDLKLVNYVLNYSNNSYTNFKRLIQILNDFPKFSNLIAFSKSFKINKKRDQKIKNIIDITNSNSKIGLSKDSIGLYINGKPLSDSKFNFFNLINLFNNELNLIHFLKKNLKLSTFNSKSILTRFAFMLTYLRRNFKSNSNNLFKRFNLNKNSHILGDKFFYLNDIESDSFYSHLKIDRSIFLQQSKEIRPGQLPNLKENLFDMIFVLNLNDDSLLNIAMSISSLILDRGIPQRIGFLPILQNASDKNEDEKLINKLLFHKFYKTGYNDQVNSKKDLYSFLERLSNSPGKVKKELLDHYNNNEDDYNLDEYDNSFFLKNYAIKKPYIIIDGVFTEFDKYNQWQYAIANQLYKDVNLIAKIIQENLSSKNKEFENKKLIDYLYEKSLSSRNLKIMPEHDNIKGIDDGIIDEGFTYKFFSEEFFKTIRYNEKIQENTVEFQYEKKIRRINSEQKIPITTYLIGDFNSKPFLKEVVELLKMEYSLFEYDQDYKARIKLVNTAIDNSNFKKIKESLTNKNIGKSITLKDTMELVVDIIERNSNLIEFKDQHKQHFNKEVISLLKSIDIDIEAYNYAPVIIVNSRLIKFNSEEELFTEKEIDFLVLYEIENRLKPIDILRTDLDISFKNQILIYQKTEITLFKDYYDWFELLSTVLTKSFFDTNQVDYQIGEKITRYDLSSITYEDVSIEIGNENAKSVFRSKDLADLEIVAIIDPISEESQKILTMLDGFTNLARFSNLCHITILLQPDLEMSEISIKRFYRGLYLSNVTFDSDSGEIDRNNYNAKFENVPEKTLFTLDMDVSTSWIVMPKTSIWDLDNIKLDSTEFGYVEGIYELRNILIEGHSKDIEKKIPPVGAQVELIDVQDKTYSDTNIMANLGYLQLKSNPGLWKFQIKPNSKSREIYSINDIFIIDNEGKKISRNDSYLGISDMNGLTIFPRFVKNPGMEGSSLIIKNDQDADDFDASTFKKILNLDGIVNKLPRLLKNVFNKISGKDNELVGSNYNLDKADINIFTIASGHLYERFLSIMTASVRKHTKHSIKFWLIENFMSPSFKEFLPYLAKKYDFKYELITYKWPFWLRPQREKQRTFWGYKILFLDVIFPQDLDKVIFVDSDQICRTDLKELVDLNLKGAPYGYTPMCDSRKEMEGFRFWKQGYWANLLGDEYKYHISALYVIDLKKFRGIAAGDRLRQHYQSLSADPNSLSNLDQDLPNNLQKEIKIFSLPQDWLWCETWCSDESLRTAKTIDLCNNPLTREPKLDRARRQIKEWSDYDDEITALREEAKQIKAVELKEAEIHLVSASDSADSAASDSEEDFDADLADFHDEL

SEQ ID NO: 3843 - protein, 1664 aa, Quercus suber
MGTFRCRSGLWVMILVVVLLGLCEIGSVVAQNRRPKNVQVAVRAKWSGTSLLLEAGELLSKEWKDLFWDFIEVWLHTEDSLDSSTAKGCLKKILEHGHSLLSEPLASLFEFSLMMRSSSPRLVLYQQLAEESLSSFPPADEGISNNVGVEALETNAKMENKKSDLLLVGVNLKSPGGKCCWVDTGGSLFFDVSEMLLWLRNPTEPAGDSFQQPELFDFDHIHFGSSAGSPVAILYGALGTDCFKKFHVKLVEAAKEGKVKYVVRPVLPSGCETKTGHCGAVGTRDSLNLGGYGVELALKNMEYKAMDDSAVKKGVTLEDPRTEDLSQEVRGFIFSKILERKPELTSEIMAFRDYLLSSTVSDTLDVWELKDLGHQTAQRIVHASDPLQSMQEISQNFPSIVSSLSRMKLNDSVKDEIAANQRMIPPGKSLMALNGALINIEDIDLYLLLDMVHQDLLLADQYSKLKIPHPTIRKLLSSLPPQESSMFRVDFRSTHVHYLNNLEEDAMYKRWRNNLNEILMPVFPGQLRYIRKNLYHAVYVLDPATICGLESIDTITSLYEDNFPMRFGVILYSTKFVKHMELTGAGIYSSVKENDSQNEDDISSLIIRLFIYIKENHGVKTAFQFLGNVNKLRIEGDGSLDDVPEMHHVEGAFVETVLPNVKSPPQDILLKLEREQTFKELSQEGSMFVFKLGLAKLQCCLLMNGLVFDSNQDALINAMNDELPRIQEQVYYGHINSRTDVLEKFLSENGISRYNPQIIANSKPRFISLSTSILGGESVLNDINYLHSPETINDLKPVTHLLAVDVATKKGMKLLHEGLRYLIEGSKGARVGMLFSVNQDADLYSLLFVNVFEITASSFSHKKNALNFLDNFCSFYEQKYIFASSKAADNTQAFLDMVYELAEANGLPSNAFKSALTEVSIDQLRKHLNKVSHFLYRQLGQEFGVNAVITNGRVMFPVDESTFLSHDLHLLESVELKQRIKHIVEIIEEVNWQDTDPDAITSKFISDAIMVVSSSMAMRDRSSESARFEVLNAEYSAVVFDNENSTIHIDAVVDPLSPSGQKLSSILRVLQKYIQPSMRIVLNPLSSLVDLPLKNYYRYVVPTMDDFSGTDYTINGPKAFFANMPLSKTLTMNLDVPEPWLVEPVIAVHDLDNILLENLGDTRTLQAVFDLEALVLTGHCSEKDHDPPRGLQLILGTKSTPHLVDTIVMANLGYWQMKVSPGVWYLQLAPGRSSELYVLKDDGDGSQENQFSKRITISDLRGKVVHLEVMKKKGKEHDKLLVPDDDDNSEEEKGNGWNSNFLKWASGFIGGSEQSRKSESTSVEQGKGGRHGKTINIFSIASGHLYERFLKIMILSVLKNTRRPVKFWFIKNYLSPQFKDVIPHMAQEYGFDYELITYKWPTWLHKQKEKQRIIWAYKILFLDVIFPISLEKVIFVDADQIVRADMGELYDMDIKGRPLAYTPFCDNNKDMDGYRFWRQGFWKEHLRGRPYHISALYVVDLKKFRETAAGDNLRVFYESLSKDPNSLSNLDQDLPNYAQHTVPIFSLPQEWLWCESWCGNATKSKAKTIDLCNNPMTKEPKLQGARRIVSEWPDLDSEATGFTAKFLGDEVELQEPSPNQSQTSTSKTFSEVDLESKAESSSKVDLESKEESSSEVDLETKAEL

SEQ ID NO: 3844 - protein, 1512 aa, Terfezia boudieri
MRLVSLVASLVVIAQFPQNIVAAPAVTVGLKPSWGAAPFLLELLETAAEEEKDSYFPLLDKIATGEFEKQTTDEALYSRFLQVAQQEGFLTDTVTLSSFNLALSMNSVAPRIEAHYRYYEDTLEPVMGVSYKPRCRVWLQWSQKQHCAKSIESMISTWERFPNDRTELAFDRVLKTKPDVPAAILHADIEDPDFLHFHSILTDFAKRGVLSYRVRYRAPKNPVKRQVLLGGYGAELALKKTDYKVMDDREVQNQNASNEEPVKQEGLADDEEISDIKPLHPKDVTSLGIKAASFIMSSDYKLDSLLRLVQDLPKHSSALSTTEINSALADELIENRDIFLNPGANAIWVNGLQLEDSEINAFALLSTLRRERRFIKKFETLGLTKTQAIELLSHKVIREARQNELPLRFDYRDDIEGGSVIIWLNDLENDERYKGWSTDPKILLRRVYPGQLHQLKRNIHNLVLPLDLTSLEDVSLLTEHLMMFVERGIALRFGIVPVIKSEQSMEQAKLFYYLFDTYGLEPALKYLEKSLEQEKLSKPNKKIFDAVCKESSLKPGKTANSLEDALVSEHVKKMAEDAIKWSKRLGITDIPQVFINGLAVPRTEDWMQQMSGRLSTDVMYLQRKVHEGVAFQGPTSDVTLLDHMLLIGAKRSRNVHIFPEDEVTVNLVDIAELAKAHALVYEKLPALATEQPDKLIDTTVWVVGDFDEKDGYELLRAVAEAQKKAVGISIILINNPELVSERPAFSTLLYQLNVKGLIKTSEQLFQFIELLTEVDEYHDVKSKTWFFNEHIEAGKFWRSCQELLQKAGFKPGQRGLVVNGRVVGPIPAKDDFSAADVKQLFMYEWEKRIMPVLEAADDLGALDNLSSSTNAAILTNLVALTTIPEGSQELFVDPPSMRLNLYDQWRAEHSAIVTGDKHTAIFHIVASIDPTSELAQRYVPILKVLSEMDGVYLRLFLNPERVLNDLTVKRFYRYVLDSKPRFGAEGQLIYPKADFHKMPVDALLTLGLDVPPSWLVTPKVCVFDPDNIQLSSLRGRFRGENLEAIYELRSILIQGHSRDITIGGPPKGAQLVLGNGRDPHFADTIVMANVGYFQFKANPGMWKLSLKDGNSATIFNIDDAGTRGYNNKNHDGNPQLAVVTFQGATIFPRLSRKAGMEAADVLAEPAKLKDTLYYVKEGLRKTDEVLQVIGILKPPKNQVIEKKQADINIFSVASGHLYERFLNIMILSVMKHTDHTVKFWFIDNFLSPSFKDFIPHMAKEYSFEYELITYKWPHWLRGQKEKQREIWGYKILFLDVLFPLDLDKVIFVDADQIVRTDLKELVDLDLQGAPYAFTPMCDSRKEIEGFRFWKQGYWKNFLRGLPYHISALYVVDLKRFRQIAAGDRLRQQYHQLSADPGSLANLDQDLPNHMQQFLPIYSLPQDWLWCETWCSDESLATAKTIDLCNNPMTKEPKLDRARRQVPEWTLYDSEVATLAKRVRNDEESVHHLADSGAEKSKAETPAVEDNDVKDEL

SEQ ID NO: 3845 - protein, 1596 aa, Selaginella moellendorffii
MSKALLPLLAWVAILVLAAAAAHRLQKNVIVELHAKWSGTSLLLEMGELVAKERDDNFWKFIDSWIEREEKESQSSSNSTSNCLEQILSQGSALLDGHLASLLDLSLSLRSASPKLVVYAQLALESLSAFNLHSEGSDRPRPPRQKCCWVDVGSSLLLEESELLHWLKSLSGEPLLDKTLDLFEFDHVYPQSASFAYTAILYGALGTPCFKRFHSILSDSSKTQDLVRYVARPFLPDGCEESCSACSKAGVGEPLNLAGYGVELALKNMEYKAIDDSEVKAGGSSEDTSTEDPLAQEVRGFIFSRLLERKPHLEGELMTFRDQLLSSEISDSMNVWEVKDLGYQAAQRIVGASEPLRLMQELNQNFPNLVSSLSRMKINETIKQEIVSNQQMISPGRNLLAINGALVNPESLDLFTLIHMVHQELSFADKILKMKVPSSSVSKLLRLPEPVESVAVRVDFRSKDFVHYLNDLEEDNKYKRWRTNLNELLMPAFPGQLRYIRKNLYHAVYVLDPVSVRGLRTVEMILHYYHNNLPMRFGLILLSPADLHSLDEENGAGEKDDLSSLMIRLFLYVKNTGGVYNAFEFLKNVLDSYSEDSEENYTEASHIEEGFVKSLGTMTKTSAMEVFSKLKNGEDYRKEAFESSQFVYRLGLSEVYPCLLMNGLVYGESQPQFSVMAAMNEELPKIQEMVYFGQIHSRTDVLDKFLAEEGLKRYNPKIAGTGKDSKYVSVAPVVSESHPVVCSLQYLHTPGTEDDVKPVTHWLVVDLTKESGIRLLTQGVRYIMEGTDRGRLAILHNMKDADNTPESSKELLLPRLVSHVMQASSRRAKYLRLLHSFLTHYKSGTFEEVLHLYLSTAKEMGLDIAKEAILESSTLSTQLLQFHKEKKFVAELFGIRPGINAVATNGRISSQDSKPFIAEDLMLLESLMYRRRIKDVQEIIEDVKWEGLEPDDITRYVDLINVAFLSYFVVLSAYLSTVIMAVSSTMASRTRSSETAQFELLKADHSAIVRHVDGSPIQIDAVINPLSALAQRLTPLLLMLEEWLHPSIRIVLNPMSSLGDVPLKNFYRYVLPSKEEFLSGGIGPHARFSNMPPSKTLTLNLDVPEPWLVEPVVAIHDLDNIVLEKLDDERTLHAVFELEALMITGHCYEHNEPPRGLQLILGTKQHAHVVDTIVMANLGYFQLKAAPGVWTLGLARGRSSELYTLQGHKQGTDEGPISKQILVADMRGELVHLEVVKRRGMEDEKLLVVDDDNGKKTSLSDKTKGFFEWAANIMGTGEKKTSKQNTSASARHGETINIFSVASGHLYERFLKIMMLSVLKNTRRPVKFWFIKNYLSPQFKNLIPHVAVEYGFEYELVTYKWPTWLHKQTEKQRIIWAYKILFLDVIFPLSLKKVIFVDADQIVRADMGELYDMDIKGRPLAYTPFCDNNKDMDGYRFWSQGFWKEHLQGKPYHISALYVVDLDKFRQTAAGDNLRVFYENLSKDPNSLSNLDQDLPNYAQHTVPIYSLPQEWLWCESWCGNATKGRAKTIDLCNNPMTKEPKLQGARRIVQEWPALDEEAQLFTKRILGKGRDEENTMQVPKEPSSTNDADVKDEL

SEQ ID NO: 3846 - protein, 1736 aa, Pluteus cervinus
MGNKSRLKRGTVVATTLGLLQLASINLGVASASTSPPVNIALQSSWPAPPFLVEVLETISIENPDTFFTLLGAISNPNAPVPYHKLTPEAAQAALLKDAASYAFLTESEAKGFLNMYLSLHASTPKIEAFYQHYRSTFGEEGQDEGSKCGSWVDWYGQVVCDVDTLYRVAGVENGSGGSVHSHDRPKLLPFDHIHPPHENTLDRPPKTAILYGSVESSNLHDLHSALMSISSKPEAQVEYVFRHAPPQAKILEKNYLSGYGVALDLKKMDYLAVDDRHAYRSTSQKGDTVPDLSETEADSILALIQAQAQNAEPEERPTDSEGEPTDPNAPLTKEEIQELGYQASQLIYSSEDPLSTLLNLSQDFPKYTTSLSRLVKVDPDIRNELDNNAVKAQGGVNMFWLNGALLQESDVNPLTLIRLLKKERTIMHSITALGILKDEAMRLLTHQKIALKQKEGGVLDGLVDASDRQEGGGAVVYLNDIENDARYAKWSSSLYALVRPMFPGQFPNVRLNLFNIVLVLDLSKTSNLGFMFGTMGNIIERSYPFRVGVVPSLNTMEGLKMARLLYHLIETYGTQSAMEFYKGILPSQISHPTVQWDVLKYEYNEFLDLQDEKADEDVESKPKERVSFQTIINGQGPVQVPTDKILGYTKRLAVGDTGKSNEQGEITEGHAFVNGRYFEFNDNFLRAMQGEIATQLNHLQEAVYAGQLPDNADTYAIVQNYFYDLPSTTKRRNMYIVPKAPAGSPASLRIWNLPEVFMKTGWRTSPWTYVYPEGNSDIPVGMYVVADFDTELGFELAKEVLLYLTEDVGTRVTFVHSPTDPTNGSPEPLSVTWEEPDKVPLSRLFSHLLYENLASAASPRLILKSLAVPFYPHASLFAGGLTDQSDPTVPVSVDGVQWVASADHPLQVPVIKAPTEEEEEDEWDEAALGPKPKPMKTLLTRREAIDELVRGKEPSAFRVDDYADYVKRSRMMVREFGLKPGERAVIANGRLVGPFKGKGGEFLAQDFGTLEQYEVKKRTASFVEAVFDVLPYMHVVKGMDRPSFANLVSLGASVITSIQQPDPSEVGLFDAPLKPRHMTYQLLDSNYTSFESGDNITAIYQVSVLIDPLSETAQKWAPILQWLSTIPNTFTEIHMNPARYQEIPLKRFYRYNILHNLQFNEEGYEKPAQAVFSNLPIDPIYTLAMDVSSSWLVRPREALYDLDNIQLGNLAPEDSGVDAIFDLDYIIVDGHAREGGSMMPPRGLQLQLVNAQETAKVLKPNEDGGIETSTHEEAKPIADTQVMANLGYLQFKAKPGVFKLEVRPGRGRDIYEMESVGNEGWDSPDVAVAGSEITVTSFEGLTLYPRLRRRPGQETASVLADLSPKADTIEGILGGWASKIKSVFGAKEPESTAVAKTQQQAEINIFTVASGLLYERFVGIMILSVLRNTNSTVKFWFIENFLSPSFLEFIPHLAEAYNFQYELVTYKWPSWLRAQKEKQRIIWAYKILFLDVLFPMDLKKVIFVDADQIVRADLKELVDLDLHGAPYGYTPMGDDNTDMEGFRFWKTGYWKDFLRGKPYHISALYVVDLVRFRQLAAGDHLRGSYHQLSADPNSLANLDQDLPNNLQNEVPIYPLHEDWLWCETWCSKDRLHRAKTIDLCQNPLTKEPKLSRARQIPEWEEYDAEIARFARKLAKEGRIKSRIATADANVLASAGNANAAPPDTETKEKVEEPENAEVDKNEGERHKVDVPRDEL

SEQ ID NO: 3847 - protein, 1681 aa, Diplodia seriata
MSGTGSKIVLQDDTEHIHDMVCRCRWCLNATFLSRLVSTDELTDFTIVCGGHERKVHRLILSAASTYFAYLFRVRGVRETILGRIEFPETDPELVFAMVDWMYYGKIEVSAYGGVGGYSELLLECVYMYAMGEQYGVLGLPESAAYAVGAILHHQRYYLLEQVDDIVEMVDLVNATTMPRSPLRWQVWDSLLENGQAALLFAALAPPSASASQSHSPPINVALKARFNSPPYLVELLETAAFENATAYFPLLDRIADGYFDAKSSEQAQYDAFLQLLQDDGHITDPDALSSFQFALSIHTAAPRIEAHYQFYNTSVEPSLVPDQPDDCESWVLLNGKQYCSPDMDKEHGDVKNPRVKDLPFDRPMRQEYRSVPSVLYADITSPSFRNFHKTIIKTARAGETSYTLRHKPPKNTRNDPQDVHGYGVELALKRTDYIVIDDRQAEDDAKAPAADAAQAVLQDEEVADLKPLSESDLKGLGLKAGSFVMGSEDPLDTLLKLSQDFPKHSSAIAAHDVSKDFLKEHKANREAVLPPGYNILWINGVQVMPRDVDAFALLEHLRRERQIVNSVRKLGFTPPEAINVLANNNIAKAKDNDEPQRYDWRDSAEGGNVIVFLNNLEKDKRYAEWPESLRALLQPSYPGTLPSVKRDIQNVVIPVDLTNALDATLLVETLQSMVKRKLAVRWGIVPSTKNVRAERQAHVIYYLLEYHGLSAVMQYLEQSLKLKEIFEPSKTAFGTVTADAKIRGNRVAKSFDQLFEEPSVVQRVEAASTWLTRMAADGNSPPFFVNGVALRRNDEWLSSMSMRVSRDLNTIQKAVFENELDEDADDWLPGVFLANSLVRRNPMIVPEDEKDVKHVDMAQAYADYGHLIERLPTFKPAEDSEWFQWAQLIVLGDFDSNAGANLLADAYQFAAEHGDLETAFVHTGDVDRHSRLSYLLWKNKGQSFVDDLPEDFVPSSRELKECGEYWESMKPLMRIFDGDSGRESLVLNGRTVGLIRKRRPFTVDDLENLLTYERQKRIEPANKAIMDLGLEDKIKSPGASAQFTSLVALSTVSNVPEGIFDTPPTTRRDVFKFWNETHTCIKTGELETSPIQIVASVDPSSETAQRWLPILKVLSELSGVHMRLFLNPKERLSELPVKRFYRYVLASKPSFDENGSTEALQARFDGIPSEALLNLGLDVPPQWVVAAKESVHDLDNIKLSQLKGQSSIDAVYELEYILIEGHSRDLTNGMYPRGAQLDLRTTSNPRYADTIIMANLGYFQFKANPGFFDIELQPGRSQEIFTIDSAGTLGWEPRPGDRTKEIALMDFKGVTLYPRLSRRSGKEDEDVLEAPTTMVEDLAAKGAAFADGILSKVGINVKTGGSSRHADINIFSVASGHLYERMLNIMMVSVMKHTKHTVKFWFIEQFLSPSFKSFLPTLAASYGFEYEMVTYKWPHWLRGQKEKQREIWGYKILFLDVLFPLDLDKVIFVDADQIVRADMHELVTHDLEGAPYGFTPMCDSRTEMEGFRFWKQGYWKNFLKGRPYHISALYVVDLNRFRRLAAGDRLRQQYQQLSADPNSLSNLDQDLPNNMQVGLPIHSLPQDWLWCETWCSDDALRSAKTIDLCNNPQTKEPKLDRARRQVPEWTVYDEEIAALARKADAAAGIVAEDNGAEQDERLLEKVAEQAEEVEKEKAKKHDEL

SEQ ID NO: 3848 - protein, 1512 aa, Cavia porcellus
  MOD_RES (16)..(16): Any amino acid
  MOD_RES (702)..(702): Any amino acid
MALAKATKAVRLLLGXTALWLTLLAARKACASKAVTARLAAKWPDTPLLLEASEFMAEESNEKFWQFLETVGELSIYKQRESAYSYYSLILKKAGQFLDDLHVNLLKFAFSIRAYSPTIQMFQQIAADVPPPDGCNAFVVIHEKHTCKVNNIRKLLKKATLRPRPYLFEGDHKFPTDKENLPVVILYAEVGTRAFSEFHKVLSEKARSGKILYVLRHYVQKPSSRKMYLSGYGVELAIKSTEYKALDDTQAKTVTNTSMENEIEADEIQGFLFRKLKELHSELRDNLTVFQKYLIESNKEMMPLKVWELQDLSFQAASQIMTTPVYDAIKLMKDISQNFPIKARSLTRVAVNQQMRKEIQENQKDLKDRFHIQPGDAYLLINGLQVNTDTYDPFSILDMLKLEGKIMNGLRNLGIHQEDISKFLKLNSYDEKYILDIRHSSIVWINDLENDQMYAAWPASCKELLKQIFSETISVIKRNFHNLVLFIDPAKEYTFDFMKLAEIFYFHKFPLRIGFVFILNADDKVDGRNDAGVALWRAFNYILKERSVSEAFISILHMYQKVKDQSVLTVENVKSVLQNEFPHADIWDILGVHSKYDNGRKAGASFYKITGLGPLPQVIYNGEPFNHEELNSEELDIVVLHRMKGASVYLQRDILMGTLNDKMNAIDYLMDRNSVVPRINSVILHAQHQYLNLISSQVTTDXEDFSTFSFLESQDKSAMIAKNMHYLTQEDNVISAVTLWIIADFDTSSGRKLLYNALIHMKKSVHSRLGVIYNPTSKINEENTAISRGILAAFLTQKNNLLWSFLKKLSKEETATAIYSGSKIKTFLTEGMDKNAFEKKYNTVGVNIFRTHQLFCQDVLKLRPGEISIVSNGKFLGPLNEEIYVEDFYLLEKIAFNNLAEKIKGIVENMKISSENMSDLIMKVDALLSSWPKQTPWYNVTFLKEKHSIIKINPQGNDVVFDVVAIVDPLTREAQKMAQLLLVLGKIINMNVKLFMNCKSKLSEAPLESFYRFVLEPELMSGADGNSFLGPVAKFLDIPESPLLTLNVITPESWLVETVHSNCDLDNIHLKDIEKAVTAEYELEYLLLEGHCLDSVTKEPPRGLQFTLGTKTKPVVVDTIVMANLGYFQLKANPGAWILKLRQGKSEDIYQIIGHEGTDSPSNIQDVIVVLNSFKSKILEVEVKKKPDKINEDILTDNEEKKGMWDSIKSFTRRLHEDDDKKEKDVLNIFSVASGHLYERFLRIMMVSVLRNTKTPVKFWFLKNYLSPSFKEVIPHMAKEYGFQYELVQYKWPHWLHQQTEKQRIIWGYKILFLDVLFPLAVDKIIFVDADQIVRHDLKELRDLDLGGAPYGYTPFCDSRTEMEGYRFWKTGYWASRLLGRKYHISALYVVDFKKFRRIAAGDRLRGRYQSLSQDPNSLSNLDQDLPNDMIYQVAIKSLPQDWLWCETWCDDESKKRAKTIDLCNNPKTKEPKLEAAARIIPEWVEYDTEIRQLLDRLENKKKSKILAHDEL

SEQ ID NO: 3849 - protein, 1631 aa, Momordica charantia
MGTSSFRSACGALIIISLLGIYGGSGVFAETRRPKNVQVAVRAKWSGTSVLLEAGELLAKERKDLYWDFIEVWIREEGNDSDASTAKDCLKKILKHGCFLLSDPLASLFEFSLILRSASPRLVLYQQLADESLSSFPLPEESISNIVGEGNESIERKKSDTSVVGRKPKTPGDRCCWVDTGGSLFFDVPELQLWLQNPAERVGDSIQPPDLYDFDHVHFGSSSGSTVAILYGALGTDCFKQFHVTLVKAAQEGKVKYVVRPVIPSGCELKMNSCGAVGTRGSLNLGGYGVELALKNMEYKAMDDSAIKKGVTLEDPRTEDLSQEVRGFIFSKILERKPELTSEIMAFRDYLLSSTVSDTLNVWELKDLGHQTAQRIVQASDPLQSMQEISQNFPSIVSSLSRMKLNDSVKDEITANQRMIPSGKSLMALNGALINIEDVDLYLLIDVIHQDLLLADQFTKLKIPHHSIRKLLSSLPPADSDMLRVDFRSSHVHFLNNLEEDAMYKRWRSNINEILMPVFPGQLRYIRKNLFHAVYVLDPATACGLQTIDMILSLYENHFPIRFGVLLYSSKFIKETERGDDGLTKSEEDTSSLVIQLFIYFKENHGILTAFQFLSNVNKLRIEADGLADDAPEMHHVEGAFVDTLLPKSKSHPQDVLLKLEKEQTFKDLADEGSMFIFSLGLSKLECSLLMNGLVFDSSEESLINAMNEELPRIQEQVYYGHISSRTNVLEKFLSDSGISRYNPQIVAEGKPRFISMFASTHGGESLLNGFNYLHSPGTMDDLKPVTHLLVIDVASKKGIKLLEEGLHYLMRGSKSARVGFLFTASNHTSESSLLLVKVFEISASLHSHKKKVLDFLDQLCSIYSQKFIFESSVTVDSPQEFIEEACKLAEANELPPKAYRIAFSDSFVDEMRKYLGQVELLSGQLGLEANVNAVITNGRVTLLTDESSFLSHDLHLLEAVEFKRRIKHIVEIVEEVNWDDFDPDTLTSNFISDVIMFVSSSMARRERSSESARFEVLNAEYSAIVVGNDNSSIHIDAVIDPLSPSGQKLSSILRVLSKYVQPSMRIILNPLSSLVDLPLKNYYRYVLPSVDDFSTTDVTVNGPKAFFANMPLSKTLTMNLDVPEPWLVEPVIAVHDLDNILLENIGDIRTLQAVFELEALVLTGHCSEKNHEPPRGLQLILGTKSTLHLVDTLVMSNLGYWQMKVSPGVWHLQLAPGRSSELYLLKQDGGISQDKPLSKRIIIDDLRGKVVHMEVEKKKGKEHEKLLVPDGGDNLLENNKVGYNYWNSNFLKWATGLIGSNDQSKQTKSTAMEQGKGGRHGKTINIFSIASGHLYERFLKIMILSVLKNTRRPVKFWFIKNYLSPQFKDVIPHMAEEYGFDYELITYKWPTWLHKQKEKQRIIWAYKILFLDVIFPLSLEKVIFVDADQIVRTDMGELYDMDIKGKPLAYTPFCDNNKDMDGYRFWRQGFWKEHLRGKAYHISALYVVDLKKFRETAAGDNLRVFYESLSKDPNSLSNLDQDLPNYAQHTVPIFSLPQEWLWCESWCGNATKSKAKTIDLCNNPMTKEPKLQGAKRIVPEWPDLDLEARAFTAKILGDVNPKTPDILTDQVDNSAIKKSSDEDLESKAEL

SEQ ID NO: 3850 - protein, 242 aa, Oryza sativa
LVTYKWPTWLHKQKEKQRIIWAYKILFLDVIFPLSLRKVIFVDADQIVRADMGELYDMNLKGRPLAYTPFCDNNKEMDGYRFWKQGFWKDHLRGRPYHISALYVVDLAKFRQTASGDTLRVFYETLSKDPNSLSNLDQDLPNYAQHTVPIFSLPQEWLWCESWCGNATKARAKTIDLCNNPMTKEPKLQGAKRIVPEWVDLDSEARQFTARILGDNPESPGTTSPPSDTPKSDDKGAKHDEL

SEQ ID NO: 3851 - protein, 1635 aa, Pisolithus tinctorius
MTCIHPLLAFLALGLVAGAYGASPPVTVSLRSSFRAADPLIEALETVAMEDDSSLFSLLSAFPLQDKPSTPRDAHTSVVDLASSLMDVSALASVRARLALHAASPRLAASAEHYDLRLSNISDKNDRLSSVECASWVDWYGRVVCDADSLLQLANDGAGNGMPRPTRLPFDHVHSVHHLLDEPQYTVVHYADPTAPSFASLHAMLLSLEPKVEYVLRWGRGASEKKTSELSSYLSGYGVALDLKKMDYLVIDDRHWSGGASDSSGSDASPSSHANTKDKNFSEEALSCVFESLPYVDEHAEARAKAGEPLSTQEIADLGLKATQFLASFSVQSRMGLVPAHQCWDQSPSIEALFRTLSSSFPLYATSLARKIPVSDELRDEVLENWAKATPGANMVWVNGRVLNDDQGASGNIFGILRTLQRERRLVKSLVGLGLTHEQAIELLMHPVYSSSQSTGSHFESRQRQGGEENKEQKRTFTISPKFADFLDGLVDASDRQEGGDVVIWLNDLEKDPRYSRVSSSLVGLLRVHAMSLFSPALHVRYNLMNVVFVLDLSQLRSFSILSSLHDNFVMRGYPVRWGFVPETRGEGLKMARLSYYIERIYGRDTMTSFIQRLLAMHNQRRLTTLSWDVVHELFDTFGAVDNLVAVTGGVVSPLDGPAGGDLLFRAQRYAKRLGVGAQGEIGKGHVFVNGRHLSLNDNVMRQIASEATAQLQILQEMVYVGEITDVDGPSLSTFFYDLPSTVTRRNPYISVHFKPGHNPDSRGLEIFDLTEMFSSTGFAPGEGAFVLPANGYNDVVPMTMYIIADLDTPQGIKLVTEALAFIANTANTRVTFVHNSEVANSGGRASSLLTTLIQARALSHVSSVDLLATLAGDNQKSAYELLRNERLASIATTEAEVSGLTQVMRLVARHLGLRPGERAVLVNGRLVGPFDSDSEFLKEDFETLETFEKKRRVSQIVDALDDILRGGDNLERSKRSDLIAVTSSIIYSDQQPDPSEVGLFDTAPRPRTQNYRFLSGKYTKFTFGDQSASLTHLALLLDPLSDAAQKWSSVLEYHTSLFPEVYIELYLNPSQLSEIPLKRFYRYNVMPSLQYDENGQEIPARVMFTALPEEPIYTLVMDVPHSWLVRPRSALYDLDNIQLGLLQGEERTRGVQALYALDYLVVEGHVFELHTNNPPRGVQLQLIDVADQSVVDDTQVVANLGYTQFKARPGTFRFEIRQGRGRTPYSLDSVGADGWNSPPVAEVGDEFTVMDFDRLTLYPRLARRPGMEGMDVLDDLDHVEGESGLVDNLLSKLSSFFKPATDESMAVTKKPGETAEINIFTVASGLLYERFASIMILSVLRNTKSTVKFWFIENFLSPSFLEFIPHMAEEYGFQYELVTYKWPSWLRPQKEKQRIIWAYKILFLDVLFPMDLKKVIFVDADQIVRADLKELVELDLHGAPYAYVPMGDDNYEMEGFRFWKTGYWRDFLKGRPYHISALYVVDLSRFRQMAAGDILRGQYQLLSADPNSLANLDQDLPNNLQREVPIYSLHEDWLWCETWCSKDRLHRAKTIDLCQNPLTKEPKLSRARQIPEWEEYDAEIAQFVRKLAAEGKIHGGASTADSKILAGDSASAPVPLSSSQQADMAGPPRAHDEL

SEQ ID NO: 3852 - protein, 1397 aa, Gekko japonicus
MFQQIAADEPPPKGCRAFVVIHGRSTCKANEIKKFLTKAAARPRPYLFRGDHRFPALSETGPVVILYAEMGTKDFATFHKVLSEKAQKEEIVYVLRHFVQKPSSEKMYLSGYGVELAIKSTEYKAVDDSQAKGASNVTEEEDNKESDVQGFLFDTLKQNYPDLKDNLTELRKYLVESANDTEPLKVWELQDISLQAASQILTVPVHNALKVMKDIAQNFPIKARSLTRVLANLQMRKEIKENQKHFHETLGLQPGEARLFLNGLPIDLDFHDPFSILETLKSEGKAMHGLHTLGIQGDILSKFMRLSVHEADDAYALDFRHSSIIWINDIEKDQPYDKWPTSFQELLKPAFRGMMRQIRRNLYNLVLFIDPLQEEALAFMKLVEVIYNQRVPIRIGFVFILNTDEEVDGNKDAGVALWRAFNYVADEVDVAKAFTTTTNMYHEVKNGGVLSVEHVKLVLRREFPYADMQDILGVHTDYDDNRMAGAAFYQKTGLGPLPQALFNGVPFNRKEMNVAELETSLQKIMDATESFQRAVFMGQLNDHKDVVDFIIEQQNVVSHINEKILSSEKRYLNFISSPVPVDMEDYSTFSFLDSQDKAVVLSENMNYVTRKDEDVIYAVTVWIVADFDRPDGRQLLSNALKHLKTSSYIQIGIVNNPASKITEENTLVARAIVAAFLTQKNTSLRNFLDKIVKEETAKSLARGMKIKKLLVSGMDDDAFEKKYNTMGVDSIRAHRIFCQEVLKLLPGQMAVVSNGRVIGPLHENEFYPKDFDLLEKVTLSSAAMKIKTLVKEMGLASKRGSRLVMKVDALLSSLPKTDVRQDVEFLKEQLSVLKLEPQQNEPFLDVVGIVDPLTREAQKLAHLLIVLGQVVNMRVKLFMNCRTKLSEAPLNSFYRFVLEPELTSGTHNVFPRAPGANFLEMPESPLLTLNMITPESWIVEAVNSSYDLDNIHLKEVEGIVAAEYELEYLLLEGHCFDVTTRQPPRGLQFTLGTKNNPVKVDTIVMANLGYFQLKANPGVWILRLREGRSEEIYEIFKHEGAESSEEEVIVVLNSFRSKIIKVQVQKKADKVNEDLLSDGVTEEDGSFASSVGQAQLEGKEKKIDILNIFSVASGHLYERFLRIMMLSVLRHTKTPVKFWFLENYLSPTFKEVIPYMAEEYGFQYELVQYKWPRWLHQQTEKQRIIWGYKILFLDVLFPLAVDKIIFVDADQIVRSDLKELRDLNLKGAPYGYTPFCDSRKEMDGYRFWKSGYWASHLGRRKYHISALYVVDLKRFRKIAAGDRLRGQYQALSQDPNSLSNLDQDLPNNMIHQVAIKSLPQEWLWCETWCDDKSKRKAKTIDLCNNPKTKEPKLEAALRIVPEWAKYDSEIQQLISRNRGRKENMAQPSPKESKHDEL

SEQ ID NO: 3853 - protein, 1519 aa, Athalia rosae
MWAFVFLYSLVFCSSPIAADKQVNKYVTTLIDAKWKETPLTLEVAEYLSDESQDYFWGFVDEISNHPNPLPENASDRETYDFVIGVAEKFLSPAEIAVLKFGLSLRTYSARVEMFSQMAENKDLSSLGCSIVLDIGGNLTCSLDELEDLINQLVKKKISTYSVDHHYHGGEQSDKTVILYGQMGTPEFLQFHNKLKSLAEQKKIDYVLRHYIKHRSDRKLRLSGYGVELQMKSTEYKATDDSDIKDNSGNDAESASPGIEEIDGINFGVLKKLYPDHQAELERIHTHLLENSHEIGALKVWQFQELSHQAAERIMNSPVDEAVNALTDIAQNFPMQAKSLIRTKVNADMKKEMKLNQEIFSVKLNIQPTDTALFVNGLFFDLEAIDILTLLEALRAELRVMESLHKIGFNNKKMGKLLALDLSNSGDNQDFAMDIRDSAIIWVNDIENDSRYKRWSPSLTELLRPTFPGMLRNVRRNLYNLVIIIDPLSKEATPLISLAESLYAHSAPLRVGFVFITNYDTSVTGQTDASVAVNNVYHYFAETLGHKEAMHFLSDLGYLIEKDRIDLDEIKKAIKAVDSSADINYILGEESEYDVGRHLANDFVKRSGFKKFPQALLNGVPLPSNQLNSESFEEAVLATIMTQTPTFQKAVYRGELTEGDDVIDWIMNQPNVMPRLSERVLKVEKSHWLNMIGSVPENDEIAKWSPQDTSAWLLNQMQYFYVPRRSHVRHLFTFWIITDLNLAVGRQLMREAFEYVKSNTDVRISIIVNSVNNVDDEPEIDLNRIALAALSALPIEEATKFVNQLIIDDTVSRITAGSYEIQNEDVEKKLQEQTKILAVHRHYVRSALDLTNGVRAVICNGRIVGPFDDVEKFTSEDFALLERFSQISYGDELFKTLTKVDLLYEDDDEYEKTDLTDDMIMKIVALLVPRPQTRSRFDVIFHGDEHSAIKIPASNPDSVAFQLTAIVDPVSRGAQKLGPILNTLRHSLNCEIKVFLNCLDKNSDMPLKSFYRFVLEPELQFTADGQISGAIARFDKLPTSSLLTQHIHAPENWLVEVVRSVYDLDNIKLDNVAIGIQSEFELEYLLLEGHCFEAVMGNPPRGLQITLGTENTPVMVDTIVMANLGYFQLKANPGEWLLRLRQGRSSEIYDITSVDGQDVIQEGNNIKVVISSLRSHVLKLKVSKKPDKASADLLSEEEPSSGLWNSISRTFTAADESEDKDEKLNIFSLASGHLYERFIKIMMLSVIKHTKTPVKFWFLKNYLSPTLKDFLPHMANKYGFEYELVQYKWPRWLHQQTEKQRTIWGYKILFLDVLFPLDVKKIIFVDADQVVRADLKELANLDLGGAPYAYTPFCESRREMDGFRFWQQGYWRNHLQGRRYHISALYVVDLKRFRRIAAGDRLRGQYQALSQDPNSLSNLDQDLPNNMIHQVAIKTLPQEWLWCETWCDDDSKKYAKTIDLCNNPMTKEAKLQAAMRILPEWVGYDEEIKRLQQEIENENRQTEREEDEISEASVHHEEL

SEQ ID NO: 3854 - protein, 1507 aa, Sporothrix brasiliensis
MGLPRLPLRLANALFATLVLQPSLTSAGPSIDVSMIAAFPSPPYLTELLETAAQENATSYFPILDRIADGYFGGAATDHDLYEKFLALLTEDGHISDGEALSTFKLALSLRSAAPRIEAHFQFYNTAVKGSVDGDHTGCDQWILYDGAQHCSPSLDKEDSKIASHKTQVRELPFDVKQGHGPDAILYADITSPEFGPFHKLLSEKSRAGEVTYRLRHVRAAAETTADERLPVNGYGVELALKRTDYIVIDDREADETNPDAKKKPPVAAEVLLDGEAEVTDLKALSKSELAELGLKTADYIIHSENPFDSLLKITQDFPKYSSSIAAHNFSKEFVEEHRGNRAVLVPAGANVLWMNGVQMIERQIQPLALVDTVRRERTMINGVRELGLTGKEIVDVIGHEAVAASRAEAVPPRFDYRDEIEDGRVIIWLNNLEKDSRYSDFPKGLRRLLQGGMPGQLPQVARDIFNQVYAVDFSDLEDVRLVVEQILEFVRRRLPIRFGLVPLVSTPASVKQAKVVYHMLETYGLGSLSAYLTQSLADKKASSPDAKAFKVAVKDRELREDATALAFADIFRHEEYDKQIELARHWAHRLGANSEVPPIFVDGVVIPRDENWVATMSTKISSHLRSVQEAVYFGKVEEDAWVAGYFLEGALTRRNAYIFPENEKSLQVVNVHKLHTDHADLFEEIPVIEASEESTKETWAVLTAVLDLDTEDGTKLLYSALQFRVNNPGIRLDIVYNPAKTGSSHDLNSVLKSNLDKATDTASWKDLKTLLATEEPATAEYVAALERFRETAAVHSGTNVLILNGRVLGPIANADAFGEEDLLTFLEFEQAERILPVYMAVEDLNLTAKVSSPLAAAKLTSVTALSTISDLPEGIFESAPTLRISSFNLWNTTHTSFEVGDASTATIHFNAVLDPASEIGQRWGPILKVLSSLEGVYMRVFLNPREWLDELPVKRFYRSVLEPAPLFDDAGKVKGLGAKFNGLPSEALLNLGMEVPPAWLVAPKVSVHDLDNIKLSSVKSDVEATYELEHILIEGHSQERSGQAPRGAQLILGTEKDEHFADTIIMANLGYFQFKANPGYYNIKIKEGRSSDIYSIESVGSKGVVPTPGDEGTDVALMNFQGTTLYPRLVRKPGMEKEEILNEEGAPSAQGGAMEYVAKGLKFAEGILGKGKDGDKAVAASEAQADINIFSVASGHLYERMLNIMMVSVMRHTNHTVKFWFIEQFLSPSFKDFIPTLAEAYGFQYEMVTYNWPHWLRQQKEKQREIWGYKILFLDVLFPLSLDKVIFVDADQIVRTDMYDLVQLDLQGAPYGFTPMCDSRTEMEGFRFWKQGYWNNYLRGQPYHISALYVVDLRRFRELAAGDRLRQTYHTLSADPHSLANLDQDLPNHMQFNIPIFSLPQDWLWCETWCSDEALKTAKTIDLCNNPQTKEPKLDRARRQVPEWTVYDDEIAALDKRRRQGGSPASDTAPPPVRVGGDGVASQQKPLGDGREEAKEEPKAHDRDEL

SEQ ID NO: 3855 - protein, 1465 aa, Cladophialophora psammophila
MLPTQASPSVNVALQTSFSAGPYLVELLETAALENSSSYFPLLDRIADGAFADLQTEQELYTRFLDILQNDGHLSSPESLSSFKFALALHAAAPRVEAHFQYYNTSVQPHLMAAQDAACPVWVYLDGQQFCSPALDRAQQAVSIPDNADDLPFDRVLGASSDGPPSILYADITHPLFGQFHSVVSQTARQGKSTYRVRYRPSGLVSSRPIHVAGYGVELVLKRTDYIVIDDRDAQKLEDTTPDQLSLDNVQDGELNDLKPLTTSEVANLGVNAASFIVSSSSPLDTLMQVTSDFPRYSSLLAAANASREFILEHRANRERFLPSGYNVLWINGVQIEPRQINAYSLLDHLRRERRIIAELKDLGLTSSEAISLLSSEIIAEAQAHETPQRFDWRDDPETDKVLMWLNDLEQDKRYAGWPSSLRSLFQRTYPGQLPQVARDIHNLVVPIDMSNIKDIELAATSLQSLVRRQVPIRVALIPTGEGETADAYSKVAYHIFDTYGLAALMNFFADVVASKKLEVSPEKSFNAAIKGRATRQGNEPLSFQDVLTAESLDLRLRSRDEYIKRLALAGPNPPFLVNGVVLPRADNWLELLSARLYSDLQLVQQAVFQEAILEDTWVPEFFLVQAVKRRNEMVFPDDPKDAKIVDVGHLASEFADGFARVPRVPGAEATLLSDRAHLLVVVNLESDPGRSLLSEALLFHQRNPEVELLIVHNPGSESQTSTFARGLYVLLQEDGRDLTVARLEQLLRGDLSPSADDLADPSAEFWGSQADLVRTLSFSEGQNGLWLNGRLLGPLEQPFTCVDFESLLEFERRDRIAPVTTAITGLALEDRFAGALDLAKVTSLVARSLKSDLPEGLRESAPLIRMERFRIWNGTHTCIKMSNSDDITIQIVAAVDPASELVQQWVPILKSLSQLSGVSVQIFLNPKDRLTELPVKRFFRQVISAEPSFDTYGSLVVPNASFSGIPKDTLFNLGMIVPPSWLVAPKQSIHDLDNIRLNNLAEGENIDAIYELEHILIEGHARDVTNGPAPRGVQLLLGTEEEPHYTDTIIMANLGYFQFKANPGYWQISLKPGRSSKIFNIDSVGPHGYSAQPGDETTSIALLSFQGLTLFPRLSRKPGMEDEDVLQSSGFGGAMDYLSKGASFASSALSSLGFKKTSTNADINIFSVASGHLYERMLNIMMVSVMKHTKHSVKFWFIEQFLSPSFKSTLPVLARNYGFDYEMVTYKWPHWLRGQKEKQREIWGYKILFLDVLFPLDLDKVIFVDADQIVRTDMMELNKVDLKGAPYGFTPMCDSRTDMEGFRFWKQGYWETYLRGKPYHISALYVVDLKRFRQLAAGDRLRQQYQALSADPASLSNLDQDLPNHMQHTLPIHSLPQEWLWCETWCDDASLARAKTIDLCNNPLTKEPKLDRARRQVPEWTLYDEEIAGVIQAAKEKQESMVIHDEDLDKAGGDESQKRIRDEL

SEQ ID NO: 3856 - protein, 1819 aa, Trichinella nativa
MTVFCANFTVESLLEATVHSMWVFPLIVVCFVSPVLVSPRKAHKNVIVSVRSKWPSTSLIMEASEFMSKESNEKFWQFIEAVIDKHQNSLGNKTDREVYNGILQIGDQILKSKARLEFLKLALTVRVHSATVEMHRQIAATSLDVQNGKSVYAVVHGKQISDLQQLDTILKHAEALARPVTYEFDHIYPGSKQGSVCVLLYADIENPHFKPWHLQLKKLVQRDGISYILRHYPKMNDDMVALSGYAVELAIKSTEYKAVDDSDKQTGSESGVSSSEEEVTDLNGFNLHLLEADELTPLKVWQLQHLSFQAGQRVILAPKEEALRVLRDISQNFPIMARSLTRMSINPNFKNEVEENQADAFSKLNIEPGDSAFFIDGIVIDLEEKDIFNLIELLKNEEMLISGLLKLGIRRKDFTLLYAMKGNDPNAEYAVDYTQWSPHYINNLESDAAYRNWGNSIHAILQPYFPGMIRPIAKNFFTLIFVLRLGDRESQNLLSTAYQMYEHVLPIRIGFIFVVNNDKSVSGYDDAGVAMLNAFNFIKEDRSVSKAIMFLIKIYNTVMRETISVEDVHKLFKSSYRDENLKSVFNSEEYNQGRSSGVDFIKESGLSMVPMVLMNGYPFTAEEISPEHIEEAILSKVMRFTVDIQKDVYEGNLKENMDVQQHLLKKPTVLPKLNYNILQMENIFLDMTDTSMDMRIALIHNPKSEAQATKGTASLVQACIQFLPLYQSKAVIGKIFANKITTLEDLINLSPSGISWPEFKKAYNSMSDIWMQLHVHYAKFVLNLDPGVGAIVANGKVLAPLSASDFNSLKDFNFIERYLLTSGCNDIAQHLKIIPYLDKSPKAYAFLLLYSCVQIEASDPTAAQFDIVAIVDPLSPAAQKMSHLLVILSSVLNVHMKVCMNCKSKLSEIPLKNFFRMVLPSELEFADDGSLKAQSSARFSALPQKQLFTLNIIAPQSWMVESVEAVYDLDNIKMEEVKGDVVAKFQLEYILLEGRCFDERSGSPPRGLQFTLGTFHEPFMFDTIVMANLANPGAWILALREGKSAEIYEVKSVDGVVQNQTTSVVILDGFSGRMIHVKVAKKNDQLENELLAESEDAESESLWQSISKTFQSGEKYDVINIFSLASGHLYERFLRIMMLSVLKHTKTAVKFWLLKNYLSPGFKEFLPYMAGHYNFSYELVQYKWPRWLHQQTEKQRIMWGYKILFLDVLFPLDVKKIIFVDADQVVRTDMLNLMELDLEGAPYAYTPFCDSRKEMDGYRFWKQGYWENHLAGRKYHISALYVVDLKKFRQVAAGDRLRGQYHFLSRDPNSLSNLDQDLPNNMIHQVKIKSLPQEWLWCETWCDDKSKKFAKTIDLCNNPMTKEPKLQSAMRIIEEWKDYDSEIKDLLDQRTKDKWNITEQKIVDIGFQFTAYFLVFLEESWNRAMNKENQVQDNRKAEITRASQPDCFKRICFTKFRLSRRVLESCFAGLKCFPAYYSDQKVKNDSVDCSRNSDKFKNYYRKHWDTDITVEDETVVGLKNRILKGDRSALASAITLVESNHPTKRAQGECLLQSMLKISKKRFDEHGPKSLIFRIAITGAPGAGKSTFIESFGLYLTRELKKKIAVLTIDPSSVRTGGSIMGDVARMNELSKEPNCYIRPSATAGTLGGVRRGTHESVVLCEGAGYDVVLIETVGVGQSESAVANIADMVVLLLSPALGDELQGIKRGIMEIADLILVTKADGDLLNQARLTRAEFSSALKYSRSRFHCWRPQVLLVSSRTNKGITEIWNEMEHFRNALSENGVLLQQRHQQMLRWMWNHIDHALSGLFRHHPDVVKMV

SEQ ID NO: 3857 - protein, 1494 aa, Onchocerca flexuosa
MKSLWIVIILSALPSVIDSAVKKKSVITSLHAKWSQTSFIAEASEFMAQESDTLFWAYVDEIVEKLNVDEWHTYSDARQYELAIRLAGNLLEEARVNLLKFALSLRAHSPTVVLFQKLGAERDKSCTAFADVHGAIICDVNDLEKVIENGVRGSAPTVYSIDHVFPTTKEHNVTLIVYGELATASWRKFHLVAKALSRRGKDVRDDKLLLSGYGVELAIKSTEYKAVDDSNTVIDKITVEESSEEYTDNEEGNYGFNFTTLRKLHGDLKDSIEQFRLHLLERDELTPLKVWQVQELSYQAAQTVVLAGTQKALNVLIDSSQNFPLAARSLSRQLVRKEFISEVNTNQEQLIEYGVSEGESVFFINGIMVDVDALDVFQVLDMLKQEEKLANGFFRMGIKNEYLSMLMDLESSNEHISYAVDFRPAIPEYLNNLDTDKQYRQWANSVGLLLQPYFPGMLRPIARNFFTLIFVVDPSQKETRDLLQYALRFYAHEIPIRLGVVFVVNDEKEVSGFDDASVAMLNLYNFVKINDGIQKAMNILTEALKQESISPKNILSYFQKKYPDYDPNDVFGSNSDYNMGRSTGYKFLRDSGLGLTPKVLLNGVVLDDSGITSDHFEETVMMEIMRVTSRLQKAVMEKRLKDEDNVMNWILSQPEVMPRINKLILDSPLLPNALYLDLTSVQKCTNISPAQYYKLPPKDQNQCMLKRMRYFTRTEEMRTHFSTVWVVTDLESAEGRLLMYNAIKHLKHSHMMRVAIINNPKDIEAATSSDSITMLVNIASRLLIPRQMKSFITKLVKEEIVSKLLDKQIKLDDLADMNMTLFYKESRQINNEEIIADAKYSRRILDLKPGQLALVVNGLLIGPLGDGQVLNVADMELIDKLILLRGGKVIGDYMEKWKVRTRHGESSDMVARSMALIGSIGVTKKRRFIPLPEAKESALTISGTDEEGLITALCIVDPLSIQAQRLGHLLTVIQKVVNLEVKLVMNPKAKLSELPLKRFYRLVLQPTIVFDDSGRIDDAAYEARFTALPNKQLLTLAVVPPDAWMVQSVYAIYDLDNIKMENVAGNVVAKFELEHILLEGHCFDDLTGSPPRGLQFTLGTLANPNRYDTIVMANLGYFQLKADPGAWILNLRDGKSKDIYNIVSHVNTESNDEVGVNVLIDSFSGRTIRVRVSKKKGKEKENLLNEGKSKEENEDHHSVWSSISTSLSGGEKYDAINIFSLASGHLYERFLRIMILSVMKHTKYPETLPEMAKNYGFQYEFIEYRWPRWLHQQTEKQRVMWGYKILFLDVLFPLNVRKIIFVDADQIVRTDLMELMELDLGGAPYGFTPFCDSRTSMDGFRFWKKGYWANHLAGRKYHISALYVIDLVKFRQVAAGDRLRGQYQGLSADPNSLSNLDQDLPNNMIHQVRIKSLPQEWLWCETWCDDASKEKAKTIDLCNNPQTKEPKLDSAMRIIPEWKDYDTEIKTLLDERSKKHVKESKKSEHEISDGHVEL

SEQ ID NO: 3858 - protein, 1588 aa, Naematelia encephala
MRRAVLTGALAILFVSATPPPLSISLQTAWQAPPLLLEILETVCDENPSAYFPLLHLASIHLPSNLSDVSHEDLLIRARDIIISHELLPKPSSLSTFDLALALHTAVPRIQAFYSYYEDYVNEASLGVVECGSWVEWRGKGFCDSEDLRKDLELSIEGAVHHPDNRPSILPFDHIFRDDQVGNDSPFAIFYYDSGSPASASLLYYLAQHSRKDPAFRYVVRYRPSIIETDHEAHTTLSGYGVEMVLKKTDYLVVDDRSQGDTKPVTSSGHDIRTDDRSGPFTEALGEVADEAAGITKDELKLIGLKAATLIKSSSDPLDALQHLSQDFPKYSAAIADKISMSEAIQSKVPNMMRRGPSGPAFYINGKVLTEPELNAFSLLSVLRTERDLVLDLTSLGLTPKQAVDLISDPMIGETQIGDEPGEGVVDASDRIEGEGVITWWNDIEKDKRYQQWPAALQAFLRPLYPGQFHQVRRNAFNIVFVLDLSLGPSLDAIATSISTMIQRGLPFRFGVVPMYNRTEDSLSLQMAKLFLYSVKTFGRGATKNMLQQIVSQTPSTAITPGIVNLSIVRQAYEAIADGSDKPSLPFDTVIASNESDIQLRLIDVYNARLKATIQESPAGHLFVNGKHAPMTGAWTVHVQNELQVQIPFLQEQIAIGNAPEDVSTFFYDLPSASPRRNKLIVPTISDNKLKVFNLLDLFKRDSTHKLESDFIYTDSERGAPISMWVVGDLDSPEGRRVVRDALRHLQTPQCSSRLGFIHVPSVTSTALPGARLSTVIYQLLAESALSRTTPASMLQLLDELDSQRDNVDQDGRILQSEDDDPEQAVEGSPLNVFSSEGWSAPDTAAAAEFWKVGTAIKQRLGLRSDLPHLMVNGRLVGPLTPATFSYYDLDALEVYELRKRVKRVIDVLNTMYNDLSAFDRPTLARLISTASSVVATAYKSSDEQGIFIPSLESRNRYYERFDDGVLSFTVGDPDTALIRAVAIVDPISEQAQKWSHILKVLSEMENVSVSVHLEPETIVSEMKLKRFYRYALSSKMIFDVDGNEVTPGVTFGGLPSKPIFTLGLDTPPSWIVSPKTSPYDLDNLVLSQFQGPVHVLFTLKQLLIEGHGREANNAPPRGLQLQLTKNGLEVAGDTQVMANLGYFQFRATPGVYDLAIRPGRGFEVYDLESVGNEGWDSLNVTNTGTGLALVSFEGKTIFPRFTRKPGMEKANVLVEEVAAHQESIAENLWTQMKSFVGLNKLETLAVSKNRHADINIFTVASGLLYERFASIMILSVMKHTSSSVKFWFIENFLSPSFLKFIPHLAEEYGFQYELVTYKWPHWLRAQTEKQRIIWAYKILFLDVLFPMDLDKVIFVDADQIVRVDMKELVDVDLHGKVYGYAPMGDDREEMEGFRFWKTGYWKDALRGKPYHISALYVVDLKRFRQLATGDRLRGQYHALSADPNSLANLDQDLPNSMQDSIPIHTLNEDWLWCQTWCSDERLSRAKTIDLCQNPLTKEPKLVRARQIPEWDSYDREIAALAARLSGETGGLAASVDDLASDKSVVNDVVSEDSVANDTELESGIEVENGEEGVDEDDDPTGHLEDEL

SEQ ID NO: 3859 - protein, 1606 aa, Puccinia striiformis
MKRSAGLRAHLGLLLISTIDVLAGSPPISVSIQATWQEPPILIQVLESAALERPSLFFPSIDAVCSDWENSKSKLSTDKQKYEYLTSLLGSPGLLDGPGGLESLAFSVALKEAQPKIEAFRAWYASLPSNLTGELDSTDQCQSWTLINDSKICNPSELSELLDSNNFSEKIQSQPQVIPFDHQHGQASGNSRVPRVILYASSDPSSFCPLHQVLYKASTKLPSTATYIFRWKIPSGPLKTSSKSQSASLLSGWGASLDIKKSEYLTLDDRPVESSSSDDTQLIIDGTSATENLADSEQAKLKPLKAAEIFDIGAKATQHVLSSPSPLSALRKLTEDFPLVAHTLVNEWVPGRISTELRLELKENMANSIPPGQSVIWMNGLQISSLVSLENLNLFKLVEIMRNERRWIGSLSSLGLNSLQARNLIIDEKLNSAMNPEASSGSAIGEIDASSLGVRFDASDRQEGGGAIIWLNDLENDPRYSMWPSTLRAILRPTFPGQLHPIGRNLINVVLGLDLTQTQNLHTLGHVIEAFITRTLPIRWGIVPIPTKDPSEGEKISRSFWDMTEALGPMEALKFIKEFTQNLEEESRKIDIKKFVIQANERVSNENESSSKDIKSDQDEKFKIWLNKSQLYSSRLSLCSNDHSLPACMLINGRFFPMEENYRSHLQETATLHTGFIQHQVYYNLLKDDQNVADYLYDLPLVHRARNDLVFPSEARPLKFVNLVEALQSTPHVPAANTFFKNADASASDAEPRPIASLWVVGNLDSKVGMSAVAAALGLLKGSMHDVSVQVSFVHTPSDNSETPTELSSSLAELITASVDAKITTQDVIDQLSRHEYQITVSDDGSPTTPGKDNELVLTKIHAQGSDIPVARHQTWLGTHEFARTIGVKSDDGLAIIINGRLVHVSSTTKLLNEDLTLLVEYETQQRINPLMEALKTLDEFDLNKYHSNLPLIMSTVGVVLVGSDDGSSQTSSSEARSAKHLSRDGTHSSYQHGDKEKALFEFSVILNPTSEAAQRWSALLETLSHRSDVSMKIWFNPPLELNELPIKRFFRTAISNSLEFDKDGRSIPALVNFDGIPTETLFTLAIDTPPAWLALPHDSIHDLDNIMLSELPPAYSSQGVEAIFQLEHIILAGHAREVPSDIPPRGLQIVLSDLLRNQEVDTIIMANLGYFQFKSSPGIHRLSIRPGRSLELYQFEKTDSSLGIDDDEPYQFLCLTTFNGLTIYPRVRKRPDKISESLIQPLSASSTSSKKGPVGEFSKLMGQVKDLASGMLRGQGSDLANGTSRSVINVFTVASGLLYERMAYLMCVSVMRHTRSAVKFWFISNFLSPSFKRFIPHLAKEYGFDYQLVTYRWPSWLRAQKEKQRVIWGYKILFLDVLFPLEVDRVIFVDSDQIVRTDLKDLYELDLEGAPYAYAPMCNDRNETKGFRFWDTGYWKESLQGRPYHISALYVVDLRVFRTIAAGDQLRQHYQSLSADPGSLANLDQDLPNNMQSILPIYTLDQSWLWCETWCSDEGLKTAKTIDLCNNPLTHEPKLKRARRLIPEWDTYDQEVAALASRIKKNLNEDDSSAKITVQAGLKIDDEDLNHSVHQKDDQSSSVLDRDEL

SEQ ID NO: 3860 - protein, 1641 aa, Olea europaea
MRTRFRSGFCFLILVLVCISLPGHSVSADNRRPKNVQVALRAKWSGTPVLLEAGELLSNEWKDHFWDFIELWHQSLNEDSDSNTAKDCLRKIAKYGKSLLSDTLASVFEFSLTLRSASPRLVLHRQLAEESLSSFPLADDISSNPVDGGVPEPNETINNKKSEPLLLGMNPRSPGKRCCWIDTGGSLFFDVPELLLWMQSPNASADDTFQQPEIFEFDHVHPDSTTGSPITILYGGLGTECFKKFHLTLAEAARMGKVKYVVRPVLPSGCESESGSCGSIGADEPLNLGGYGVELALKNMEYKAMDDTAIKKGVTLEDPHTEDLNQEVRGFIFSKILDRKPELTSEIMAFRDYLLSSTVSDTLDVWELKDLGHQTAQRIVHASDPLQSMQEINQNFPSVVSSLSRMKLNDSIKDEIIANQRMIPPGKSLMALNGALINIEDIDLYLLVDMVHQELSLADQYSKLKIPLSTVRKLLSVVPPSESFTFRVDFRSPHVFYINNLEEDAMYKRWRSNINELLMPVFPGQLRYIRKNIFHAVYVLDPASLCGMETIDTIISLFENNLPLRFGVIMYSAKLIEKIEANDGQLPLAQLADDSGEDISSLIICLFIYIKENHGALMAFQFLSNVNKLRLDSSAEDIPERHHVEGAFVETILPKAKSPPQDTLLKLEKEQTLNELSRESSLFVFKLGLSKLQCCLLMNGLVHESNEEALMNAMNDELPRIQEQVYFGHINSHTDILDKFLSESGIQRYNPKIIADGKVKPKFVSLSASILGKESVIYDVSYLHSPESMDDLKPVTHLLAIRITSKKGMKLLREGIHYLIHGSKNARIGVLFNADEETNLPSLYFVKVFEITASSYSHKKGVLQFLDQFCSFYEREYMLASGVTASTQALIDKVFELADANGLPSNGYKSDLSGFSADKLRMHLNKVDQFLYGQLGLEYGVNAVITNGRVIQLLDGNTFLSHDLHLLESLELKQRIKHIVEIIEDVKWEDIDPDMLTSKFISDIVMAISSSMNLRDRSSESARFEVLSAEYSAVVLQNDHSSIHIDAVIDPLSATGQKLSSLLRILSKYVQPSMRLVLNPMSSLVDLPLKNYYRYVVPTMDDFSSTDHTVHGPKAFFANMPLSKTLTMNLDVPEPWLVEPVVAVHDLDNILLENLADTRTLQAVFELEALVLTGHCSEKDHEPPRGLQLILGTKSSPHMVDTLVMANLGYWQMKVFPGVWYLQLAPGRSSELYVMKENAEGSQETTLSKRITINDLRGKLVHMEVVKKKGKEHEKLLVPSEDDNHPTRKKGNENGWNSNFLKWASGFIGGKDQSKKGESTSMETGSVGRHGRTINIFSVASGHLYERFLKIMILSVLKNTHRPVKFWFIKNYLSPQFKDVIPHMAREYGFEYELITYKWPTWLHKQKEKQRIIWAYKILFLDVIFPLALEKVIFVDADQIVRADMGELYDMDLRGRPLAYTPFCDNNKEMDGYRFWKQGFWNDHLRGRPYHISALYVVDLVKFRETAAGDQLRVFYETLSKDPNSLSNLDQDLPNYAQHMVPIFSLPQEWLWCESWCGNATKSKAKTIDLCNNPMTKEPKLQGAKRIVAEWPDLDLEARQFTAKILGENVELQEHAAPSPLQTQDKVGDVSSEDEESKAEL

SEQ ID NO: 3861 - protein, 1507 aa, Biomphalaria glabrata
MYIININIVTGRKCDIILNKSMMYLWIFALFFAYANCKQKPITVSLTAKWNSTSLLLESSEFLAKESNEHFWNFVKRIADQDVSFFESATDEMKYKLVQKFASELISPLQLSFLKFSLALRAFSPTVEMFQHLAQQLDFNSDCEAFYEVNGKFSCSLSDLSDLLSSASTRSPSVLYQFDHIYPGSANQNTVVVLFAELGTKVFQELHKTFSEMAQNRKITYCLRHYEKKQSGKKLQLSGYGVELALKSTEYKAKDDTKVEGEKTGSPTDDDQDATEVEGIVFSKLGELHPDLKKELKEFKNHLLDSATELMPFKVWQLQDLAYQAGQKIMSASSEDSLQYLRDISQNFPTQARSLVRTSVTNEFKREVKENQEQFEGKGIGVGDSLLYINGLAIDLEVYDVFTLLDLMSSEAKLVEGLHSLGFKAENLQQLLQLDLSNGDDEKYAIDIRHSAVQYINDLLTEKKYRGWPSSVQDLLRPTFPGMLRHIAKNMFHLVFIVNPADSKSRNLLKMAEAFYVHKAPLRLGIVLTTSTDPSVTGFDNTGVALTRAFNFIAKDQNSASKGLSFITDVYEKTGSSELTPDFVIADFMSQYPDEDKENIFGASSEYDDVRKAGDDFMSRIGLSGLPQVLINGVPLEKNQLEDSFEESVVMEVLKQTQIIQQAVYKGEVNDNTDLLEWWMERDNVLPRLNSRILAPATIRLDLTGSTESSLVNIPSLASELNSKDLASTLISNINYLTKKDEESLRAVTLLVVCDLEDPISRSFLYTAIKHLKSSNNVRLGVIFNPKSLEADNVINKAVQVALGTLPAPIAKSLITKLVKEENIQDLMSRKKTLKDLEVHGMDMDAYITALNAATKDFLQVHQILASHLLSLRPGERGVIVNGGVEMCLYLCGFLYSRASDLTMKVSNLLMSKSKKEKRQRISYAGDKHSVIKLPADTNIPAFTIEAIVDPVSSEAQKMSAILLVLKQIANVDITIFMNPREKLSEMPLKSFYRYVLEPEVTFDSEGNLVAAPHAKFLDMPQKSLLTLNMKTPESWLVESVVSPYDLDNILLEEVEKSVNAIFELEYILIEGHCYDSNSMQPPRGLQFTLGTSKKAAMMDTIVMANLGYFQLKAYPGLWYLKLREGRSEEIYKIDSHEFTDSPNNLTDVVIAVNSFKSKIIRMKVSKKPDKMDVNLLQDEDDSVGIWDSISNTITGGAGKKEEEKDSTLNIFSVASGHLYERFLRIMMLSVIKNTKSKVKFWFLKNYLSPTFKDFIPYMAKKYGFEYELVQYKWPRWLNQQKEKQRIIWGYKILFLDVLFPLDVKKIIFVDADQIVRADLQELYDLDLGGAPYGYTPFCDSRKEMDGFRFWNSGYWNSHLAGRKYHISALYVVDLKKFRRIAAGDRLRGQYQGLSQDPNSLSNLDQDLPNNMIHQVAIKSLPQEWLYCETWCSESEKPKAKTIDLCNNPLTKEPKLQAAMRIVPEWKDYDYEIKVLWDEIYQTNTKAQIEYDPPVQKGSPNHIDDEL

SEQ ID NO: 3862 - protein, 1462 aa, Fusarium culmorum
MLRLLQYMAMAVLAATAASASPSVNVGMHAAFPHGPYLLELLETAAGENSTAYFPLLDKIASGHFASANSDAELYHQFLQVLQEDRHIITRDALSTFKLSLSLRAAAPRIEAHYQYYSTAVDPESQIDGAGNCQSWALIDNQKYCSPELDVAVEGKVVSKQAKVLPFDRVLGIGKDAILYADPTHASFGPFHDVLSKAARQGDVSYRLRYRRSPGVSNTPLPVSGYGVKLDLKRTDYIVIDDREATQETQKPHIVADVDLDTDEEVADLKPLSSSELASLGLKTASFILKSDNPLDALLKSTQDFPKFSASIASHEVTPGFAQEQEKNVAAGVPSGINFLWMNGVQLIERQIEPFTLIEMIRRERKLIDGVRELGFNGQQAVSLLGHSEIASSKADDEPPRFDWTDRLDGKAVMWLNDLETDSRYQKFPSDLTALLQRAYPGQLPQVALNLFHVVAPIDFTDLEDGRAFGQLAQFMQRGITIRFGIVPLATTPASIAQAKVVYHLMETYGFESLITYLQESEEGPEGAANKRSFAKAIDGREPMPGMTKMTLSEVLEAKSYAQKVKAGQAWASRLNAATPVRPILVNGMVIPREKNWVQVMGQRLTEDQQTIQKAVYFGHVNEDTPVSDLFLKTALSKRNAHIFPDDDKTLRILDVNKLYTDHAELFGKVAILPADVESAKEDWAVLTVIADLNTDDGQDLLLTALRFKRNNQGIRLDLVHNPSLPSNAHAINGAFKLSEVKLVEMKCKDDLKAVLEAPWTAEEDGFGTALANFLLTSNIQPGTKGLLLNGRFVGPLPSSVSFEDDDLKLLLEFEQRSRILPVYAAIKELGFADRLSDPISAAKLTSITALSTISDLPQGIFESAPSIRSTLYNTWNATHSAIEVGNPETASVHIAGLLNPTSEQGQRWAPILKVLSELDGIYLKLFMNPKELTGELPIKRFFRYVLDSTPSFDDSGHVQSPKATFKGLPSEALLTAGMDVPPAWLVAAKDSIQDLDNIKLSSIKSDIDVVYELENILVEGHSRDGKRGAPRGAQLALATEKDPLITDTIVMANLGYFQFKANPGFFSIRLKEGRSSEIFTIESAGAHGYAAVPGDEGTEIALMDFKGTTLYPRLNRKSGMEEADVLESVDSDNDGIVAKGLKFAESLLGGAKSPKEISAQEHAEINIFSVASGHLYERMLNIMMVSVMRNTKHSVKFWFIEQFLSPSFKEFIPHMAAEYGFKYEMVTYKWPHWLRQQKEKQREIWGYKILFLDVLFPLSLDKVIFVDADQIVRTDMIDLVNHDLEGAPYGFTPMCDSRTEMEGFRFWKQGYWANYLRGLPYHISALYVVDLNRFRQLAAGDRLRQQYHTLSADPNSLSNLDQDLPNNMQFAIPIHSLPQEWLWCETWCSDDSLTQARTIDLCNNPQTKEPKLDRARRQVPEWTIYDNEIAALDQRRKGVADKNENTRSRESEDKAHTKDEL

SEQ ID NO: 3863 - protein, 1576 aa, Armillaria ostoyae
MRTSAVWVLFSSLFVICSAGPPVKVSLRSSWRAPPVLVEIIETVALENPEAFFPFVDSLTNPETRALAKDLSPEAVHQLALQAAVAGGFLSEPGGLTAVEMNLAMHSATPKIEAFYQHYSDLNSKVDCGSWVDWYGTVVCDVETLVQLAGRETIDSNEGIPTPFSRPKILSFDHVNPSPSLTLDTPPRTAILYASLDSENFRELHSYLLSHASSNSIEYVLRYIPPKQADDAPRSFLSGYGVALDLKKMDYLAVDDRNMNGGAGASDDISEEIGKRIDAVASLIEAYPENTTAPEATVPLTEVEILELSWKASQIIAESSEPLDTLRTISQDFPKYATSLGRRVEVNESVTEELHNNQLRVQAGGHAFWFNGAPMAEKDVTPYGLLRMFRKERGIMSSLTSLGLSRAQAMELLTHPIIAAGQGDKAGFDGFVDASDRPEGGEVITWWNDLEKDSRYQRWEPAISTLLRPLYPGQFHNIKLNIFNIVLVLDLSQTSALTFIGGAVANIIERSFPFRFGIVPSIESEDGLKMARLFYFLVDNFGRKKTMGYLKKISLAGMPPQHRKPNVQWDLVRSEFEDLLDVEESELEDAIFDSVLEGQVGVSKFFDKIDAYAKRVGASMSSNPEGHCFVNGKHFEMGETFLRSMQMEVTKQIQHLQEQLYEGKLTDDNSSSMSTYFYDLPSTQKTRNRFIIPSNAIGSLRIYNLPELFARTGFDVGPGAFIYPPEGETPLTLFLIADFNTEEGLELLKSALASIGEQSETRLSFIHNPSDPKLDITAQRTPVAWLLMHLISKGLLSKSSPAQLMGALGLEAPLSMDGGRSQIPLSQEGTFQALAGQSEVDTEKIAQLMKSSRLLIRDIQLPAGSQGILVNGRVIGPLETKEFGSADFHALETYELRRRVESVVSAIHNVLPSAASLDRQVEITFQCTSNLQHIYLPDPSEAGLFDTAPKPRQRSYRILESEYTSFEYGDNTTALYQISAIIDPVGEMAQRWSSILQWISTFPDTYIEIHLNPGPHSEIPLKRFFRYNLIPSLSFDEDGHELPAQTIFEDLPVEPIYTLAMDVPSSWLVRPREALYDLDNIQLGNIAPEDSSVDAVFDLDYIVVEGHARETVTGAPPRGVQLELRSGDNAAVDDTLITANLGYFQFKTKPGVFKLEIREGRGRDIFTIDSVGNEGWNSPSVDAVGNEITVTSFEGLTLYPRFNRVPGMETVDVLDPRYKKADDSEGMLGGITSLFRSIFGSTDSSVAVVNKQADINIFTVASGLLYERFASIMILSVMRNTKSTVKFWFIENFLSPSFLEFIPHLAKAYGFQYELVTYKWPSWLRAQKEKQRIIWAYKILFLDVLFPMDLKKVIFVDADQIVRADLQELVDLDLHGAPYGYTPMGDDNTDMEGFRFWKTGYWKDFLKGRPYHISALYVVDLVRFRQFAAGDILRGQYQQLSADPNSLSNLDQDLPNNLQREVPIFSLHEDWLWCETWCSKDRLHRAKTIDLCQNPLTKEPKLARARQIPEWEVYDTEISQFTRKLAEKGLIKSRIAAADTNVLAGAGSAPSSSPESTADPTDTSGADPADGFREEL

SEQ ID NO: 3864 - protein, 1550 aa, Polyporus arcularius
MLRALLPLAWPILRATAGKPPVNVELRTSWPNTPILLESLESIAIEESGAFFPLLDAVTNPETFPDGRSPRDAHQHVFDTALSLDFLAQPGAYVAAEMHVALHSASPKLEAFYQYYNDHHATRRDDPEVCGSWVDWYGEVVCDGKTLARLVETESLDAPEDTRDNTTSYSATSPKLLPFDHILPDPARLLELPPHTAVLYADLDSANFRELHSYLYAAAHSPAPHLMYVFRPIPSAHRDPAVKTYLSGYGVALDLKKTDYLAVDDRLQGGAGTADDSNAAVQTEEVDPIVTLLQQYPVDESVDVTLPLTEEELLQIDLQAAQFIYDSEDKLSTLKHLAQNFPRYAGALARRVSVDELLLEELSTNQPRARGGVNVAWLNGVTLEEKDLNAFSLLRLLRRERNIMLSLMSLGLSSEQAIELLTHMSIAKAQSESGALDGLFDASDRAEGGGVIGWLNDFENDDRYAHWSNMLRTILRPMYPGQFPTLKRNIFNVVLAVDLSQLSSIDFIASTVQAVIERRMPFRWGVAPLVETEDGARMARLYYYLLQNFGPTETLAFLRTLSQRGTPLQDLSPSVDWSLVRQAFDALLAARDDTAETVETDLDTILEGTEGDLEKQRAYATRLSTTLESASQGHVFFNGKHFELDDNFLRSLQTESAEHLQHIQYKVYKNELTDEDDVSNYFYDLSTTAKRRNMYIHPSPGAGSLRIFSLPDLIERNGLKSSAGSFLYPAESEQVPLTTYVVADFDSEESQHLVKEALLSMTPGSLSRLSFIHNPSTVSLASKSDDFASPSRFLAQLVSWDLLSRLTPGQLLKTLGFGDVDAFSEGSTQEPFSLDDLVGTEAYTGEEYEKYLTACRLVVRQLELKPGEQALIVNGRVVGPMEPGKFVAGDFETLAAYEHHKRVKSVHEALLDVYEPLKDASKEDAAEMTSIASSIVSSIQLPDPSEAGLFNAPQRPRLRNYQMLSGTYTAFSIGDNTTALYHFGVLVDPLSEAAQKWSSLFEWISEIPGVYVEFHVNPTKYNELPLKRFYRYNLLPRLTFDDNGNEVHAKTQFTDLPVEPIYTLAMDTPQSWLIRPREALYDLDNIQLGMLSPRDRTQGLKAVFELDDLVVEGHARESATNAPPRGLQLQLVTSNSTPIADTLVMANLGYVQFRTKPGVYRLEIRPGRGREIFKMESVGNEGWNSPSVEEAGDEVTVTSFEGVTLYPRLARLPGMENVDVLQAHTEVHEDAGLVENLLSKVSSLFGSKQEERALVPVDDGQAEINIFTVASGHLYERFASIMILSVLRHTKSTVKFWFIENFLSPSFLGFIPHFAAEYGFQYELITYKWPSWLRAQKEKQRIIWAYKILFLDVLFPMDLKKVIFVDADQIVRTDLKELVELDLHGAPYGYTPMGDDNPDTEGFRFWKTGYWKDFLRGLPYHISALYVVDLVRFRELAAGDILRGHYQQLSADPNSLANLDQDLPNNLQREVPIFSLPADWLWCETWCSKDRLDRAKTIDLCQNPLTKEPKLDRARQIPEWEVYDSEIAEFTRRLREGNAGGSEVPKHDEL

SEQ ID NO: 3865 - protein, 1566 aa, Bombyx mandarina
MKIPGLRLSLVVLAIAVVSVASNIDPIKRDEKKSKSVTTFVSAKWEATPIVLELAEYLAGESSDLFWSFVDGINSLKSSLDSLENDKQIYDACIGVASTLLAPAQLRMAKLALSMHTTSPTVRMFDQIAIQNGAKEIQCDTFVNIATNNICDNDALRDILQTHNLKNVGDQNNEIYLLDHTHPSSDNKSLTAILYGELGTKDFAMKHKILAEYADKSAINYVVRWNIKTRGKPKLRLSGYGVELQLKSTEYKSQDDSTPKETEDKETAAQSEEEDENDPQNQIDGFNFGRLKNLFPALRTPLERFRRHLSESSEELAPLKVWQMQALSMQAAAAVVDANDAGGDEALRVLTSIAQNFPMQTKSLIHVSVPRAFRDEVLYNQDIWASALGLRPAEPLLLVSGAQYDAEDVDVMALLAALREDIGPMNTLHALGLPKKLIHTLMSLDLGESYTWEEYGLDIRDTSITWLNDLESDDRYRRWPSSFMELLRPTYPGMLRNLRRNIYNYVIIIDPTSVQSGPPLKLGETLLKHATPVRVGLVLASTKGDASLEAAVRSAFNYIAQEKNSNKEAYYFLTQLLNPSGDDVLDINYVKKQLKRHATSGASIEDIISEDSEYNFGRQISEEFVSKLGSDKYPQVLINGVPLMDEGPTPVTSSVELLEESLVTSLSRHTARLQRAVFRGELSDMDDAVDYLMKQSHIMPRLNRRILSSETSQYLDLTGASSPADLFTEDKIHKLLHLTGRDALATALPILKYFYKPGKVEKKITQTIWVIGDLNNHESRGLLRNALTFMRESSGVRVAFIPNVDSTNDQSLNKVVVAALTTLESTEATKYVVKLLEDEGCHERKDCDVLPEIIPALNKYEWVLKAARVLCARSFKLRPGARALAHNSRLIGPFLDNEQFTLDDFVLMERFSSQMYGDKIAEVLDKKKATITNEVTDDDEEESVEVTSDMRLKLVSVLGGRESRARTALPSGLHTEHSLIELPPVYDNEAAVEVVAVLDPASSAAQRLAPLLLVLRRVVNCNIKLFLNPQDKNSDMPLKSFYRYVLEPELQFTAAGALSGGALARFSRLPHAPLLSMELRTPTNWLVECVKSVYDLDNIRLADVETVVHSEFELEYLLLEGHAWDTTLGTPPRGLQLILGTREKPELMDTIVMANLGYFQLKANPGAWTLRLRPGRSEEIYEIVGHENTDTPAGSQDIQVLMSSFRSHVIKLRVSKKPDKQHLDLLVENDDKNSGGLWNSIASSFGGGDESEAQDDTINVFSVASGHLYERFLRIMMLSVLKNTKSPVKFWFLKNYLSPSLKDILPYMAQEYGFEYELVQYQWPRWLQRQRDRQRTIWGYKILFLDVLFPLHVKKIIFVDADQIVRADLKELVELDLGGAPYGYTPFCDSRTEMDGFRFWKQGYWRNHLQGRSYHISALYVVDLKRFRRIAAGDRLRGQYQALSQDPNSLSNLDQDLPNNMIHQVAIKSLPQEWLWCETWCDDDSKKYAKTIDLCNNPMTKEAKLSAAMRIVPEWKEYDGEVKALQARVRRGLYQSSDHEQEVEVNIDVTTSSQSTNTEHDAHTEL

SEQ ID NO: 3866 - protein, 1214 aa, Rousettus aegyptiacus
MMPLKVWELQDLSFQAASQIMSTPVYDAIKLMKDISQNFPIKARSLTRIAVNQHLRKEIQENQKDLQNRFEIQPGDAFLYINGLRIDIDAYDPFSILDMLKLEGKMMNGLHNLGINGEYMSKFLKLNSHVWDNTYVLDIRHSSVMWINDLENDELYVMWPTSCQELLKPILPGSIPSIRRNFHNLILFIDPAQEYTMDFIKLAERLYYHKIPLRIGFVFIINTDDEVDGVDDAGVALWRAFNYIADEHDVSQAFISITHMYQKVKKQNTLTVDNVKSVLQNKFPSANVQDILGIHSIYDDERKAGANFYKMIGLGPLPQALFNGESFNREELNIKELEMAVLQKMIDTTIYLQREVFMGTLNDRTNAVDFLMDKNNVIPRINPLILHSKRQYLNLISTSVTADIEDFSTFFFLDSQDKSAVIAKNMRYLTQEDDNAISSVTLWIIADFDKPSGRKLLWNALKHMKSSFHSRLGVIYNPTSKIREENTAISRGILAAFLTQKNTFLRNFLRKLAKEETATAIYSGDKIITFLSEGMDKNAFEKKYNTIGVNIFRTHQLFCQDVLKLRPGERGIVSNGKFLGPLDENFYAEDFYLLEKITFTNLVEKIKGIVENMAISSKNMSDLIMKIDALVSSLPKRASRYDVTFLKENHSIIMINPQENDVFFDVIGIVDPLTREAQKMAQLLNVLGKIINMKIKLFLNCRGKLSEAPLKSFYRFVLEPELTFVADDIGPVAKFLDIPESPLLTLNMITPEGWLVETVHSNCDLDNIHLEDIEGTVIAEYELEYLLLEGHCFDIMTEQPPRGLQFTLGTKNQPVAVDTIVMANLGYFQLKANPGAWLLKLRQGKSEDIYQIVGHEGTDSQPDQGDAVVVLNSFRSKIIEVQVQKKPDKIKEDILNDKDGKKGMWDSIKSFTRSLHKEKDKTETDVLNIFSVASGHLYERFLRIMMLSVLRNTKTPVKFWFLKNYLSPTFKEVIPHMAKEYGFQYELVQYRWPRWLHQQTEKQRIIWGYKILFLDVLFPLAVDKIIFVDADQIVRHDLKELRDFDLDGAPYGYTPFCDSRTEMDGYRFWKTGYWASHLLRRKYHISALYVVDLKKFRRIAAGDRLRGQYQALSQDPNSLSNLDQDLPNNMIYQVAIKSLPQDWLWCETWCDDESKQRAKTIDLCNNPKTKEPKLEAAARIVPEWVEYDNEIRRLLDHLENKKKNESKSSFCSGI

SEQ ID NO: 3867 - protein, 1455 aa, Endocarpon pusillum
MIPSNPFAQLIEGRETAAEENSTSFFPLLDRVAEGIFTELDTEQALYERFLKLLEDDGHISDPEAVASFKFALAIRSVAPRIEAHYQYYNTSVQPSMMAAQDAACPVWVHFDDKQYCSPSLERAQQDMPIDGLADQLPFDRVLGDVSEGPPSILYADITHPLFGQFHETVSRTAKQGKSSYRVRYRPSTDTSPLFLNGYGVELALKRTDYIVIDDRKAGQDDEEVQKPISDKDLSDEGPADLKPLTTSELSTLGLNTASFVMSSDDQLDTLLKVSADFPRYSAMIASHNTSETFLNEYRTNRAVFLPQGYSIVWINGVQVDTRSLNPFGLLDHLRRERALINNLRDLGFTASQAIKLLSHKDIAQAQVEKEPQRYDWRDQTEGSNVIMWLNNIEKDKRYQIWPSQLTALLQRTFPGQLPTARRDIHNLIIPVNFADSKDLQLVVETLQSFVKRTIPVRFGLVPLLSSPDSAAQAKIAYHLLETYGLSSLFAYFEEQVTAKKPSTATKASFAAAIEGRKPRNEREVLGLDALLTSDPLEQRLQAVKSYLSRLELGNEVTSILINGVALPRNENWLEAMSARVSMDLRAIQRAIMEDAFNEESWIPEYFLFQASSSRNALITPEKLDSISVLDVSKLARDHFDVLDDIPRISASPDSDFEARAHLLLVADFESDPGKQLLKEAIEFRKGEPGVDFVILHNPTSSRPTSGLPFQLYHLLKEGKEISPENLLDIVSGSDWTQPTQAMAQRADDYWSVTQRLADAIGIEHGASGILLNGRYVGPIKDGTLFLKEDFDLLLNFERQQRINHVVSAVRDLGWESNVVKPLDLAKVTSLVARAHVSDLPEGIFESPPLIRIDNFNLWNSTHSAIHVSTSDDPAIQIVAAIDPASEVVQPWIPILRTLSQLHGVDLKIFLNPREQVLELPIKRFYRQVLDSAPMFDNSGALRRPQATFTAIPEEALLNLGMHVPAAWLVAPQVCDYDLDNIKLSSVPKDQNIDAIYELEHILIEGHSRDTGTGSPPRGVQLLLGTEKQPHFADTIIMANLGYFQFKANPGYWHISLMPGRSSRVYTIDSVGSKGYSPQPGDLDTSVALYSFHGATLYPRLSRKPGMETEDVLDSGSKARSAMDYLSRGASFASSALTSVGLSKSSSSANADINIFSVASGHLYERMLNIMILSVMKHTTHSVKFWFIEQFLSPSFKSFLPHLAAHYNFQYEMVTYKWPHWLRSQKEKQREIWGYKILFLDVLFPLHLDKVIFVDADQIVRTDMMNLNRVDLHGAPYGFTPMCDSREEMEGFRFWKQGYWKNYLQGKPYHISALYVVDLKKFRELAAGDRLRQQYHALSADPGSLSNLDQDLPNHMQYNLPIYSLPQEWLWCETWCSDEALQSAKTIDLCNNPLTKEPKLDRARRQVPEWTVYDEEVAQVMEAVKRAEAEASAQAAGPEEVIQERKPDRKKKDEL

SEQ ID NO: 3868 - protein, 1475 aa, Fonsecaea monophora
MRTLHKRWTWSLLALLSWDSLITLTRATSSVNVALQTSFSAGPYLVELLETAALENSSSYFPLLDRIADGTFTDLQTEQELYTKFLDVVQNDGHLSTPESVSSFKFALALHAAAPRVEAHFQYYNTSVQPHLMAAQDAVCPVWVYLDGQQFCSPTLDRAQQMVSIPDTVNDLPFDRVLGASSDGPSSILYADITHPLFGQFHSVVSQTAREGKSTYRVRYRPSTIVSSRPIYVTGYGVELVLKRTDYIVIDDRDAQKTGDSTPEQLSLETKDDEIKDLKPLTTSEVAKLGINAASFILSSSSPLDTLLQVTSDFPKYSSLLASVNASKEFVLEHRANRDRFLPSGYNVLWINGVQIEPRQMNAYSLLDHLRRERRIIAELKSLGLASSEAISLLSSEIIAEAQANETPQRFDWRDDSEAGGVLMWLNDLEQDKRYAGWSSSLRSLFQRTYPGQLPQVSRDIHNLIVPIDMGNMKDIELVTTSLQSLVRRQVPIRIALIPTGEGETADTYSKVAYHISDTYGLTALMSFFSDIVAAKRIDTSPEKSFKTAIRGRATREGKEPLAFHKVLNDESLGLRLQARDEYMKRLALARPNPPLLVNGVVIPRTDNWFELLSARLYADLQLVQQAVFQEAILEESWVPEFFLFQAVKRRNEMVFPDNAKDVEIVDVGQIAVDFADSFARLPRLAGAEATLLSDRAHLLVVVDLESETGRTLLSEALLFHQRNPEIEMLIIHNPGPESQISSFARGLYALLQEDGRDLTVDSLEQLLKGDLSSSADDLTDASAEFWSSHADLLQTLSFSEGQNGLWLNGRLLGPLDQGFTSVDFEALLEFERRERIAPVTTAITGLALEDRFTGALDLAKITSLVARSLKMERFKFWNGTHTSIKISNSDDINIQIVASIDPASELVQQWVPILESLSRLNGVSVQIFLNPKDRMTELPVKRFFRQVISAEPSFDSHGSLSIPNASFSGIPKDTLFNLGMVVPPSWLVAPKISIHDLDNIRLSNLAEGENIDAVYELEHILIEGHARDVTSGPPPRGVQLLLGTEDEPHFTDTIVMANLGYFQFKANPGYWQISLKPGRSSKIFNIDSVGPHGYSAQPGDETTSVALLSFQGLTLFPRLSRKPGMEEEDVLESSALGGAMDYLNKGASFASSALSSLGFKKTSSNADINIFSVASGHLYERMLNIMMVSVMKHTKHSVKFWFIEQFLSPSFKSTLPILAEHYGFDYEMVTYKWPHWLRGQKEKQREIWGYKILFLDVLFPLDLDKVIFVDADQIVRTDMMELNKVDLKGAPYGFTPMCDSRTEMEGFRFWKQGYWETYLRGKPYHISALYVVDLKRFRQLAAGDRLRQQYQALSADPASLSNLDQDLPNHMQHSLPIHSLSQEWLWCETWCDDASLAKAKTIDLCNNPLTKEPKLDRAKRQVPEWTLYDEEIAGVIRAAKEQASAVTDNSEGLEDAADGENLENVESERIRDEL

SEQ ID NO: 3869 - protein, 1425 aa, Kalmanozyma brasiliensis
MGMEEAWQKSSSGASCSESEPGSTPAADAEHTTLLSGYGAILDLKKVDYLVIDDRKLKDDSNVGDVGIAANSQSEEGDAARQASEESAWLQEHIGAEVGSTTSLSSLSDDQIAYLGIKAARLIMGSSDPLRALQELSQNFPSHAAALASSTKWDDPDATAELVESVLNLASMRIEPGHSDLWLNGQSTPTRDFMPLTLLETLHKERRWNHALQHRLAGGGLNVTEAGDLISSSLVGRAYMAGADGNVGSAIFDASDRIEIKDAGIDADVGAITWLNDLEKDEATSEWSNELMDLLRPMWPGKFPRLSINLFNVVLVLDLKQRETCRFMSDTVIQSLGRVGLHWGLVPGGLEDDANSDSTRMARLIWFLLDEASPQIVSDVFRKAAASRSGTADAIDTSLAVKEAKFALKSIDPSLAARLDEALAGSNPTYAQRETLARAYIKRLRATREESATGHVFVNGQHHPFHPQIVHIMHQAIQEQIQVLAPQIYYGQISSSTPGLETFFYDSVGALSFRSALVGGSSGGGSAEEGGVKHSAVDLFSALVDEENEEGSVEKLFNFFYPAEGASDAPLNSTVWVLADLDSPEGLALLTRSFEALAKDDAKFRLGLLHVPSSASTTSGHSSSISTIAQQVLAESRAEKIAPLTMLAALQQAHDDHSVSASQLANTLGLSHDLSNHTPPRQFWTSIAPRIATHLDLTTPSILVDGHLVTNLPVSTMEARDITALVEYEAGQKLSSITQALSLLRPSFGTLPPAQRQNLLFASLSVLNGVYAQSDSMFAAKTGTRSGLPEQLGTPAHAFEIGDRATADVRVTLLLDPLSEAAQRWSSIMRMLSSMKGVWMRVILNPQIKLRELPLKRFYRFSAPPRLQFREGRAVAEELRFFGMPEEAVLTLGLDAPAPWLTMPMEAVYDLDNVRLADVPAAARGKGVKAVHELRHILIEGHARDQSNGVPRGLQLLLETPDGSTSLDTIVMANLAYFQFKAEPGVWGLRIRPGRSDELYEMQSVGGSGWDSPSVGVTGEHVVLDTLSGLTIYPRVAKRRGREREELLEELDAQGRPVKKVVEPETVADAAGQLFASATAKLGSLARHMTGSTTPRATTAVGRKHADINIFTVASGHLYERMTYIMILSVLRHTNSSVKFWFIENFLSPSFREFIPHLAREYGFEYELVTYAWPHWLRAQTEKQRTIWGYKILFLDTLFPLDLGKVIFVDADQVVRTDLKELVDLDLGGAVYAYPPMGDDSEDMDGFRFWKQGYWKDYLRGRTYHISALYVVDLHRFRRFAAGDRLRGQYQALSADPNSLSNLDQDLPNNMQASLPIHTLDKEWLWCETWCSQDWLKDAKTIDLCSNPKTKEPKLDRAKRQIPEWTVYDDEVARLAQRLVEEKRVGSSVVAPKSQVLTKDGEAQQVPKEKAEGEVDTDVHVHDEL

SEQ ID NO: 3870 - protein, 1538 aa, Mortierella verticillata
MRTIGSPLRASVLALTLVAVQFGNHALANAEHSPSPPIEASIHTSWAAPPLLLEILEAVAVENKTAYQPLMRQLTDTAFLDSVSTPKALYEESLKVIEAQGHVAPQAISSLKWSLAMHTSAPWIEAHYHLYNSTIAPDRLSKSGFNSDCGVWVDWYGRQICTVAELKSAVTANGASTKRPNQRPTTMDLDHVNAPADASDPFTILYADVYDPEFAAFREYLDTLSNDHGLEYSLRYRPPVKRGKESPLTLSGYGVELALKNTDYIVIDDRDLGHGDDFLASGQTVFKNSAGTNLLGDDEPAVEPIGESLLTDIGLAAAQFVAMSEEPLKTLVSVSQDFPKYQAKISKMTFDPALKLIVRGNQGFLAGGAGKVWLNNQPVPSHKMNPFSLLRMMRRDRQTIASLATMGVSSRKAVELLTDASDTDSGSGAAKDPEGVLDIRDKSEDKNLVVWLNDLQSDNRYRDWNADLINIVRPTYNGQFHQVRRNLISSLFALDFSSPKALELVSFELTNYIQKLVPFRFGVLPLLKSDDGVEVRMAMLWRHVVSRYGIKGGLEFLKRTLINHIQQGQDLETASKMSFSVTLQSSKLKSTTTPELTYEEVVAPDSVYRSWLTSVRAMTDRVGITEESFFINGKYFAWEENHGQHLMQEAPSQTAYLANKLMQGEISVDTDLYEYFLTRPGVAENRNPYVFVSEEVPLKVVDLVQGQSRPFIDTLSYISTGEQTEQTTTVILAANFEEKEGVALALEALKAVESELTVRVALVQNGKTVETLPGLANFVRQSSVDGKALPLGFWKDLLEGISQGVSFLDSFQQAGSKHPEAALIGVEGSKGREKDADDSREKFLQDVVHVKDDEIFIIINGRVVGPILEPFRSSDFRLLVNYEQTSRINKINSLLASNNIAATASNIMKAGSIIYAAAQQLDQSLYDINESQISRDRTFAKLDTELVGFSVNSQVHADQDDVLYHFAAVLDPASQLTQRWAPILETMSRMANVKIDIVLQPSLRVTELPIKRFYRYVAEPELTFDSETGNLVAPTAYFAGLPQPTLLTLGVDVNPAWVVTSKVCIHDLDNLKLSSLTGSSRITGVQAEFELQNILVEGFARDISQKVPPKGAQFILGTKAVPHVADTLVMANMGYFQLKANPGVWEMVLRPGRTHEVFSIESIGSEGWVPGGVKNDKRDVVIANFEGLVLYPRLVRNPGMERANVQDEVAQESGIWSSIKTTIKGLANPAKPAKKKAEINIFSVASGHLYERFLSIMILSVIKNTDSRVKFWFIENFLSPSFKDFIPHMAEKYDFDYELVTYNWPHWLRAQTEKQRIIWAYKILFLDVLFPLDLDKVIFVDADQIVRADMKELVDLDLKGAPYGYTPMCQDRTEMEGFRFWNQGYWKDHLRGKPYHISALYVIDLVRFRQMQAGDRLRNHYQQLSRDPHSLANLDQDLPNNMQNDVPIFSLPQEWLWCETWCGDEGLAKAKTIDLCNNPLTKEPKLDRARRQIKEWEDYDNEATEFAKKVNAELKQARRQAEATPTNARDSHAFKDEL

SEQ ID NO: 3871 - protein, 1523 aa, Aureobasidium subglaciale
MVPYQYLAANTAFLLGLQAICTSAAPSVNVALKTSFNSAPYLVELLETAADENSTAYYPLLDRIAEGHFDQASTDRDLYELFKKTLQDEGHLAKAEDISSFEYALSIHAAAPRIEAHYQFYNTTVEPTLKRRTDKSCQTWLHFNGQQYCDSDLASSSGELLDQERVLDLPFDRIAGNKQSKTPAILYADIMSPTFREFHKTVSATAKSGKTSYRVRYRPSIDIAGSPLAVSGYGIELALKRTDYIVIDDRQAEDSDSVSSDGSSAKLTDEDVADLKPLSSKELLRLDMRASSFVMSSADPFDTLLKLTQDFPKHSAAMSTQEISEDFRKEHLVNREVFLPSGYNVIWVNGLQVLARDFDAYAMLEHLRRERKLIDSASELGLSGKEAVQLLSHSSISEASSSQEPQRYDWRDELEDGKVIIWMNDIEHDKRYAEWPSQVRALLQRTYPGQLPPVRKEIHNLILPIDFANYKDVEMVVESLQSFVKRKVPIRFGLVPKTTSAASSEQAKTVYYLLDTYGLGVALEYLQKLSSSQGRKLAGPVQSVFDGAAKGRKLRKDRTSAPLQEVLQNDDFNARVASARKYLGRLGASGNTPPFFVNGIPLPMSDEWLQEMSQRVSTDLRTVQKAIFEDELDDDSYIPEVFLARASARRNPWVIPEDENSIRQVNLASLSDLTEGAIGSVPSLPASKDTVSSDLVHLVIVADFDSEASQRMLSALLTLRKDEYDQVEILLVHSSTTPLSTSSFAVELFKTMILGPTVSLDALQALLSKGKVTVSEEDVVAANAFWSSADRFLEEIGFSSGDQGILLAGRVVGPLPSFEDFDGDDFETLLSYERMKRLMPAAAAIKGVNIADKANTALSFSKLSNLIALSSKSDVPEGMFDSSPPARSDVFSGWTGSHTLIERGDAESATIQIVASIDPASETAQRWVPILKVLSELSGVHLRLYLNPKERLDELPVKRFYRHVLESKPRFDKAGSLQGTLAHFGGLPADALLTMAMDMPPAWLVAPKDSVHDLDNIKLSSTQGRDIEATYELESILIEGHSRDVTIGTAPRGAQLVLGTNKDPHFADTIIMANLGYFQFKANPGFYNLTLQKGRSEEIFKIDSAGTIGYSPQAGDEITEIALTSFRGATIFPRLSRRPGMEDEDVLESAKTTADHIANKADAILSKVGLGSVKSGDVLSKAQKFGSGLLSKSGGSSTDLATLPHADINIFSVASGHLYERMLNIMMLSVTKHTSHTVKFWFIEQFLSPSFKAFLPIMAEEYGFRYEMVTYKWPHWLRGQKEKQREIWGYKILFLDVLFPLDLDKVIFVDADQIVRTDMYDLVKYDLQGAPYGFTPMCDSRTEMEGFRFWKQGYWKNFLRGLPYHISALYVVDLVRFRQMAAGDRLRQQYHQLSADPNSLSNLDQDLPNHMQHVLPIQSLPQEWLWCETWCSDETLGVARTIDLCNNPQTKEPKLERARRQVPEWTIYDDEIAALAQRKVGEGKSPIAGHAGGAGIQAEMQEADARAQREENEMKKQKSHDEL

SEQ ID NO: 3872 - protein, 1603 aa, Microcebus murinus
MKWVGYNVFFTNSSITNISPFHDILGHCHFGSLLLGLCSCRYLHTVCQSNRTCRQLRHELCLFEFTLYSPLQLAEATVLHFYVCARFYDGLWHPVHLDEGECEFLAEDSQEKFWNFVEASQNIGSSDLHGTDYSYYHAILEAAFQFLSPLQQNLLKFCLSLHSYSATIQAFQQIAADEPPPEGCTSFFSVHGKKTCDFVTLETLLLTASERPKPLLFKGDHRYPSSNPESPVVIFYSEIGYEGFYKFHRQLVSQSNEGKINYVFRHYISNPRKEPVYLSGYGVELAIKSTEYKAKDDTQVKGTEVNTTVIGENDPIDEIQGFLFGKLRDLHPDLKGQLKELRKHLVESTNEMAPLKVWQLQDLSFQTAARILSAPVELALVVMKDLSQNFPTKARAITKTAVNSELRTEVEENQKYFKGTLGLQPGESALFINGLHIDLDTQDIFSLFDVLRSEARVMEGLHRLGIEGLSLHNVLKLNIQPSEADYAVDIRSPAISWVNNLEVDSRYNSWPSSLQELLRATFPGVIRQIRKNLHNMVFIVDPAHETTAELINTAEMFLSNHIPLRIGFMFLVNDSEDVDGMQDAGVAVLRAYNYVAQEVDDYHAFQALTHIYNKVRTGEKVKVEHVVSVLEKKYPYVEVNSILGIDSAYDQNRKEARGYYEQTGVGPLPVVLFNGMPLEKEQLDPDELETITMHKILETTTFFQRAVYLGELSHDQDVVEYIMNQPNVVPRINSRILTAEREYLDLTASSKQHFRNNFVLFFNLCFRIFAFIGLIYTESSLALILVEKFYYFCFVSLNLSFLNFMHGFQKLFGITVVLEHIMCFFFFNSICYFCFSIDDSFIRPVTFWIVGDFDSSSGRQLLYDAIKHQKSSNNIRISMINNPSEEISYENTQISRAIWAALQTQTSNSAKNFITKMAKEEAAEALAAGADIAEFSVGGMDFSLFKEVFESSKMDFILSHAIYCKEVLKLKKGQRAVISNGRVIGPLEEGELFNQDDFHLLENIILKTSGQKIKSHIQQLRVEEDVASDLVMKVDALLSAQPKGDARIEYQFFEDRHSAVKLRPKEGEIYFDVVAVVDPVTREAQRLAPLLLVLTQLINMNLRVFMNCQSKLSDMPLKSFYRYVLEPEISFTSDSSFAKGPIAKFLDMPQSPLFTLNLNTPESWMVESVRTPYDLDNVYLEEVDGIVAAEYELEYLLLEGHCYDITTGQPPRGLQFTLGTSANPVVVDTIVMANLGYFQLKANPGAWILRLRKGRSEDIYRIYSHDGTDSPADADEVVIVLNNFKSKIIKVKVQKKADMVNEDLLSDGTNENESGFWDSFKWGFTGGQKTEEVKQDKDDIINIFSVASGHLYERFLRIMMLSVLKNTKTPVKFWFLKNYLSPTFKEFIPYMANEYNFQYELVQYKWPRWLHQQTEKQRIIWGYKILFLDVLFPLVVDKFLFVDADQIVRTDLKELRDFNLDGAPYGYTPFCDSRREMDGYRFWKSGYWASHLAGRKYHISALYVVDLKKFRKIAAGDRLRGQYQGLSQDPNSLSNLDQVSCNNPMTKEPKLEAAVRIVPEWQDYDQEIKQLQTRFQQEKEGGALHEEQTEALSRAGPQKREEL

SEQ ID NO: 3873 - protein, 1492 aa, Caenorhabditis remanei
MNLFWSLLIVCQAVLLASADKKGVQTSLKASWDSTSLLAEASEFIADESEKKFFKFVDIVNNDAPTLNWNKLTDEQKYEYTIKTASKVISASSVDLLKFALALRQYSPRVQSFQQFQIAAEYEESCEVFAVAGDQVSCDYEKVDHLLRDAKRDTRVLESDHFVGDKQSKKAVILYGELGTVSFAKAWQNLSKNQKTGLIFRHFSKNVESNPVSLSGYGVELAIKNTEYKAVDESNEKKSVEEDETDLFGFNIKLLKELHPDSVEAIESFRVNLKESDELTPLKRWELQDLSYQAAQRIVNAGPAEAIGTLEEYSQNFPTHARALAKTTVDEKLRKEVQLNRKMLEEANIEVGETSLYINGINQDINSLDLFKLADLLKQENKLADGFHSMGINREYLSVLVGMDTSDDEKISYAVDHREGYPFFINNLDTDKKYKQWGNSVKLMLQPYYPGMIRPIARNLFSLVFVVDPSTADGRKFLRIGQTFNSHDIAMRIGYIFVVNQDAKASGENDLGVALLNLFNFVSIDSSNAEALKVLNNFLDGYRSQEPTVADLKDFFEGKFSDTNFKDVFGVDSDYDKGRKHGYEFLQKTGLSSAPKVLLNGFILDEEGVRGDNIEETIMMEVMKISPKIQKAIMEGKLTDRMNVGNWVLDQKEVMPRINKRILSAPSKKTYVDMFGAKECKTLKGAESLPDVDKASCLLHTTKYLQKATNDAILPVTLWTIADADSVDGRRFIYNSLQILKNSAKSRVGIIFNTENVEKSCESNSISSYIRAALEFLPMDQAKRLILKLSNEEYAADFISGKMTFDDLSVGGMDTAKFLADKKKLDCERTRAEANLVKSLLDIKAGDRVVVGNALQVGPLDKDEHFEAADFKLLESMLLSRGAEVISSHLSKWEFTAANGAGSNIAFSIAGVVGKHASSQKRTWVSIKGDEHSVVTLTADESNKPAVDVLAVVDPLTLEAQKLGTILQLIKKVTNCDIKIVMNPKDKHSELPLKRFYRYAAASELNFDHNGKLNGNVVRFDNLPSKQLLTLSLQAPDSWIVEAISAKYDLDNIKMEQASGDVTAVFALQHLLLDGQCFDEISGQPPRGLQFVLGTEKNPKQFDTIVMANLGYFQLKANPGAWNLEIREGKSSEIYKIGTHVGAEKIGEDTLQVVLDSFTGKSVRVRVEKREGMEERNLLADDEEGVWSSLSNLVTSKEKPQEVINVFSLASGHLYERFMRIMIVSVMKNTKHPVKFWLLKNYLSPQFKETLPTLAKHYGFEYELVEYKWPRWLHQQKEKQRIMWGFKILFLDVLFPLDVQKVIFVDADQVVRADLMELMKFDLGNAPYGYVPFCESRKEMDGFRFWKQGYWANHLAGRRYHISALYVIDLQKFRQIAAGDRLRGQYQGLSGDPNSLANLDQDLPNNMIHQVKIKSLPQEWLWCETWCDDASKKNAKTIDLCNNPLTKEPKLDSANRIIGEWKTYDDEIREVISGHTISEPVINETEDSHTEL

SEQ ID NO: 3874 - protein, 1625 aa, Puccinia coronata
MQRSRALRDRLGWFLVLTLQVLASSPPISVSIQATWQDPPMLVQFLESAALERPRLFFSSIDAVCSSWETSKSQLSTEQQTYEHLISLLRSPGLLDGPGEIESLAFSIALKEAHPKIEAFRAWYASLPSNLTGALESEDNASSETKDCKSWALINNSKICDISKLSELLHPNYRLSEKIQSPPQVLPFDHKQGHQSTQKSSVPTVILYASPDPSSFCPFHQVLHKASKKPQPDTTYILRWKIPSTPSASSKPSLLSGWGASLDIKKSEYLTLDDRPVESSSSEDAQLILDGTKKPAGNEMQVDSEQAKLTPLKAAEIFDIGAKAAQHVLSSPSPLSALRNLAENFPLIAHTLVNEWVPGRISRELRLELQENMAAGGIPPGQSVVWMNGLQLSSLVSLENLDFFKLVEIMRSERHWISSLTSLGISSLQARKLIVDEKLNLAMNPEASSASEIGEIDASSLGARFDASDRQEGGGAIIWFNDLEHDERYSMWPTTLRAILRPTFPGQLHAIGRNLLNVVLGLDLTQGQNLHNLGHVIEVFISRNLPIRWGLVPIPTRNTSEGEKMARCFWDMIQALGPMETLKFIKEFTQDLDPQAGAIDVPKFIAEARERVSSEEESAEEAQSHEEKFESWLKKSQLYSSRLSLCSNDDSVPACMLINGRFFPMDENYRSQLQETASLHIGFIQHQVYFNLLKDGVNVAEYLYDLPVVHRARNDFVFPSEARPLKFVNLVEALHATNVLAANTFFQNLALPAQDDSPRPIASLWVIGNLDSNIGLASVAATLGLLIKSSPDASVQASFVHIPSNDPETTKGISTTLAGFLSASDEEKIHTSDLLDQLSRHGHHVIASDDGNQPIPDKTTKLILKKVQTEIVDTPGTNDLPWFGTEEFARTMGVKSDGVAILINGRLLHVSPSTKLLSEDLVMLVEYEAQQRVNPLMEALKNLDGFDLAKHNLNVPLIMATVGFVLVGSSDDTSSQTFSLEARSSKHLSRDGNYSSYQHGDQSKALFEFSVILNPASEAAQRWSALLETLSHRSDVAIKIWFNPSLEVSELPIKRFFRSAIWNSLEFDQNGRATPALVNFRGIPTETLFTLAIDTPPAWLALPHDSIHDLDNIMLSELPATYSSQGVEAIFQLDHIILAGHAREVPSDIPPRGLQVVLSDLLRNQEVDTIIMANLGYFQFKSAPGVHRLSIRPGRSLELYQFEKTDSTDGNDEPYQLLSLTTFNGLTIYPRFRKRPDKSSESLIQPLSTSSPKGPVGEFSKMMGHVKHLAAGMLGHHGLDLANGTARSVINVFTVASGLLYERMAYLMCVSVMRHTRSPVKFWFISNFLSPSFKRFIPHLAREYGFDYQLVTYRWPSWLRAQKEKQRVIWGYKILFLDVLFPLEVDRVIFVDSDQIVRTDLKALADLDLGGAPYAYAPMCNDRNETKGFRFWDTGYWKESLQGRPYHISALYVVDLRVFRTVAAGDQLRQHYQALSADPGSLANLDQDLPNNMQGILPIFTLDQSWLWCETWCSDEGLKAAKTIDLCNNPLTHEPKLKRARRLIPEWDVYDQEVAALAARIKDNDKGDLSSKITVQAGEKIEDEVPENNKRTEHDGGDDELESSVLDEEGKGSTDHDEVGTRDEL

SEQ ID NO: 3875 - protein, 849 aa, Caenorhabditis brenneri
MIGNQFLVKSGFQLKPLALLNGYPLDTSSPETFETSLAENVQQQTLRLQLYLYHRKIDDSVKIDEWWLTPENNKDIVKRISENVATAFNEKKILKLDKDSSELLKNLRYFSENPGIVKAIVNVTTWIITDFESTSNRLFTIKALKSIATQKNNKVALISNPKDSKKPCSFNLDEAFSLNELIEVLEREDSELDYCSSTKIPKEFLEKYGGKPGDTAVISNGLIIGVKDDFEIEDFEYLDKLWKEKGAGKATEYLNKKFKEDVSVNFYSTLSRTHQKDRTKIRFDDFKSADETNLMVFPPKNPNSPALTITWIANPITREAQHLISIVKLLGRVLNSKIEIIFNPPFEISEMPIKRFYRFVGSEELEFDESGAVKNHVATFSNLPQKQLLTMSMETIDSWMIEVKQAEYDLDNILLETIIGDVEAVFSLEHILVEGQSHTESGEASVGMELELKSKNAQYDTIVMKNLGYFQLKAEPGIWNLRLRNGTSSQHYRILEVDSKNIKKDARIVVDSFTGKWTELTVEKLDRNDDESSIEKLMRSAKGYFTTPESTESINVFSLASGHLYERFMRIMMVSVMKNTKSKNVKFWLLKNYLSPKFKETIPILAEFYGFEYELVEYKWPKWLHQQTEKQRVMWGYKILFLDVLFPLNVDKIIFVDADQVVRSDLLELMNFNLNGAPYGYVPFCENRKEMDGFRFWKTGYWESHLMGRRYHISALYVVDLKTFRKVYAGDRLRGRYDSLSSDPNSLSNLDQDLPNNMIHEVAIKSLPQDWLWCETWCDDKSKKTAKTIDLCNNPLTKEPKLNAAQRIIGEWKDLDEEIAEVIRNDGHIENPVVTEEKKMGGREEKDEL

SEQ ID NO: 3876 - protein, 1652 aa, Stereum hirsutum
MRAGRVLGSSVVGLLCTVGHGARAASPPVKVALRSSWPSPPFLLELIETIALEDPSAYFPVLDILTDPTTLPSTTPLSHEALHQLAFQSTVSLGYLSKPGAPEYAEMQLALHAATPKIEAFYQHYTDTTRGRILDTEQGEEGGAKCGSWVDWYGEVVCDVERLAHLAGPETIDAESYEGSAHSDMFPRPHILPFDHIYPALSQSSIHPPRTAIFHADLSSPNFRELHTYLMRLSSAPSPRIEYVFRPIPPPNRDSKEKTYLSGYGVAMDLKKMDYLALDDRRSRGSQESSQEEKNSEEDKPGISLRSEQIVSLIEKYPLNTTLEPTEPLTSDELMLIGFQATQLIADSPTPFSTLKELIQDFPQYATAIARHVEVSEGLAVEVYMNSQKATPGTSMVWLNGLAVGDVDMNPASLLKILRKERDFMLSLTSLGLSSSQALDLISHNAIEAANGGSDLLDGLFDASDRPEDGDLILWWNDLEKDSKYARWPPSIFALMRQTYPGQMPAARLNLFNVVLVLDFSQPGSLYYIASTISNIIQRGNPIRFGVVPMAVEGERKEEGERMARLIWYLVDRYGRAKTMGFLKNILQLPKPAKDLPTNIDWSLVRSEFESLHEQFPPLNGTTILPYDSVITPNANAGASEGQDEGKETEAEQIYAVEMHERLEKAATYGKRLGVVPAVGVKNPKGQAFVNGRHFYMNDAFLSSLQEEVTKMIQFFQQQIYEGLITEETAVGVDFSTFFYDFPSTQARRNKYVFPKSDVKIFSVPNLLEKAGAEELGDVFVYPEAETVPMTVYVVADLDSPKGLSVVRNALEFAESSEVRLAFIHNPNSSTSGSAGAHHQISSLFSHLHAKSYNGVTPTRLLRALGLDHTHSRHTSEQSQHEQIVLSPSTDEALHELMNGVDLAEVMKSGVYEEFVDVGKRVVKELGLSEGEAGLVVNGRLVGPFDSDEFGVEDFKVLESYEMARRAGPVLEALESVGISSENLDRASYANLVSSASSIIANMHIPDPSEAGLFNTPPTTRNTRYKHMEGKYSAFEMGDSETALHRFAVVLDPLSEHAQRWVSLFEWMLYLPSVHVTFYIHPAAYNEIPLKRFYRYNLVPTLDFDDNGRELPTTAVFDNLPIDPIYTLGLDEPSAWIVRPREALYDLDNIQLGVLSGEERIRGVEVVYELDYLVVGGHARDLSSSAPPRGLQLQLTTSDGTAIADTLVAANLGYLQFKVTPGVYQLQIREGRGRDIFEMQSVGNEGFVSPSVEEVGYEVTVTSFEGLTLYPRLVRKPGMQNQDVLHVPEEEEEPKGIVGDIINKVSSLFGSSKSTELAVVPQRHADINIFTVASGLLYERFASIMILSVLRNTNHTVKFWFIENFLSPSFLEFIPHFAEEYGFKYELVTYKWPTWLRAQREKQRIIWAYKILFLDVLFPMDLDKVIFVDADQIVRADLKELIDLDLHGAPYGYTPMGDDNTDMEGFRFWKTGYWASFLRGRPYHISALYVVDLVRFRLMAAGDVLRSHYHQLSADPNSLSNLDQDLPNNLQAQVPIYSLHEDWLWCETWCSKDRLDRAKTIDLCQNPLTKEPKLSRARQIPEWEEYDSEIARFTRKLAAEGRIHASAAAADINELANSASSIPTVESESSDVKDMGEDAAKDTEDSHARDEL

SEQ ID NO: 3877 - protein, 1329 aa, Saccharomycodes ludwigii
MKHCLLLLILLGYIVSVLAGYTSIPVSSKIASLPPNIKLLQVIKSIGLISIETFQEIYGILTDIENEREDSAFDFKIKYNTVLQFLNNTHPTIVPLVELNYKLGIHDFPESGGYHNHENFFVLNNRKYFQADDLFYLKTKELKSALLSEIEPKRGEIPIGTDANAPIIYFYGCDEDEDFYEFNYNLWSESQGGKIQYIWRYTCGSIEYAELGANLDLSLKLDDLEDRKTLLDFVAQDSNLTRISITNKYNNDMKLLDLQTVSLIFEDYQINGDFWKAFDYAKDIIYNLPLKTNDLVNTNIDPYIELIQKEMEENEKKGLDYGMLGCYINGMQLRYSELNINSFIKSIIREWGFIKKLKKTCSESLALKTFQIKNLLTTYSLISLPYLQSSQPLKFDVTDINNEDLIVYFNDLESDQIYNDVLSKDIISFFEESPYGELPAYSENWSELIFLIDFDDENSIDILRGMLRVIEVVKNGYPQRVGLIPMGDCRIVSEIYRHKSDDLEELIDFFQNIHVNKKKFSANTTLCEELDVFLQNVAINGNSFIINGEIYPFRQNSWNYLVNKVIVKDTTFLRKEIKRYLHQSLDEVVTARKLLHSDSQPFKRRDLKYTPDYFGDSTYTTENVKAITGLQGRILVIVPNLEYNILNTLTLVDNFDSCESWKFLCNFLNLKLYGIRIRLIHNGSTKSKYWKQLLDLFFDGVPSIETFQKSMPKIRNIKRSYKNIENANYIKSMRKFLPDLPDSQITAQRFLLLNGKYIKLDMDEIPSSQTIKNLLKRESKRTLNVIIALEQIVPNYSENLIEPDFVEQLSSILTKSFFDDYLNQNGIYFTSESSLPRLALSKILGFKNKLMSFEEVNYPTVKPVDITLLLDPTEERTQKMLSLVSMVRSLSFVNVQLYFLPTKELQLYPVERIYYDNIGEFSSVSIDNDIFEAKLEYLLPNLHVIKELDLNIISEIWVEANVYNIPPNRNIVESDVSGMCLNVIRRSSNKNDTVISQFINMRTFGYGSFKLPMDAYYDEYYVKSCSPEYKVKAFGLDIKADFSGWDSFNLNDVLNNNNRIYIEVTNETYPSLGNSLSTNNTNKINMVMNIFDKRYEDEFFQFMEYLLHRNNQHIYDIKIWILDHQGISVAFKSKLSQFMKAKGPMLFEYEFVSYHWPSWMRPEKYLHRELDLARVLLLDVILPLDIEACIYIDIIKIKNWNLIEQVALNYDKSYSNASGIIYLVPYPEIEYGYWKTGYWEKYLDKNDLLFYQTDFVMVNMTNFRKAEAGDKLRVHYQRLSSDIFSLRNVAQDLINNIQLQVPITSLNKFSTMPSEEKNKLNDFPTNDEL

SEQ ID NO: 3878 - protein, 1511 aa, Dimargaris cristalligena
MGRFPYRRLLCWALAPLGLAHAQSPPVQVSLTAQFPAPPLALEIAEYISTENRTAYLPLLDHLVATPTAPPQVIYERALAFIHQEHMLPGAPAQALLEWAMALHIAAPAVQTFYQYYTGTVVPEMHRAESEFDPNCPVWVWYNLRQYCSWGSLRQALGGPASVAPPRLPFDHLDSSHSARSGGTSAGPTFIFYADITDPDFVFFFRQARHLARAVTGTLIFRPRPPRAAGLSAPAPLDLTGYGVSLTLKSTEYKVIDDSQLATDVPLVRALSPSEIKDLGLIAAQYIINQSQSTVDPLRALTLVAQNFPKYAAQLASQTYSPALAQEARALIMKRLNPGIWLNGLPLKHSTLRPLDSFGLVQSLRAEAQTIEFLLRLPLTPCQARQLLGSSFLDPKQGRTAVPIYDVREDPLSPAPALVWYNDVERDPAYAAWSKLEYFRNSLYSNGLRPMSKNLCSILFVVDLASHRGLEILVDDIAVSLRQRLPLRFGILPLIPANPEATTPSAVMARLFYHLMATLTRDEVSQYFAQVLRLKRLHPQQDITTVAREVFDEQFPSATVDFATITGSEGPYRASMDSATTLLARLGVNPADSGALFVNGKYFELAEGYRTHVMEVYQSDSMLLAQAYFQGQIDNDTDLYEYLLTQPGALTERNPYIIPSPARPLTVYNVFAAGVESTSGDWIHRLGYFYPFTLTDTTSLPIVSIWVVGDLKAPASRQDLQASLQLCLRDPTVRVAWLPSPVATDALDASPLARLVGAVQRLAQDLYNAKVFSQELEASNQAIAPFAPYLYHALSFALEHSDINDTTRTLVVNGRRLPDLPDSLPLTATALQLLVSYEIKTRIQPIANALDILDGEILAGPASFNDLSAIADKILAAGSIVHSCVTPAATYPTSELPIYRQDLQSMLSNLNQLKFTRGDLKQAWFHIQVIVDPLSEEAQKWGAILETVTSLPRVAVEVYLRPDLSLDELPLKQFYRYLAPAALQFDPEDGQVYPPSLTFNGLPTQPLFTLAIDAPSAWMVTPVACAYDLDNIQLATVPSAQASEGIRAHFQLKHIMVEGHCQDLTLGYPPRGLQLVLGNPAQPHVADTIVMANYGYVQFLADPGVWTLRLRDGRSSDIYVLEDIASDGWSGDALRDVQAQIIVNSFQGAKVYPRVRRRPGQEAAQLLQTTEETANPSPPGYFGSTSGLLRTLQDWVGQAAHRIHIPFLGSSSSGVGPLRTIHVFSVASGHLYERFMAIMIVSVLRHTEHPVKFWFIENFLSPSFKQFLPTLAAHYQFTYQLVTYQWPYWLRPQKEKQRTIWGYKILFLDVLFPLDLDRVIFVDADQIVRVDLAELANIDLQGAPYGYTPFCDNRPEMDKFRFWKGGWWAQHLGHKPYHISALYVVDLRRFRQLAAGDRLRQQYQLLSQDPNSLANLDQDLPNNMQHEVPIFSLPQDWLWCETWCSDESLGTAKTIDLCNNPLTKEPKLKRAVRLLPEWEVYDSEIRQLREPLPDSTPTPSVSTVSPTHDEL

SEQ ID NO: 3879 - protein, 1514 aa, Diabrotica virgifera
MKFLTLSTVFIIFLSISENVNGKAKKSKSVTTLLEAKWQATPLVLETAEYLADENIDFFWGFVDSISSLETPLSSIGSEHEQYKTVIKHASKFLTPSQIAVLKLGLSLHVYSPKVQMFAQIAQELRLPDCPSVADIGGTVVCNVEDINSLINEPSENHKRIELHRIDNHFPGSANRSLAVVLYGQIGTKSFGKFHRVLKQAAVDGKIDYVIRHYVKGNDSKNLRLSGYGVELQMKSTEYKSQDDTELHEDQNSAEASQEDEDTELEGFDFAKLKQIFPNLKNQLDKFKTHLEDTSSELAPLKVWQFQELSLQAAERIMNAPREEALKILTNTAQNFPMQAKGLAKTTVNADLKAEMKKNSNMFAAHLNLQPSDTALFINGMFYDIDLVDVYGILEILRQELKTMEGLHGLGIGNKRMSSLLELDFGDDQNGQDFAIDIRDSAINWINDIEQDPKYARWSSSLMELLRPTFPGMLRQVRRNLYNLVLIIDPTDKSSAELLKLVESFVVHTAPIRVGLVFNVTAKSDVTGLEDVGVAMQCALNYITQSKDAATALTFVRTLLKSVEEKLTVEDIKKQLRKDYDDDPVDILGEDSVYDFGRQLSADFIERVGLKVFPQALLNGVPFPQEQVNVDDFEETILQEVMTQTHSFQKSVYRGKLSDSDDVFDYIMNQPKVMPRLNDRILNKDRSIHLDMTGTASSINNLESLLKLNTRDMTATAIENVRYFSAPKKSGQYHSMTYWIIGDLNCKKSRTLLLDALNHLKAETHVRVSFLPNVNGGKDNTLNKIVLAALQELPSEKALPLVISLLKDDAAARKLENGEKLDLPVEVSSKINAQELNLKMLRIYCQRVLQLKESQRSVIANGRVLGPLEENEVFTSEDFSLLDRFSSSTYWEKIKAALDKNSDDEDDISSNSLMKLISLLIARPQSKSRFEINFSGDEHSVIKIPPAHPDRVAFDIAAIVDPVSRGAQKLGPILQVLQEVLNCRIRVFLNSVEKNSDMPVKSFYRFVLEPEIQFGEDGKQLPGPIARFNNMPTSPLLTQNYHVPENWLVEVVRSVYDLDNIRLENVESNVHSEYELEYLLLEGHCFEQSSGSPPRGLQITLGTESQPVIVDTIVMANLGYFQLKANPGAWLLRLRQGRSADIYDIVSHEGSDTPENSTDIKVLISSLRSHIVKLRVQKKPDKANVDLLSDDDNNNGIWSSITSSFKGSEDESDEKLNIFSLASGHLYERFLRIMMLSVLKHTKRPVKFWFLKNYLSPQVKDFLPYMAKEYGFEYELVQYKWPRWLHQQTEKQRIIWGYKILFLDVLFPLDVKKIIFVDADQVVRADLKELQELDLGGAPYGYTPFCESRKEMDGFRFWKHGYWRNHLQGRRYHISALYVVDLKRFRRIAAGDRLRGQYQALSQDPNSLSNLDQDLPNNMIHQVAIKSLPQEWLWCETWCDDASKDKAKTIDLCNNPMTKEAKLTAAVRILPEWKGYDDEIRNLQKKIDSGLLDADPAENSDVSEKERTDTHQEL

SEQ ID NO: 3880 - protein, 1444 aa, Candida viswanathii
MILMRGIAAFLACVLVPTIASSSLQNNITIQLDAPWQKIDFLPILLETVAAHNDSLYFDAIETIYGLGESDTDWDDEFSDRIIYEEVTKNLDEYTKSFIDFDLVNKKYTPRIVSHYDHYEQVLHQLGDRLETECKHDSFGNEVERKNGQLRTWLLYNDKIYCSASDLFALRTDISKEHELLFDRVIGDNKDAPLVVLYGNPVEELTKEFLKVLYPDAKAGKIRLVWRYIPAAHKKAETLPGYGVALKVKNYDYLASDKTPVLNLAKDLKKINESNELFPVPEKDRDELGVKLTSFILSNRYKIPKFDLLLTLLNNFPKFIPYVAKLRKPLNYEKVKTKVLANEDVGMADESYGLYINGSPINGLQLDVFKLGTKIQEELKIIQNLVKLGFDTAQAKLLLTKFALLSAVKQTQFRSGNTLMGNNENRFKVYQNEFSKGDPGYGGVVFFNNIEVDVTFSEYTSNREEAYLGVNSYKLKPNQIPLLKENVHDLIFALNLANKSQLRVFFTIAKAILDSGIPQQVGLIPVIGDDPLDEEIARKFFYIVENSNTPEALALLYKYFESANADEAADILKKVKVPEAFQVDYNHVLDKFSISEASVIFNGVIYDLRSPNWQIAMSKQISQDVALIKSFLRQGPVEGKLKDQLYSNAKEKRNLRVIPLEPSEIIYKSVDSELLKHSVTFKKLDKEDGISGTFWLVSDFSKPEVINQLIDLLGLLKTKPIQVRVVNTGDSRVFNHLQKNFKLSALSNSQIDEIIEALEEAELSKNGDAEVWQLLEKKHLPVHHSFLLFNSRYFRLDVPLESAELEELLEYEFSQRLNLFNDILHAYPDEFEAKQLGEFNLIVSGLDTMDWFDLVSSIVTKSFHVDDKMFIVDVNRFDFSSLDLSNSVDVTTNKDENPIDILAIVNPMDEYSQKVINIVNSIKSFPFVNIRILLQPKVELNEQIRILQFYRGVFPSSAVEFDESTGKWADNNVAEFNNLPGDVALSSELNVPAKWITISKLSPIDLDSITFKESSNIQGKYALKHILIEGFARDIHTGKMPDGLKFKLTHNNLTTDTQVMSSLDYFQLKATPGISLLSSNPEYGLLSASENKYDSNHEAFDAVEVPVFALDGLTLYPRITSADGVTKRTSTKHADINIFTIAGGQLYEKLASIMIASVRKHNPKVTIKFWILENYITPEFRDLMKLVSEQYNVDYEFINYKWPQFLRKQKTKERTIWGYKILFLDVLFPQDLDKVIFIDADQTCRTDLTELINMDLQGAPYGFTPMCDSRKDMEGFRFWKQGYWSEVLKEDLKYHISALYVVDLKKFRSIKAGDRLRAHYQKLSSDPNSLSNLDQDLPNNMQRQIKIFSLPQEWLWCETWCSDESLGGAKMIDLCNNPVTKENKLDMAKRLIPEWAGYEQEIEELRKRLTVEEQAEDDEVDDGAATGAAADDDDDDDEGYHDEL

SEQ ID NO: 3881 - protein, 1513 aa, Leptinotarsa decemlineata
MNIILTLALILCFNVRDFVKGKTKKSKSVTTLLEAKWEATPLVLEVAEYLADENEDFYWNFIDAISSLEPPLTSIENDRDQYHKVMGLTSKLITKSQLSVLKLGLSLHIYSPKVQMFGQIARERKLPSCSTVADVGGVLTCDLKELESLLRKQEGNLAQIEVFKVDTHFPGSANRSMTAVLYGQLGTPEFSQFHRLLKQFALEGKIDYIIRHYVKDNNSKPLRLSGYGVELQMKSTEYKSQDDTKVHEDEKSDDNSEEEEDLELEGFEFSKLKKIFPHLLKELNEFKTHLEETSNELAPLKVWQFQELSLQASERIMTSPKEEALKVLINIAQNFPMQAKGLVKTVVNSDLKYEMKRNSDKFSTNLNLQPSDTALFINGMFYDVDLIDIFGILEVLRQELRAMEGLHSIGISNKRMSTLLGLDFGDDSGSQEFAIDIRDSAINWMNDIEHDSSYARWSTSFMELLRPTFPGMLRQIRRNMYNLVLIIDPTDPKTRGVLKLVESFVLHTAPIRVGIVFNVTDSSNLSGLDDAGVAMQCALNYVTQSKDAPTALSFIRTILQAAEERVTVEDVKAHLRSQYDEDPVDILGEDSVYDFGRQLSFDFIQRTGLKVFPQALLNGIPLPQKQITVDEFEEAVLQEIMSQTPSFQKNVYRGKLSDTDDVFEFIMNQPNVMPRLNDRILNKERSFHLDMSGTASSTNNLQALLQLSSRDMTATAMENLKYFSVPRKGKNPHSMTYWIVGDLNCLKSRKILLDALENLKSASDVRVSFLPNVNGGKDNELNKIVLTAVQELPTEKALGLVLSLLRDDSAAETLKKGEKLDIPFEVSSKIESQELNLKMLRVYCQRVLKLKESDRAVVANGRVLGPLDENEEFTAEDFNLLERFSSSSYLEKINGILSKDAEDEEEITSDSMMRIISLLISRPQSRSRFEIVYAGDEHSVLKLPAAHPDQVAFDIVAILDPVSRGAQKLGPILQVLQEVLNCNIRVFLNSVEKNSDMPVKSFYRFVLEPEIQFSEDGRQLPGPLARFNNMPASPLLTQNYHVPENWLVEVVRSVYDLDNIRLENVESNVHSEYELEYLLLEGHCFEQTTGSPPRGLQITLGTESQPVIVDTIVMANLGYFQLKANPGAWLLRLRQGRSADIYDIVSHDGSDTPENSTDIKVLISSLRSHIVKLRVQKKSDKQNVDLLSDDEGGSGIWNSIASSFSGTEEEPDQKLNIFSLASGHLYERFLRIMMLSVLKHTKTPVKFWFLKNYLSPQIKDFLPYMAKEYGFEYELVQYKWPRWLHQQNEKQRIIWGYKILFLDVLFPLDVKKIIFVDADQVVRADLKELQQLDLGGAPYGYTPFCESRKEMDGFRFWKHGYWRNHLQGRRYHISALYVVDLKRFRRIAAGDRLRGQYQALSQDPNSLSNLDQDLPNNMIHQVAIKSLPQEWLWCETWCDDASKEYAKTIDLCNNPMTKEAKLTAAVRILPEWKGYDDEIRELQKRIDSGELDADPSEEKEVVDKGATDIHSEL

SEQ ID NO: 3882 - protein, 1529 aa, Pangasianodon hypophthalmus
MAASSKPRHQTMRVLGLLLVLMQLQHAHSASKGVTASLKAKWPMTPLLLETSEFIGEGGDDKFWQFVDTVKELTVYKHGESVRSYYNLIIKKAGQFLSDLQVSLLKFSLSLRAYSPTVHAFQQIASDEPPPDACSAFVSVHGQHACSTKNMKKLLKGAAGRPKPYLYKNDHKYPGVNGTDLPVAILYAQIGTKKFNTFHKVLSEKAEEGKLIYVLRHFVAEPKKQHMFLSGYGVELAIKSTEYKAVDDSQVKDSKSTASFEEDDTDDVQGFLFGKLRESHPELREQLGELRRHLLESTNDMAPLKVWELQDLSFQAATRIMSVPKFDSLKLMRDLSQNFPSKARSLTRVAVNQEMRKEIEENQKRLSKSLGIHPGDASLYINGMHIDLDLHNPFSLLDIIRGEAKLLEGLHSLGITGTTLGKFLRLPVTTVEDSYALDIRHAAIMWVNDIETDSTYRNWPSSIQELLRATFPGVIRQVRRNFFNLVLFLDPVQEDSIELVKLAELFYKHKIPLRIGFVFVVNTDEKVDGYMDAGVAFFRVLNYITEEYDVTQAFLSMVSMYNKVDVGDSLSVDTVTAYLKKKFPKANAAKILGVDSSYDDKRRAGAVFYRKSGLGALPVGLFNGVPLSTDEMDPDELETILLQHIMEATNFFQRAVFTGQISEGTDVVDFLMEQPNVVPRINPLILNSDRRYLDFTASPVADDWDDSTMFSFLDSKDKTAVVSKRVKYLTKHEEEMVYGVTFWIVADIEQASGRQILLNALKHMKSSSSSSRVGVINNPSDQPTEDNSSLYRAIWASFLTQSTKNTLDFTLKLLKEESVQLLTQGTKIKELLLKGMDQDAFEKKFNTMELGFLHSQQRFCQEVLKVKAGQTAVVSNGRVLGPFAEEEEFSTDDFHLLEKLTLSTSADKIKAKVKQMSLTPKNACDLIMKVDALLSAAPKTEARKDIKFVKDKHSVLHLSAREDEVFFDVVATVDPLTRDAQKLAPLLIVLGQVVNMRLQLFMNCRAKLSEMPLKSFYRFVMEADMAFLGNDTLSPGPMARFTEIPESPLLTLNMITPESWMVEAVQSPYDLDNIHLQEVSGVVNAEYELEYLLLEGHCFDLSTGQPPRGLQFTLGMKQEPLMHDTIVMANLGYFQLKANPGAWILRLRKGRSEDIYQIQEHDGTDSPADAGDVIVMLNSFHSKIIKVRVQKKPDKLNEDLLSETIESKSLWDSITSLTGGSSGEEGDTKKEDVLNIFSVASGHLYERFLRIMMLSVLQHTKTPVKFWFLKNYLSPSFKESIPHMAEAYGFQYELVQYKWPRWLHQQTEKQRIIWGYKILFLDVLFPLAVDKIIFVDADQIVRADLKELRDLDLEGAPYGYTPFCDSRREMDGYRFWKTGYWASHLGHRKYHISALYVVDLKKFRKIAAGDRLRGQYQALSQDPNSLSNLDQDLPNNMIHQVAIKSLPQDWLWCETWCDDVSKASAKTIDLCNNPKTKEPKLSAAVRIVPEWSRYDSEIKQLLKRVKDQKESTNSSASPTQRTGSHRDEL

SEQ ID NO: 3883 - protein, 1545 aa, Denticeps clupeoides
MYLPNMAAAAGSLEAGFGTMWKVLSALLALLHLALAGTDSKAVTVTLSTKWQSTPLLLEASEFLAEESQDKFWDFVEANQNILNEHDETDLAYYELILKRAGALLSPVQLSLLKFALSLRAYSSTVHSFQQIAHNEPPPSGCAAFFNVHGQKSCDLAKLDGMVDTASERQKPHVFKSDHKFPSTNPEAPVVILYAEIGKREFSVFHQRMLFNANKGQINYILRHFVVSPSYKKVFLSGYGVELAIKNQEYKAKDDTQVEGAGVNATVIGENDPVDEVQGFLFGKLKTLYPDLKEQLKELRKHLVESTNEMAPLKVWQMQDLSFQTAARILAAPSVDALTVMRDLSQNFPTKARSITKTVVNSEIRKEIEENQKFFKGTLGLQPGDSALFINGLHIDLDVQDIFSLFDVLRNEARVMEGLSSLLIETPFIHDILKLNVQPTDSDYAVDIRSPAIYWINDLEMDSRYNSWPSNVQELLRPTFPGVIRQIRKNFHNLVIIVDPTHEDTAELLSVAEMFYSNNIPLRIGLVFVVNDEDFVDGMQDAGVALLRAFNYIVDEVDNQHAFDAVISIFNRIPSGGTLKLEHVLRFLEKRYPYVEVSSILGPDSAYDKNRKEGKGYHKQTGVGPLPVVLYNGMPYQKEQLDADELETVTMHKILDTTPFFQKAVYLGELASDHSIVDFIMNQPNVVPRINPRVLTTNRQYLDLSNTNNHYIHDYARFFVLDTEDKSTAVANSMNYMTKKDDGFIRPVTFWVVGDFDQPSGRQLLYDAIRQMKTSNNVRLGMINNPSESPSKENSRVARAIWAAMQTQTANNAKNFITKMAKEDTAKAINDGADITDFAVGGMDLTLFRSAYDSPKLDFLLSHTTYCREVLKLQSGQRAVISNGRIIGPLEDGELFNQDDFLLLESIILKTSGERIKNKIEQLGVEEDRASDLVMKVDALLSSQPKGEARIEHGFSDDRYSAVKIRPEEGEVYFDVVAVLDPVTRDAQKLSSLLMVLKQLVNVNLRVFMNCQSKLSDMPLKSFYRYVLDSEISFMADGSFSPGPMAKFLDMPHSPLFTLNLNTPESWMVESVHTRYDLDNIYLEEVDGVVAAEYELEYLLLEGHCFDVSTGQPPRGLQFTLGTPSDPVRVDTIVMANLGYFQLKANPGAWVLKLRKGRSDDIYKIYSHDGTDSPTDADDLIVVLNNFKSKIIKVKVQKKPDRMNEELLSEGSSENDSGFWESLTRGFTGGTKVEEIKQEKDNVINIFSVASGHLYERFLRIMMLSVLKHTKTPVKFWFLKNYLSPAFKEFIPYMAAEYGFQYELVQYKWPRWLHQQTEKQRIIWGYKILFLDVLFPLAVDKILFVDADQIVRTDLKELRDFDLEGAPYGYTPFCDSRREMDGYRFWRSGYWASHLAGRKYHISALYIVDLKKFRKIAAGDRLRGQYQGLSQDPNSLSNLDQDLPNNMIHQVPIKSLPQEWLWCETWCDNASKQKAKTIDLCNNPQTKEPKLQAAVRIVAEWSNYDQEVKKLYSRFQKEKERPGAVDSWQTKAQDAKQGADSHSEL

SEQ ID NO: 3884 - protein, 1492 aa, Aspergillus rambellii
MVFRLGSVASWRLSYVVVSTLLLSTAQASPTVNVALQASFDSAPYLVELLEAAAGENSTSYFPLLDRVAEGAFDDVVTDKELYDRFLQVVVNDGHLSNPESLSTFKLALAIRSASPRIAAHYQFYNASVQHSMMAAQDAACPVWAHSDGKQYCSSTMERAQQDIMGELDTRELPFDRIYGIESLPPAILYADIASPMFKDFHKTLTALAKEGEISYRVRYRPPQHWSSRPLFVSGYGVELALKRTDYIVIDDRDAEKRESNTPESTKSDAKEEEAPDDLRPLSSSEVARLGINTASYVVDSEDPLNTLVNLSQDFPKYSSKIAAHNTTMELLRDIRSNRLGMLPSGANAMWVNGVQVDPRQIDAFSLLDNLRRERRLIDSFRNLGLSAQEAVDLLTHELIGESMANDSPQRYNYRDEIEGGGVIIWMNNLEKDARYESWPGDLSAFLQRTYPGQLPAVRRDFNNIVFPVDLTNTEDIDLLVTTIQVFVKRKIPVRFGIVPLASSPGSTAQLKVAHYLQDTFGLSSLVKYLEESGSRNKIATPDKNSFLAATHEETPRAEKVALTFDEILKSDELEILVSRTAKYQERLGISNDASLAFINGVPIARNENWPQHMSMRVEKDLRLVQQAIVEGLFEEDIWLPGFFLSEAFSRRVPWIIPEDPKEIQVIDIARITQSPNNLLDEVPRIAPEQGDAVESTHVIVIGDFDSQPGLTFLTAALETREKHAKAEVHFIHNPEIFTPHVKASATLFRSLVGAKDSDASQILADINSSMPMELDNAEAEDIFAFWTRYRPLAETLGFAPGASGIVVNGRAVIPSQDVTSEDLGQLLTYEEMNRIAPVAKAAKALGFSSRLTDPLSFAKLTSLVALSSVSDVPEGLFETPSDARVNLFQKWTDGGSVITVSNSDDPTITIAASIDPTSESAQRWLPILRVLSKLDGVKLKLFMNPRDEIQELPIKRFYRYVLDSEPSFGADGSVLRPTASFSGVPVEALLTLAMDVPSSWLVAPKDSIHDLDNIKLSSVSGDSNVDAIYALEHILIEGHSRDMTTKAPPRGVQLVLGTEDNPYFADTIIMANLGYFQFKAQPGLWNINLKPGRSERIFNLDSVGRLGYTPQPGDESNEVALLSFQGKTLFPRLSRKRGYENEDVLETGAKSGSAMDFVSKGFNFASGVLSSVGVGSKSSSEKNADINIFSVASGHLYERMLNIMMVSVMRNTKHTVKFWFIEQFLSPSFKSFLPHLAEEYGFSYEMVTYKWPHWLRGQKEKQREIWGYKILFLDVLFPLSLDKVIFVDADQIVRTDMYDLVSLDLEGAPYGFTPMCDSRTEMEGFRFWKQGYWKTFLRGAPYHISALYVVDLNRFRALAAGDRLRGQYQMLSADPNSLSNLDQDLPNHMQHHIPIKSLPQEWLWCETWCSDEALTQARTIDLCNNPQTKEPKLDRARRQVPEWTEYDDEIAALSRRIEQQRQNQGQMQEEVLSNSRDGYKEEKDNWKKDEL

SEQ ID NO: 3885 - protein, 1512 aa, Callorhinchus milii
MVILPLIFILLKLCRTEAARKGVSASLDMKLPSMPLLLETSEFMADESDEKFWQFLDTVKEITSYLHGDSERNYYNLILKKAGQFLSELQLNLLKFALSLRAYSPTVQMFQQIAADEPPPEGCASFVAIHGEHTCSTGDVKKLLKKAADRPKPYLFKGDHMFLAINPNAPVVVLYAEIGTKEFSKFHKILTKKAVKGEVAYILRHYVQKPSSEKVRLSGYGVELAIKSTEYKAVDDTRLEGTNSTVLEDDDDTDEVQGFLFGKLKQLYPDIKGELRELRKHLIESTNEMAPLKVWELQDLSFQAAARITSAPVYDALKLMRDLSQNFPTKARSLTRTVVSQEMRNEIEENQKHFAETMGLQPGDSALFINGLHIDLDTHNLFSILDILKVEGKVLDGLNKLGIKGKTLSKLLRLNVHPIEENAALDIQHSAIMWINDLERDQKYRSWPSSYQELLRPTFPGVIRQIRRNFFNLVLFIDPTQEDTVELVKLAELFHKHNIPLRIGFVFVVNTAEEFDGNQDAGVALLRAFNFIADDSDLSHAFSSIASIYNKVQDGEVLTMDHIASFMKKKYPMVDVKNIFGIDSEFDDQRKEGGTFYKKTGLGPLPQALFNGVPFNIDELDAEELETFLLQKMMDTAGFFQKAVFMGHLNEHTDVVDFLMDEPNVVARINPIILNTVRKYLDLTPKAVISDWNDFSTYSFLDTRDKSAVIADNMEYLTRKGEDIIYAVSIWIIGDFETLAGKRLLSNALQYLKTSSNMRIGIVNNHADELSEGNTPTARAIQAALLTQNGNTAKSFITNLVKEETAEALTLGAKILKFAVKGMDNDAFEKKYNTIGINFIRTQQLFCQDVLKLLPGQEAVVSNGRILGPFNEGEEFQPEDFSLLEKTTISTSAEKIKTQIKEIGVNSKSGSDLVMKTDALLSSTLKEESRRDVKFPKDRLSVVKIPPQEGVHYDVFAIVDPLTREAQKLAPLLRVLAQVINMKLDVFMNCRSKLSEMPLKSFYRFVLEPEVVFTGDNHLSTGPVAKFAEMPESLLLTLNMITPENWLVEPVRSSCDLDNIHLQEVEGMVSAEYELEYMLLEGHCFDASTGQPPRGLQFTLGTKKNYDMMDTIVMANLGYFQLKANPGAWLLRLRKGRSEDIYQIFEHEGTDSAADSDDVVVVLNSFKSKILKVQVQKKPGKVNEDLLGDGDLEGKGIWESLTSFAGGLQSEEIQKEDNTLNIFSVASGHLYERFLRIMMLSVLKHTKSPVKFWFLKNYLSPTFKEFIPEMAKHYGFQYELVQYKWPRWLHQQTEKQRIIWGYKILFLDVLFPLAIDKIIFVDADQIVKADLKELRDLDLEGAPYGYTPFCDSRKEMDGYRFWKSGYWASHLGGRKYHISALYVVDLKKFRKVAAGDRLRGQYQALSQDPNSLSNLDQDLPNNMIHQVTIKSLPQEWLWCETWCNDDSKKIAKTIDLCNNPKTKEPKLEAALRIVPEWAEYDHEIKHFLKQIEEQKKIATPKTKPPAPKRDEL

SEQ ID NO: 3886 - protein, 767 aa, Neolecta irregularis
MGPFIRDDTAQMIHAVQEEKISDDISDLLDLYLSSAPKVRNRWIFPEEEHRIVDLVKALQGNSTQSESRFILVDTSKVDDCSSLVEKFGLKKSDKAIVINGRVIGPFAPDEEFTGEDIELLLHQEFERITPIISATKGLSYLGSRADFLAKLASILNLAAAKQDNGIFESEDHIRRKPYENFDAEYTSFTSGGNDGWLQVVGVVDPLSEIAQRMSELLKVLSEMDGVGVQVFLNPKKHMKELPVGRYYRYVLSSEINFNDDGSIATPEALFDDLPQDPLFTLGLEVPHPWLVMQKESIHDLDNIRLANLPSVSAVYELKYLLVDGHAKDITNNSPPRGVQFVLGNDKNEHILDTIVMANLGYFQFKASPGIWKLTTLKGRSSEIFDIVEIDHFNNFQTIELTSFDGMTLFPKLSRKHGMEGEDVLAHESESSIRQGVIKSKQADINIFSVASGHLYERFIYIMILSVKKHTASSVKFWFIENFLSPSFKIFIPHLAAKYDFEYEYVTYKWPHWLRHQKEKQREIWGYKILFLDVLFPLSLDKVIFVDADQIVRIDLQELVDLDLHGAPYGYTPMGDSREEMDEYRFWKSGYWRDYLKGKPYHISALYVIDLKRFRQLAAGDLLRGHYQSLSSDPNSLANLDQDLPSKSLFSGCDLIYIDHLQHQLPIFSLDKSWLWCETWCSDEDLKTAKTIDLCNNPKTKEPKLDRARRQIPEWNDYDSQVAALAKQVKNVGNIAADVDAVQKPDDILASAGDTTQPKEARNRDEL

SEQ ID NO: 3887 - protein, 1564 aa, Trametes coccinea
MLGVLLPLLTWPLLCTFAAKPSVNVDLRTSWPAAPLLLESIEAVSIEEPDAFFPLVDAVTDPEVFPLAQDRSTAKHVHKHVFDTALSLGYLADPGAYVSAEMHVALHSPSPKLEAFYQYYDDHNAARVDNRATGTCGSWVDWYGTVVCNVETLARLVEIELIDSSDVVVNHTAARILKTLPFDHVLPDPSRLIDTPPRAAILYASLESPNFRDLHSYLYAAARSENPTISYIFRPIPPAIRDAKARSHLSGYGVALDLKKMDYLAVDDRLQRGGASAANADDDLASGTQEDETDVIVTRLQQYSIDDTVDVTEPLTEAELLEIGLQATQLIYDAEEPHERLATMKHLAQNFPRYAGALARRVIVNQSLLNEVAENQARAPGGASAIWLNGVTMEEKDLNPFALLRAIRRERGIMLSLLSLGLSPEQAIELLTHRTVAQAQAGGGMLDGLFDASDRPEGGDVIGWLNDFENDARYERWGGTLRILLRQMYPGQFPSVRLNMFNVVLAVDLSQASSIEFIGMTVNSLINRGLPFRWGVVPLVETEDGARMGRLFYYLMDNFGPEDTLNFILSLTQRNVPLDLLKPSVDWSTVRLSFNRLLAAQEELDDDIEKDLDVILEGTEGDLEKPRAYARRLGASLATAPQGHVFVNGKHFDLDDEFLRLLQTEYLEQLQHIQMKVYKGELTDDDAGSISTYFYDLPTTAKRRNTYIHPTKKAGSLRIFALPELIEKNGLNSTAGAFIYPVDSEQVLLTTYIVADLDSEDSRQLMKEALKSMPGSFSRLSFIHAPSTASAVRDLPETAPSHILGRLIAGDALSKITPEQLLNVLGLNEPLENGTQQPLTQGSVEELLVDLPGSGAAYEKYLNACRLIARQLELKPGEQAIIVNGRLVGPMPSGDFLADDFETLFAFEHHRRVQPAYEALSSVYEAIREASKEEVAELTSIVSSIISSIQQPDPSEVGLFNAPQRPRLRNYRRLSGTYTAFTLGDNTTALYHIGALVDPLSESAQKWTSLLEWLAEMPGVFIEVHINPARSTELPLKRFYRYNLVPRLSFDEQGNEVRASTRFTGLPTEPIYTLAMDAPQSWLIRPKEAVYDLDNIQLGLLSPQDRVQGLKAVFDLDYLVIEGHAREGETNSPPRGLQMQLVTSDSTPIADTLVMANLGYLQFRTKPGVYKLEIRPGRGRDIFRMESVGNEGWNSPPVDEAGDEVTVTSFEGVTLYPRLARNPGMERADVLLTGLEASEEPKSVLDNLVHKVSSLFGGKKEEKAVVAVDDGQAEIDIFTVASGHLYERFASIMILSVLRHTKSSVKFWFIDNFLSPSFLEFLPHFAAEYGFQYELVTYKWPSWLRAQTEKQRIIWAYKILFLDVLFPMDLKKVIFVDADQIVRADLKELVELDLHGAPYGYVPMGDDNPDTEGFRFWKTGYWKDFLRGMPYHISALYVVDLVRFRQMAAGDILRGHYQQLSADPNSLANLDQDLPNNLQREVPIYSLPEDWLWCETWCTKDRLDRAKTIDLCQNPLTKEPKLDRAKQIPEWEVYDTEISAFAKRLHERAEDPAPEKPRSAHDEL

SEQ ID NO: 3888 - protein, 1531 aa, Aphanomyces invadans
MLAARMWMGLAALAASSRMADGRQVHVNLTTSYLASPLYPILETSEFLSQDDPALFFKYLSAVNMRHNAIKDKHDVNYTKVALEAAADVLPEDSSVSRLLPFVLQTRAHSPSIELFHQLAIESAFKGCPNETVSAWAIIYRSAGCADAVMCDVEDFDSSVLDAAAPALDDSERTCAASGQHDFYLPVDHVYPSTASVAANAPHVVVYGELTSPSFQAFHSKLLPLAVAGSIKYIVRHAPTNNTLPVLVHGYGVTLHVKNMEYKTFDDSKTSKSSSNGTSVDIDDDQDDFVVSVMMKKHDEVAQALRNYLEDFDDASAVDEFASDDVDDAKKKAPWQLTQLGYLAMQYIMASADPLKRLQLLSQNFPKYASSLVLTSKPVAAETIEAMGLVRNQVISQRLHNRIVVNGLPVDFNEYGFNAFDFLKSLSGELRLADTLAKLDPSGTIRGAVGSLSSAPADVRITLRGPVDGFAPLYLNSIETDEETEDWPTDMGILRAPTWNLIYLRKVMYELILVVDPTTKEGIEALNEVNFLRNRQAPIQFGVLWTSPQLLALSAEERAAYTPSVRDEDLATVFHVAKMFHAAKKHSKAARDKYLREVVSVNDLKVKEVLQMYSQAVGERFSNDAWLEDAKAILTDGDNDPVWAMTDLVAAKKLPINSHVFNGVVRNHVHVQEDIMSHFGRDQSLYQELVRGDKITDDADMLNELVGSEESYAVYCPWFDPRYQAPRTVPEFSWDEPAWKQVGSFHAAGTASKPKRQNVLLLANLDTATGAQSAYQALKRVPDYPDLGLTIVHTGASSNTLGHRVSYMLSQLGHTDSTTYMAVVLEVLRLMSKKPEADVLTHARLFLQLHLDAAPNDKILTKLNEWLTSTPSFSHPFSFKVDPHNHVIYVNGRPLDLAASPLSAEHFDVLVVHEASTRSKAVSKAYVAQFKHDNLSVEDAADKSLAFNLVMNAIDEYLKVRRVPSVLPEVNPLYSYETPTSQPSGLDVVAYLDPLSETAQRASGILRMLASVLHAKITLVLLPSPSYEEFPLKRFYRFLWGGSESSSVDFLRLPRKPVLTLNIEPPELWNVQMIQSDVDVDNIQDDASATFYIKDVLVYGQCVDRTIVHYPSLPNGLQLTLERSAGTVHSHKDTVVMKNLGYFQLQAAPGVWELGLAKGRHSKLYELVIQEDRATTVPVIVYDFLSSTLQLVVKKQHGQESVRLLDEDEPAHKTTGEAVEEKSYWRSLVQWGSDPPSSKRDARSGDTIHVFSLATGHLYERMLKLMMLSVMKRTKNPVTFWLLENFLSPDFKNSVGALQAEFGMDIRFITYKWPNWLRRQTEKQRIIWGYKILFLDVLFPLGVEKIIYVDADQVVRADLNELWTMDLQGRPYGYTPFCDSRNVGFQFWRTGYWKDHLRGKPYHISALYVVDLVKFKRMAAGDSLRAIYDQLSADPHSLSNLDQDLPNYAQHQIPIFSLPQEWLWCESWCSDESKRLAKTIDLCNNPKHKEPKLDMAKRVISGDLFPESWLELDAEVKAAEAAYAEGPHLDV

SEQ ID NO: 3889 - protein, 1470 aa, Yarrowia lipolytica
MKLLKYAAAALFASSVAANVTVELKAQWQSDFLLELVETLSTEHTYFDFINHIAEQVEDGANYTDKEWYDNLTAFAASKSEISDFQKSLTDAALAFRRESPLIETFYQLGDSQESECDIFFTYNGKKYCDSNDLFTLKTTKMPKNPSVYFFDHVARSVQANKHLKNIPVTVLYADLRSPEFPLFHKILYQEAQDGKMVYILRYRRSDRSERVTMTGYGAELSLKKTDYLVLDDDANTEKLTDNKNPVYTKRELQNMGLNAAQFVLNHRKDPEAALKALKEVSFDFPLLSSSLNNTKPVKGFQKALQENTAAGDFMPGANQMFVNGALLSTSASNLQSLFDLVALEHSRLEVLAKTLKGAISAEQLASILNDYPLQHALESQPQRIDYRDADALLWLNNLATDIQYQEWPRSVASLLQNQINLAHNAQTVVMPFNMDDFADVKVDKETGELINMHPINRGKLTVLLTMLQRSMPIQFGVVPYGSTLKGKKLSQYLHYLARNVDATASLRFLFALGAGTPVEEIFTQIPAEITQESVDEALKEESYEPYVTASREWMKKLGMNEAQTQEPAFVMNGIVMPFSEKWQNLVGARFQQDLPEMLKLVQKQIIKVSKEAPVGEDDEDEDDENAGNPVDKYFANHEIKDLLVEGSPTRRNLILSPASFTNLQYLESDLNLKDVSTATIAGTTASIFSNSILAGNFASTQFVSQLLALIEAQQEEKDRFAFRTQFVHIGQTDSAKGQVINGVVQKLTELAGEEQVSLLKDALAYLEGDNASFSAKKVPFDKTITASEEVKYLKQFKTTESSTLLIIDGLVNDISSKAMLLDKSEVIALYEREAVRRLELTSVALSDLKLLTKSVENNLDLAKVHIPLAKIFYGDATEQESTLYDVRAFHHIRWNKDVSSFVLGDESTSLVKIVAAVDVLSDGGQRLVSQIEAISKVTGVSVRVFPSPKAPDARQEPTLPLKRFYRAHNSVVPEFDAEGAHKVPNLNFEGLPAQNLLTFGLDAPSSWIAMPADNTHDLDNILLEEDSEDFVDASYSLQNILIEGSIIDITKNSYAPGTDLLLKSTLTGESSDTLVMSNLGYFQLQAGPGLWELNLGPSASDVYETEHEVIIPVTDVLGPHISLSMERKKGKENVVVGASQDKAKLWSKLKKSTGVSTKKQADINIFTVASGHLYERFLSIMTASVMAHTDHTVKFWLIENFLSASFKAFLPHLAAHYGFEYELVTYQWPHWLRGQTEKQRQIWGYKILFLDVLFPQDLERVIFIDSDQIVRTDLYELVEMDLEGAPYGFTPMCDSRKEMDGFRFWKQGYWDTFLGDDLVYHISALFVVDLKVFRAQQIGDRLRVHYHQLSADPASLSNLDQDLPNNLQRQVPIFSLPQDWLWCETWCSDESLKTAKTIDMCNNPLTKEPKLDRARRQVPEWTKYDDEIRKLRKEAEGIEGKKKEEEERAGPVEVEVEIDEPEADLHDEL

SEQ ID NO: 3890 - protein, 1437 aa, Pelodiscus sinensis
MARCQALTVVVKMSGPASIFLNFVPPVSWATLDPDKWEYEETALKRKITVEPQNYEQQSYKLTSQSQILFEAGSTQPRPYLFKEEHIFPTLNENVPVVILYAEIGTKDFVKFHTVLSEKVQKKEIVYILRHYVQKPSSRKMYLSGYGVELAIKSTEYKAVDDIQIKATNDTTEKEDDEASEIQGFLFGKLKQMYPDLKDNLKEFRKHLIESANNLEPLKVWELQDLSFQAASQIFSTPVYNVLKVIKGISQNFPIKARSLTRIPVNQQMRNEIEKNQKHFHEKLRIQPGEARLFLNGLPIDLDIHDPFSILETLKLEGKVLHGLHELGIKEEAFNKFIRLQIHPVDDICALDIRHSSIIWVNNIEEDNIYNKWPTSFKELLKQTFPGVIQQIRRNLYNLILFIDPVQTHAVDFVKLAELFFHHNIPLRVGFVFILNTNEEVDGNKDAGVALFRAFNYIREESDTTQAFISMINMYHKMKDGEVFTVNHVRNVLRNEFPHADIQSILGVDSDYDDKRKAGATFYKKTGLGSLPQALFNGVPFIGKEMTAAELETVILQRITDATGFFQRAVFMGLLSDHMDAVDFLLDQHNVVSRINPTVLDTKRTYINFISTSVPVGVEDFSTFSFLDAQDKSAVISQNMKYLSKKGEDVIYAVTIWIVADFDKPGGRHLLSKALKHLKTSNHMRLGIVNNPMSKIMEDNTAIARAILTAFLTQKNSNLKSFLSKISKEETAKALATGTKIKKLLVAGMDDSTFEKKYNTIGLDIIQTHQLFCKEVLKLLPGQMAVVSNGRVLGPLDENEFHTDDFHLLEKITFSTSAEKIKGIVKEMGISSQRGSDLIMKVDALLSSLPKRGVRQKVEFLKEQHSVVKIDPKENEPFYDVIAIVDPLTREAQKMAHLLIVLGDIVNMKLRLFMNCRSKLSEVPLKSFYRFVLEPELSSGADKLFPSGPVAKFLEMPETLLLTLNMIIPESWLVEAVNSSYDLDNIHLQDVEGVVTGEYELEYLLLEGHCFDVATGQPPRGLQFTLGMKNNPVMFDTIVMANLGYFQLKANPGAWTLRLRKGRSEDIYHIFAHEGADSPVHMEDVIVVLNNFRSKILKVQVQKKPDKVDEDLLSIGVIEEKGAWESITSFSGDIQTEEKEKKNNVLNIFSVASGHLYERFLRIMMISVLRHTKTRVKFWFLKNYLSPMFKEIIPHMAKEYQFQYELVQYKWPRWLHQQTEKQRIIWGYKILFLDVLFPLAVNKIIFVDADQIVRSDLKELRDIDLNGAPYGYAPFCDSRREMDGYRFWKSGYWASHLGRKKYHISALYVVDLKTFRKIAAGDRLRGQYQALSQDPNSLSNLDQDLPNNMIHQLAIKSLPQEWLWCETWCDDESKKKAKTIDLCNNPKTKEPKLQAALRIVPEWVQYDSEIRKLIKQIEKEKKNLTHTSRKVLKHDEL

SEQ ID NO: 3891 - protein, 1627 aa, Jaminaea rosea
MTSWRPCSLFLLIAATQSLISIVCATADRSPSSPPVNVRLQSPWDSSPLLLEALEAAYDEDSDAFWPLLSHVSQPSQSPESTAPPAQVYDVVKKALDDVGVLSERGSRDNWEMALALHSQSPKVAAFWQVARTTGAEERWAKHVQENGLAAGECESWVDWYGRVVCSETELQVVLSEEARQQDKVATYPFDHVHPSQPSASAIPTAVLYGRPLSPNFHSLHTTLFRRASAYSEQPLRYVLRWRPDSTSNATSGFLAGYGAALDLKKVDYLVIDDRKLTHAADAPSLSASEGGVDDSIYSQLRDRQWLDDQLLGNGKPTNMSQPLEEAEISRLGLQAVQTIIDSQDPLRAFAQLTQDFPLHAPSLARGPVTPSIDLDNELHALQMTKIRPGMGDVWLNGKPLSKNEQVPLGLLKVLRKERALVDSILAASSTLGLNASQAIDLLSQPSVGRPQTPEAEQVVFLDASDRIERSATADETNFASPITWWNDIEQDEAFADLRQMSSLRSLLRPMHPSQFPQAAKNLFNVVLTLDLADRKACSFLAEHVAPLLERITVRWGLVPAGLEKGEEADSTVVARLYWHLWENHGLEGGVTFLHALAASGPPSRRVDARTAQKTFTKLLARLDPSGDHSSLAKEVTSVPSSREEVTKSYVRRLRLTIAEEPRGHVLVNGQHFPLVEPRSFFQLLHQVAAMQLQQIARPIYFNEVTDDDDVSTWFYDLPLAFASRSELVFPTVDAATGQAKGPKVRAVDLAKALAALPDASPAKTSFLYPTGDSQVNATMWVIADFDTEGGVHLLREAVSTMVGEKAPAFRLGFIHTVDAGQSKLATPGVSLSGFIAHLAQSGALDAITPSELLEVLKEPSTLNDAKLAGWNVPANTDGSQLWDGSHNFFSTLGLDTTAFPALLINGRLLSHLSPLGISSSDLSSLVKNELARRIDPVVAALHTLLPGDKIASLNRSALADSISIVSSAIAVTYYRDETQEGIFSPPSVQRTNIFDRLGVEFSRFEVGDPAKAKLRFQAIVDPLTETAQRWSSLFQLVATMPDVHLQVIMNPVRKLQEMPLKRFYRYSAPSRLRFDAKTGEEVPATLSFQDMPQDAVLTMGLDAPPAWLTMASEAVYDLDNIRLRDVPEDGRRKGVLAVYELKHLLIEGHAREAGKESKNAIPRGLQLELQTPDGSETLDTIVMANLAYFQFRARPGLYRLRIRPGGKSEELYEMRSVGNLGWDSPGVEETGDDITLDSLDGLTIYPRVVKREGKEKEELLVDLEAEGEDDEDEDPYGEKGAAAPLSNAASGLSKMLHRAADSVKSVVTARPPAKEHDRIHIFTVASGHLYERMTYIMILSVLRHTQSLPVKFWFIENFLSPSFKSFIPHLAQAYNFEYELVTYAWPHWLRAQTEKQRTIWGYKILFLDVLFPLDVEKVIFVDSDQVVRADMKELLDVDLKGAPYGFPPMGDDSEDMDGYRFWKRGFWKDFLRGRPYHISALYVVDLNRFRQVAAGDKLRGQYQALSADAGSLANLDQDLPQTLMFNVPLHTLDQRWLWCETWCSHDWLHEAKTIDLCSNPKTHEAKLDRARRQIPEWTELDEEVQALARRVGVAEGAREAADAGPGVHRQHGEGDGDQEPRQHDEL

SEQ ID NO: 3892 - protein, 1488 aa, Penicillium steckii
MMVSSRFHIPWHWYAVIGALLPGLAVNASPSVNVALQASFDSSPYLVELLESAAEENATSYFPLLDRIAGGAFDDAITEKELYDRFLQVVHDDGHLGTAESLSSFKLSLAIRSPAPRIQAHYQFYNTSVQQSLMAAQDAACPVWVHYDDKQYCSSAMERAQQDVEGEMDPKALPFDRILGDLSLPPAVLYADVSAPMFKEFHEILSDMAKSGQISYRLRYRPPQHWTSRPLFVSGYGVELALKRTDYIVIDDRDAEKRDETAEEATDILKEDAPTDLRPLSSSEVSRLGLNAAAYVMDSKDPLETLLKLSQNFPKHSSTVAAHNASKELIQEIRVNRARMIPAGYNVMWINGVQIDSRQIDAFSLLDILRRERKLIQKFRDLGISGRDAVRLLSHPALAEARADDEAQRYDYRDEIEGGDVIIWLNDLEKDSRYEDWPSDLEAFVSSPYPGQLPPVSRDLHNVVVPLDLSNPDDMLLVFRQIYTFVKRMIPVRFGLVPMASSPESISQLKVAHYLHETFGLSSLIKYLEESAATSKGGSPDKTAFASATQDQEPQGEKEALSLDEILSSERYEAVAARVTKYQRRLSLSNDAPSFLVNGIPTSREGNWMQEMSMLIGRDLKLVQQGIMEGVFPVDAWLPEFFLVASLGRRNTFLMPEDPKSVGIVDLADILGSPTDGLDQFPSIAATDGSRNGIHLVVIGDFETEQGQQLLSNALSVQKQNKNIETLLVHNGVSDAEPSSPLLDRIHQSIIKGEDIDQIINIIEDSSEVKDSESTTTTSLAAHRRLAEKLGFEPGVEGLIVNGRAVGPIDKEEGLAADEINQLINYERTKRVDAVSKAAMNLGLNMRIAKPLDLAKLSALVSLSTISDVPEGIFESTPDFRLDVSEKWRIDHSVITVSNSDDPAINVVAALDPASENAQRWLPILKVLSELAGVKLKVFLNPKEEMKEIPVKRFYRYVLDSEPSFTSEGSLSRPDASFSGVPVEALLTLGMDVPTSWLVAPKESIHDLDNIKLSSLKADSNVDAIYALEHILIEGHSRDLTTKTPPRGVQLVLGTEDNPHFADTIIMANLGYFQFKAQPGLWQINLKPGRSEKLFNLDSVGGLGYRPQLGDENNEVTLLSFQGRTLFPRLSRKPGFEDDDVLETGPRSGSTMDFVSKGLNFASGVLSSVGVGSKNSEHADINIFSVASGHLYERMLNIMMVSVMKNTKHTVKFWFIEQFLSPSFRTFLPHLAAEYGFSYEMVTYKWPHWLRSQREKQREIWGYKMLFLDVLFPLSLDKVIFVDADQIVRTDMYDLVNHDLEGAPYGFTPMGDSRTEMEGFRFWKQGYWSSFLRGRPYHISALYVVDLKRFRALAAGDRLRGQYQMLSADPNSLSNLDQDLPNNMQHHIPIHSLPQEWLWCETWCSDEDLAKARTIDLCNNPQTKEPKLARARRQVPEWTVYDDEIAALAKRVDAEQVKFVQTGDDVDRKEAVGDDVQGEAGEDRKDEL

SEQ ID NO: 3893 - protein, 1551 aa, Guillardia theta
MVQSRSETMPKNALKIPIVLCLILLVQSVCSSPSKSKFVDVSVVAPWAPTPLIIEASEYFADKADEGKFWEFVESLPNDIYEKTDKQHYDTSIELASKIVSNVQLSLIKFALSIRNFSPKLQAYKQLWQAALNFGCSIKDKDGAVVLIGGKCVSDPSLLRDAIESCHPAKAGVSAPSIQEFDHIYPSPSSPSHCSTAFLYATIGTQAFVNFHKYLSQAAAAGDVKYVFRHSWPGAREEEEKAHQDMLLQGYGVELAIKNMEYKAVDDRHKEGEAGSSLEDDLEDEVGGFDFKTLLQRKPNLEVELLSFRDRLLSEAKSDEGTDIKVWALKDLGIQASQRILQADEPLRLIRDLSHNLPAVVSSISRMRVNASVRAELENNRNFIQPGANMVHVNGRQLQKDDMNPFSLYRFIRHEINVIEKFMQLGMDSRSTKKILYAPAEQMEGGGSTFKIDVKNDNFVMWMNDLEKDDMYRQWPRSLDTLLQRGWPGQLRFIARNIWTAIFLVDPSDMQSLTFLSWAFEQMEQQLPVRFGVAFKYSKSLDEQWEASPRNAESEDEAEELGDAVILHRLFRALHLGHGGRAAWSFLAIYAEGMQTAGKASKSEVRKDSFKRAAKMFRAQYRDADGKLMRAKYKPSLLNSTHDAFLKKSTEFVERSGLSLTEPVCVLNGNVLAGQALDPNQFHYMLQMQMMVLQRMAYFGQLDERRDLHNQIINHNGKAHRRFHAQIVSGPATSRQMLKAEVSTKTMEDLDRIPFFLCGKDDGSMRGVTHIVALDLSSKIGRDLLVASAKRMSQTSSDRCKRVRLAYLDNSEGSPEAEGAFSVLVEAIRSMKNDKDKGNKFLELCRTIVKLLDESAWSTAQAHEEVKTLMEAAEKSKEGGLSKADMKRMISDWFQLTAGESAVSTSGRVFKVTADVAFRMGDFVLAEDTEWNDRSKHVSSVLDVASFSISSDKVTSEYISSIALLGSNMIGIERNDNIQRTDQEANRQWTSRMTGFKVGPEDSILQVLAFIDPLCAEAQRLSPMLMALADAFGAHIHVILNPVAEVGSLPIKGYYRYVLKPQLEFDEEGKLVSNTRATFSNLPMSKLLSMIIHPPDAWFVSASQAVHDIDNILLEKLSAHETVLSAVYRLDHILVTGHCIDDRREPPAGLQLNLNLLDEHAAKGKSKLVSDTLVMSNLGYYQLKARPGIFNLTMAEGKSSEIYEIEDKGNFGSSRVISVLSWEPDAFPTSVRKRKGQESKSLQDAKGGRDGDGSVWSSLSNWFSGDSATAEQAVTDKSGEDTIHVFSLASGHLYERFLKIMMLSVVRNTKSHVKFWLLQNFLSPQFKAFIPRMAKNFGFDYELVTYKWPSWLHEQTEKQRIIWGYKILMLDVLFPLSVPKIIYIDSDQVVRSDLKQLWDMNLRGRPYAYTPFCDDKREIEGYRFWKQGFWQTHLGDMKYHISALYVVDLNRFRAIGAGDELRVVYSQLSRDPNSLANLDQDLPNYAQHSVPIFSLPQEWLWCETWCSNSTKVKAKTIDLCNNPMTKEPKLDQARRIIGEWEELDKTISSLE

SEQ ID NO: 3894 - protein, 1584 aa, Rhizoctonia solani
MRSLSALGTLGAASLVAAQSTFSPPVKVSLTTSWAAPPFLIEILETAAAEYPGRYFEILDALTDRSSDGLLGPITEPVHKPKYVYHTALAHLIAHGFLTEPRALSAFEKNMALHSATPKIQAFYQLFGDPSKAPECQSWIEWSGKQACTSEEADTLLAEASTGGRTHTFPFDHVQQSTSGECASPAIFYASLSSPNFYDLYLYLRSKSETPGFCYILRYTPPKDTAIAGEHSRNTLSGYGVALDLKKMDYLALDDRGLRGKDGDSDSTAEESTVWEDYVSSLLSEHPHEDLDLTTPLTEEEISTLPLRSTHLVMSSEDPLKALLHLSQNFPKHAVSVARRWDPGRGEDLKAKYESVEAEVQANMHMVSGAGNMIWLNGVALPEADVNPFSLLRLLRREHQTVNSLIKANLTSEQAIRVLTNPEIGKASAASGPTDGVFDASDREEGGGAIVWLNDIEKDKRYSRWPSSLTVLLRPMYPGQFPTLRRNCFNVIAALDLSRTSSISFIAQIANNLISRSLPFRFGYVPLIETAESRQVARLMKWMMDEYGFEKTAQYFSVALNPSDTVDLRLLETAYAQFTTQMPPESGNVPEFASFSADPLQIQMVGHEFVPDEGLQSAAAYAKRLRLGAQDGTGKGHVFINGKHFAYDDTFLRHLQTEMGTQVNFFQEQLYTGALVDAPETDVSVFMYDLPTTAKRRNKFIYPSGNLRIYALENLSNSAGAAKLLDDSFVYPTGEHVTPVTILVVGDMDNEETLTLAIEGLRGMSDDAKYRLGLIHTPSVDPSDLPSTQQPLVSPMLARLAATGNYADFPPSELAQILEEAKQLVGSAAVLNVQDNPVLINLNNRLTGITNEGVDFEELKLTNAAGNALAKNIGLKSGERALIINGRVIGPLAGSDFVAEDFGALVNYETAKRINPVVSALTAVRQDLPELDRRAYANLVARVSSIVSSVSVPDPSEEGLFQSKSLARQRPYNELIGKDCTFEIGDNSTALFHIGLLLDPLSESAQKWASVVEWLATVPQTHIHVRLNPSAVLTEMPLKRFYRYNLQTRLTFDQDGFETRNPVEFHGLPVEPIYTLAMDVNPAWLVRPYISEADLDNIHLASLSDPKAGVEAIFHLDHLVIEGHAREENNAPPRGVQLQLTSLDGNPTADTQVVANLGYFQFRTGPGAFRLEIRPGRGRDVYAIESAGNEGWNSGHVNVTGTEITLTSFEGHTIYPRLSRQPGMESADVLAEPEKDESIWSRVSSLWGSKPTETVSESKQADINIFTVASGLLYERFVSIMILSVMRNTKSSVKLWLIENFLSPSFLEFIPHLAEKYGFQYELVTYKWPSWLRAQKEKQRVIWAYKILFLDVLFPMDLKKVIFVDADQIVRTDLKELVDLDLQGAPYGYTPMGDDNEAMEGFRFWKQGYWKDALRGKPYHISALYVVDLVQFRKMAAGDRLRGQYQALSADPNSLANLDQDLPNNMQDQVPIFSLDKDWLWCETWCDSARFDRAKTIDLCQNPLTKEPKLARARQIPEWTLYDNEIAEFARSLADSGKIRSRAISGSVDALASVGKKVTTSNTEESPAPTPDEQAEPHQAHEEL

SEQ ID NO: 3895 - protein, 1583 aa, Galdieria sulphuraria
MSKSLFVLYFFSYCILYSLARSTLTTSLNSGWSITPIELQFSEWIAQRGSSCFWQWVQDLFQREQHLDSDRESFEWCEEWIARRWDIASGQVAVWSVLAVEQLGSVVLQDQWASHVWYYRQPKATTTWVQEKPSVFAEWNDQLYIDLDTLIADLRSVNHSTKLKADAQPDIDIGHCYGSSRKDIPLVILYGHLGKMEMKPWHDFLFSMANKGKVCYMIRHSYLSSSHRSMYLQGYGVEVFMKNTEYWVQDPLAYPCAKVEQANHTFDISTISDQRCLLQNDDCQLGGIDWPALVDHYSLSQEDKLTLQNALDNWEQSRASFKEWKPWQVGDIGLSATHLIVHSQDPLSTFERIANNIPLYAPLLAGPWHLSDSQVLSYRQILQSLEDWEEQVTLNGRSLSLPWGLLPPTLTNCMDAITLARHVALKESITNQSILSHNMIDNHLWSASLSTPSIRLSLVHPNTPVVFIQNENDILSLLKDTKMSASSSSVVFYEYAAYLRSLDKLSSSQLVDVIFLWDPLDGNQLVVIEWMKQVLEQGWPIRMGIGLIPSSAADERDDDDDDDHRYPGSVDWKSYMEEDSTSEQQHIWYHLASHYFPSKRKMSLHDEETMTEIVLIALEYLTNQVPCPIAGYYFLAKLKQKMTVPMDIFTLLSDGGRMASYEKLQWSHLQEAFLFAYHRRFSCSLHNKEQQEDDTSTAEEIWKGWMNKAMHSSIVKRHRQWANAMGFQRLPMVIINGIPLGDIASQLIVTLEQEMKEILKQASSSRIQKWIPRQNTRLQATTPYNPSILKEILQHNEYAQFKYFKTNAAVQNSVGLATIWIAVDLESLQGLKLMALALEWLTCPLSIPGRIAFLSSTHTHHSSHISCSDQQDQIQQMKQLVITRMKKSFQGQQMLTTDDSLEFLSYVPGISDQWIQKDQVFINGFGYSSHLFTFPTDFDLACSMMDIGLSMEDADAQLLWSFTSRWLDESCSLSFSRPGSSLFSSSSSTALRMNEWKQLLGQSYDLLSFHSISSTTNETQKYTSVFHVEAILDPLSPNAAKAATMLSILRTYFDVSISVLLLPSSYTSIETIRKASFYRTVLIPRPRFEKNTGALISKPSGVFTTLFKNRTLTVSMDTPPKWLIGASHAEEDLDNLVLQNDTQVYAEYQLEAILVEGTCIDVSNLSFVPPQGLPLSLVPRTSDWMQTQDTLVMANLGYFQFQTHFGVWNLQVGQRQGISYQLKVEESKIADTTASIASSLIFGSSIPNIISQPMSSNVFLLVKQLQGKTLTLYVRPSSFSSPDKVRMQLPAIIPPTWLSKLLDKIQLFSWWSSEQQHISSNDRMVHVFSVASGYLYERLIRIMILSVVKHSSVPVKFWLLKNYLSPSFKKILPHFAAKCGFDYQLVTYRWPAWLTAQTEKQRIMWAYKILFLDVLFPLNLSKVIFVDSDQVVRGDLYELFQLDLHGAPYGYVPFCDSRKEVEGYRFWKQGFWASLLKDQRYRISALYVVDLKQFRKMAAGDNLRAIYQRLAQDPASLSNLDQDLPNFASVPQPGLPHVPIHDLPPEWLWCETWCDDESKKRAKTIDLYESYLNGMRWIKKQQK

SEQ ID NO: 3896 - protein, 1599 aa, Gossypium arboreum
MDTCFRSRFCILILLTCLLSSGFTFVGAQNRRPKNVQVAIRAKWSGTPLLLEAGELLSKESKNLFWEFIDDWLLVGKTDNDSHSAKDCLVKILKHGSSLLSEQLASLFEFSLTLRSASPRLVLYRQLAEESISSFPLSDDSYSHNASGVDDSEAVGTKKLDPLLVGVNPKSPRGKCCWVDVGEELFFDVAELQSWLLGPNEVNGDSFQQPELYDFDHIHFDSNIASPVAILYGALGTECFREFHVTLVQAAKEGKVKYVVRPVLPSGCEGEVGLCGAVGARDSLNLGGYGVELALKNMEYKAMDDSTVKKGVTLEDPRTEDLSQEVRGFIFSKILERKPDLTSEIMAFRDYLLSSTISDTLDVWELKDLGHQTAQRIVQASDPLQSMQELNQNFPSVVSSLSRMKLNDSVKDEIIANQRMIPPGKSLMALNGALINIEDIDLYLLIDLVHQELSLADQFSKLKLPRSTIRKLLSTMTPPESDTFRVDFRSDHVHYLNNLEEDAMYRRWRSNINDILMPVFPGQLRYIRKNLFHAVYVLDPATSIDMITSFYENSFPMRFGVILYSTQFIKKIEQSGGELHSSEHDGELEDDKSSLIIRLFIYIKENHGIQSAFQFLSNINRLRTESADSTDEALEMHHIEGAFVEALLPKAKSPPQEILLKLEKEQSFKELSQESSLFVFKLGVSKLQCCLLMNGLVFDSSEDALINAMNDELPRIQEQVYYGQINSHTNVLDKFLSENGVSRYNPQIIAGGKVKPRFVSLASPVLGGESVLNEINYLHSPGTVDDVKPVTHLLAVDVTSRKGIKLLREAIRYLIQGSKNARVGVLFTTGQDANLSNILLVKTFEITAASYSHKKKVLEFLDQVCSFYEHNYILRSPAAAENTQAFINKVYELAEANELPSKTYKSSLSEAYNLKLIEHLNKVAQYLYRQFGIASGVNAVITNGRITSLDAGVFLGDDLHLLESVEFNHRIKHIVEIVEEVSWHGIDPDMLTSKYVSDIIMLISSSMATRDRSAESARFEILNAQYSAVILNNENSSIHIDAVVDPLSPSGQKLSSLLRVLAKYVHPSMRIVLNPMEDFSSTDYTVNGPKAFFANMPLSKTLTMNLDVPEPWLVEPVIAVHDLDNILLENLGDIRTLQAVFELEALVLTGHCAEKDRDPPRGLQLILGTKNTPHLVDTIVMANLGYWQMKVSPGVWYLQLAPGRSSELYLFRDGGDDGNQEKSLSKRITINDLRGKVVHLEVVKKKGKEQETLLISSDDDKHSKEKGHNGWNSNLLKWASGFIGGSEKSKKSSDSSVDHGKGGRHGKTINIFSIASGHLYERFLKIMILSVLKNTNRPVKFWFIKNYLSPQFKDVIPHMAHEYGFDYELVTYKWPTWLHKQTEKQRIIWAYKILFLDVIFPISLEKVIFVDADQVVRADMGELYDMDIKGRPLAYTPFCDNNKDMDGYRFWRQGFWREHLRGRPYHISALYVVDLVKFRETAAGDNLRDLPNYAQHTVPIFSLPQEWLWCESWCGNATKSRAKTIDLCNNPMTKEPKLQGARRIVSEWTDLDFEARKFTAKILGDELENPDPLPSPLSSSPETSSNDQSTDDLESKAEL

SEQ ID NO: 3897 - protein, 786 aa, Pelecanus crispus
DEDALYAVTIWIIADFDKPAGRRLLSNALKHLKTSSHTRVGILNNPSSKIKEDNTAIARGILAAFLTQNNSNFKSFLSKLTKEETAKSIAAGTKIAKFLIPGMDDNTFEKKYNTLGLDIIKTHQMFCQEVLKLLPGQMAVMSNGRVLGPLDENEFYAEDFSLLEKITYSTSAEKIKAIVKEMGNSSKSGSDLIMKIDALLSSLPKTEMRQGAELLKEQHSVVKVNPQQNEPFYDVIAIVDPLTREAQKMAHLLIVLKDIINVKLRLFLNCRSKLSEVPLKSFYRFVLEPELTYGINKHLPSEPMAKFLELPESPLLTLNMITPESWLVEAVNSSCDLDNIHLQDIKGMVIAEYELEYILLEGHCFDVTTGQPPRGLQFTLGTKANPVMVDTIVMANLGYFQLKANPGAWTLRLRKGRSEEIYQVFSHEGTDSAADLADVTVVLNNFRSKIIKVQVQKKPDKMNEDLLTDGTGKKGNRESVTRFSEEIPTEEKEKKSDILNIFSVASGHLYERFLRIMMLSVLRHTKTPVKFWFLKNYLSPTFKDVIPHMAKKYGFKYELVQYKWPRWLYQQTEKQRIIWGYKILFLDVLFPLAVDKIIFVDADQIVRSDLKELQDLDLNGAPYGYTPFCDSRKEMDGYRFWKSGYWASHLGKRKYHISALYVVDLKKFRRIAAGDRLRGQYQALSQDPNSLSNLDQDLPNNMIHQVAIKSLPQEWLWCETWCDDESKKKAKTIDLCNNPQTKEPKLKAAARIVPEWVDYDSEIRTLIQQIEKETKNLTSFFQKGSL

SEQ ID NO: 3898 - protein, 1711 aa, Microbotryum saponariae
MAFGPRSSTVYRQRITATTRLMMLVLVLGWVSVMQICLAGSPSSTSSSGGARSVQARIKTPWVGSSLVVQYLESLATEDRHLLHPFLTHLIQSNASTLLTTSPTTSSSSSSSSSSATAHDPSRAWAVLSHQLQHFLDQKHPSHSNALVESLGLAMGLKEASVRLQAMEVVAKRAWASTTTPPVLVEAPPSECDNWVQVGGYRLCSVAEFWKVLGEEQRHAKGGLSLPNTGNSSNRPKLYPFDHLSPRPPTSTSTSAPPPLVIFYASPSSPAFIEWYELLTRLAIEEPPRIEYALRWKSAAGSADEPLVLSGYGAGLDIKKSDYLAIDDRLTSGEAAHDAATDEPIDSSEAIKMEPIKKKDIPLLGVRSTSYILSDPSPLSAFTRLTSSFPLLASKLSSLVPTVPIDLLQEIQTNSLLPTGLHPSFKLNGLLIPEAQVDPFVLVRLMRKERKFLTQLQHLLANANEDDLPLFEISPFQARGLIMNPSISKAMKRGAKIITEPSGRVSSHVLGQLFDASDRDEGRGVVFWWNDLEKDKKYQSWGKDLKKLLQPTYPGQMNNVALNLNQAVFILDLTQPATLQLLTRQVQNFVSRGIPIKFGLVPKLGQSGGQDGAESAEETLAKMFWYLTEAIGRGGTMRLLGQLLDTLHTDRVTTPHLRKTYETFMLENTHLSGGPLASFAQVLELPIGVERVNKARAYAKRLGVAGSDEASSVGAFLINGAFFEFDEEWTQHLQQTLSAHVQYEQQEVYFGKLTSETDVENFFYDLPTTHKRRNRFVFTSEANPLKVVNLVEVLEGVERGFVEGTWIEAAPSLEDEQGSELGEGLELDQVVSLHVVADLDSSDGRQLVHTALEYVQAHPEARVSLLHNPALDDEQEFPSRWAVSNLIYLLHADDELVELLPSELSRFVRLGINQTNIDDVSQLILSLWDDDNPIKKHVKLGANHKTSILAREWWTSAMVMAKRFGFERGQSGVVINGRVVGPLRKDDLTIADLEALVSYEREERIDAVVEALRSVDLDLQSLDRSSWAHMVALATSVIAQAYEVDPSGGLAGEESIERSRDYLEFQAEHSAIIGPNEEEAMFEIAVVVDPATELAQRWAPIIETLSKLESVHLRVHLIPTMKNHQDLPIKRFYAFTFASSPQFDPSTGREQPPQVQFTDLPEDVLFTFAMDTPKAWLAFPKKSVHDLDNIRLKDLPLWARKAGVDAEFELENLVVEGHARETPGNTPPRGLQLELVKEGTGEEDQHRVDTIVMANLGYFQFKASPGPWRLAIREGKSSQVYSIETTGAEGWNSRSVEEAGDEILVTTFEGVTLFPRFKRNKGHEMTQLLDDTDKGVATKGPQESVVDRVKNLFPFLRKSELAIKKKAEINVFTVASGLLYERMAFLMVVSVMRHTQSTVKFWFIQNFLSPSFRAFIPHLAKEYGFEYELVTYKWPHWLRAQTEKQRTIWGYKILFLDVLFPLELERVIFVDSDQIVRTDLKQLVDLDLQGAPYAYTPMGDDRAEMDRFRFWKSGYWRDHLRGKPYHISALYVIDLDRFRAMAAGDRLRQQYQGLSADPNSLANLDQDLPNNMQDQIPIYTLDQSWLWCETWCSDASLAQAKTIDLCNNPLTHEPKLRRAKRLIPEWTVYDDEVAALAKRVAAEQTQTGGMEKDEGVGVFGGKADELGQAKGQKEDLDAFVKEKSDEGEKVELRPVGEHVQDTVVGPGKDEL

SEQ ID NO: 3899 - protein, 870 aa, Wuchereria bancrofti
MPRINKLILDSPLSPDALYLDLTSVKKCTSVSPTQYYKLPPKEQNQCMLKRMRYITRTGRLYKNKSSKTWSYHFRRNENLFSTVWVVTDLETADGRLLAYNAIRHLKRSYTMRVAIINNPENIEKATTSGSITMLVNIASRVLIPKQMKSFITKLVKEEIVSELLNKQITLDDLSVNDMNMTLFYKEAKQINSDEIIVDAKYSKSILGLKPGQLALVVNGLLIGPLGDSEVLDVADMELIDKLTLLRGGKVVKDYMEKWGIQTRYGESSDMVARSMALIGSVGVTKKRRFIPLLREKESVLTISGNNEEGLILALCIVDPLSTQAQRLGHLLTVIQKVVNVEVKLVMNPRAKLSELPLKRFYRLVLQPTVTFDNSGRINDVAYEARFTALPNRQLLNLAVVPPDAWMVQSVYAVYDLDNIRLENVPGNVLAKFELEHILLEGHCFDDMTGSPPRGLQFTLGTLVNPSRYDTIVMANLGYFQLKADPGAWILNLRDGKSKDIYNIVSHVNTESEDEDGINVLIDSFSGRTIRVRVAKKKGKEKENLLSEGKSEGESEDHHSVWSSISTTISGGEKHDAINIFSLASGHLYERFLRIMILSVMKHTKHPVNFWLLKNYLSPNFKETLPQMAKHYGFKYEFIEYRWPRWLHQQTEKQRVMWGYKILFLDVLFPLGVRKIIFVDADQIVRTDLMELMELDLGGAPYGFTPFCDSRTSMDGFRFWKKGYWANHLAGRKYHISALYVIDLVKFRQVAAGDRLRGQYQGLSADPNSLSNLDQDLPNNMIHQVRIKSLPQEWLWCETWCDDASKEKAKTIDLCNNPQTKEPKLDSAMRIIPEWKDYDAEIKALFDIRSKNHTGKTKSGHEGTDKHTEL

SEQ ID NO: 3900 - protein, 1515 aa, Dasypus novemcinctus
MAAMAKAAYVVRLLLSSTALWLSLLGAGTASASKAVTARLAAKWPETPLLLEASEFMAEESNEKFWQFLETVQELAIYKQTESDYSYYNLILKKAGQFLDNLHINLLKFAFSIRAHSPTIQMFQQIAAEEPPPEGCNAFVVIHKEHTCKINEIKKLLKKATSRPRPYLFKGDHKFPTNKENLPVIILYAEMGTRAFGKFHKVLSDKAQNGEILYVLRHYIQKPNSRKMYLSGYGVELAIKSTEYKALDDTQVKAINNTIEDETEINEVQGFLFGKLKEIYSDLRDNLTAFQKYLIESNKEMMPLKVWELQDLSFQAASQIMSTPTYDAIKLMKDISQNFPIKARSLTRIAVNQHMREEIQKNQKDLQNRFEIQPGDDGLFINGLSIDMDSYDPFSILDMLKFEGKMMNGLQNLGIHKEDMSKFLKLNSHDWEHNYALDIRHSSIMWINDLEHDDLYVSWPASYQELLKPVFFGSIPSMRRNIHNLVMFIDPSQEYTLDFIKIAELFYYHKVPLRIGFVFILNADDEADGTTDAGVALWQAFNYIAEQHDVSQAFISIVHMYQNVKDQSILTVDDVKSVLQNEFPHDNVWDILGIYSEYDKERTAGASFYKMSGLGPLPQVLYNGEPLNHEEINIEELEMAVLHRMIDTSLYLQRAVFMGTLNDQVNVINFLMDKNTVVPRINSLILHTKRQYLNLISTSVTADVEDFSTFFFLDSQDKSAVIAENMYYLTQEDDDVISSVTLWIIADFDKPSGRKLLLNALEHMKTSVHSRLGVIYNPTSKIKEENTAISRGILAAFLTQKNNNLRSFLWKLAKEETATAIYSGDKITTFLTEGMDKNAFEKKYNTVGVNIFQTHQLFCQDVLKLHPGERGIVSNGKFLGPLDENFYAEDFHLLEKITLSDLVEKIKGIVKNMEMNSKNMSDLVMKVDALISSLPKRVSRQDVTFLKENHSIIKINPQENNMFFDVIAVVDPLTREAQKMAQLLIVLGKIINMRIKLFMNCRGKLSEVPLKSFYRFVLEPELMSGTNDILSSGPMAKFLEIPESSLLTLNMITPEGWLVETVHSNCDLDNIHLKDIERTVTAEYELEYLLLEGHCFDIMTEQSPRGLQFTLGTKNKPVIVDTIVMANLGYFQLKANPGAWVLKLRQGKSEDIYQIVGHEGTDSQPDLKDVIVVLNSFKSKILEVQVQKKPDKIKEDILSDKDEKRKGMWDSIKSFTIRLHKEDKKETDILNIFSVASGHLYERFLRIMMLSVLRNTKTPVKFWFLKNYLSPTFKEVIPHMAKEYGFQYELVQYKWPRWLHQQTEKQRIIWGYKILFLDVLFPLAVDKIIFVDADQIVRHDLKELRDLDLDGAPYGYTPFCDSRTEMDGYRFWKTGYWASHLLRRKYHISALYVVDLKKFRKIAAGDRLRGQYQALSQDPNSLSNLDQDLPNNMIYQVAIKSLPQDWLWCETWCDDESKQRAKTIDLCNNPKTKEPKLKAAARIVPEWVEYDTEIRQLLEHLEYKKKNEILTHDEL

SEQ ID NO: 3901 - protein, 1765 aa, Punica granatum
MKTPLRSGFCLVIVLVCLGLLVGVHGETRRPKNVQAAVRAKWSGTPLLLEAGELLSREWKDLFWEFVEVWIQNEEDHTGSYTARDCLKKILSHANSLLSDSLAPLFEFSLYLRSASPRVVLYRQLAEDSLSSYPDAEEISSGDYGPGVTGKFDNTESRKVDSLLVGKNPESPRGKCCWVDTGASLFFDVADLKSWLHGHSKHDGDVAGQPELFDFDHLYFDANIASPVAILYGALGTSCFKEFHLTLAEAAKKGKVRYVVRPVLPTGCETKAGVCGAIGAGDPVNLGGYGVELALKNMEYKAMDDTTVKKVSQGKANLENFHWSILLLMRKLAGQPELFDFDHLYFDANIASPVAILYGALGTSCFKEFHLTLAEAAKKGKVRYVVRPVLPTGCETKAGVCGAIGAGDPVNLGGYGVELALKNMEYKAMDDTTVKKGITLEDPRTEDLSQEVRGFIFSKILERKPELTSEIMTFRDYLLSSSISDTLDVWELKDLGHQTAQRIVRASDPLQSMQEINQNFPSIVSSLSRMKLNESVKEEILANQRMIPPGKSLMALNGALLNIEDIDLFLLLDLVHQDLSLADQFAKTKIPESIIRKLLTSVPPSESSMFRVDFRFSHVHYLNNLEEDSMYKRWRSNINEILMPVFPGQLRYIRKNLFHAVFVLDPSSVCGLEAIDMITNLYENSFPMRFGVILYSSNFIKKIESGAELHGAVANSQNEEDLSSLMIRLFIYIKENHGTHSAFQFLSNVNRLRMESESDDAIEMHHVEGAFVETVLPKAKTPPQDMLLKLEKDQSFKETSQESSLSVLKLGLAKRQCSLLMNGLVLDANEEALVNAMNDELPRIQEQVYYGHINSHTDVLDKFLSESGISRYNPQIIGDSKTRPKFVSLASLILGGESVLNHIDYLHSPETMDDLKPVTHLLAVDVTSNEGIKLLREGIRYLMAGTKIARLGVLFNAKQDADLSSLLFVKVFEFTVSSYGYKKEVLNFLDQLCSYYEHEYVLDPSAAVQDGHREKLQSTIYELAHENGLSTDAFKSMLGEYDIDKMRERLNKVAEFLYRLTGAGSAVNSVITNGRVMFPVDANSFLSDDLRLLESMEFKQRTKYVLEIIEEVNWKDVDPDLLTSKFLSDVVMYVSSAMATRERSSESARFEILHADYSAVILGNENASIHIDAVIDPLSPMGQKLASLLRVVWKYSQPSMRIVLNPMSSLVDLPLKNYYRYVLPTMDDYSSTDSSINGPKAFFANMPLSKTLTMNLDVPEPWLVEPVIAIHDLDNILLENLGDTRTLQAVFELEALVLTGHCSEKDHEPPRGLQLILGTKSKPHLVDTLVMANLGYWQMKVSPGVWYLQLAPGRSSELYTLKDEEDGNSLKRITIDDMRGKVVHLEVMKKEGKEHEKLLVSTDDENQSEDAKGGRNSWNSNILKWASGLVGGNEQAKKSRDTSVVRGKGGRQGKPVNIFSIASGHLYERFLKIMILSVLKNTRRPVKFWFIKNYLSPQFKDVIPHMAQEYGFDYELVTYKWPTWLHKQKEKQRIIWAYKILFLDVIFPLSLEKVIFVDADQVVRADMGELYDMDLKGRPLAYTPFCDNNKEMDGYRFWRQGFWKEHLRGKPYHISALYVVDLVKFRETAAGDNLRVFYESLSKDPNSLSNLDQDLPNYAQHTVPIFSLPREWLWCESWCGTATKSKAKTIDLCNNPMTKEPKLQGARRIVPEWTDLDSEARRFTAKILGDEPDLQVPVQSPAQSKPEEAKVDSSLEDDLESKSEL

SEQ ID NO: 3902 - protein, 1491 aa, Pseudogymnoascus sp.
MVRPGSVWSLTGSALAFSCLRFIKVSASPTINVALATSFTSAPYLLELLETAGDENSTSYFPLLDRIAEGHFKDATTDLGLYNSFVKVLRNDGHLDSQGLASYSFALSLRTSAPRIEAQYQFYDTAIEQSVDDSSCPVWVLFEGNKHCSPALNEAHGTYNGRRGTEQLQFDRIIGNLSAPASILYADITSLEFSKFHKKLIQKAQKQEISYRIRHKKPNVQESRPLVIGGYGVELALKRTDYIVIDDREADAQVQEESINTEVVLEDEEFADLKPLSASELVSLGLKASSFIMQSENPFEILTRLSQDFPRYSSAIAAHNVSSSFVEEHEYNRGQLVPAGANVVWINGLQVPTRQMDAFSMLDILRKERKLLNKFSQLGLTGSQTISLLSHKDIAFTKADDEPARYDWRDDVVSRDDDGNAIIWLNNIEEDKRYEGWPTTVRALLQGGYPGQLPQVQKDLFNLVFPVDLSNLRDVELVVEQLSDFVKRALPLRFGLVPLTNSNAALEEAKIVYYLLESYGLSTMVAYLNGFYASKGIQSSRNANFEAATKERKLQKDKVARSLEEVLDANEANTSIASSKRWNSRLGTNGKIPPVFVNGVAVPRDENWMQGMSQRVQMDVRLMQRAVFENIVTDDEWPPMLYLKETTYRRDPFLMPENDKDLQLFDVNAIYSDHAEALEGLPVIKISPSEKQDEWAHMILIADVETEQGKQLLKAVTEFNKRNPSVELAIVPSSESPAGILSIYEYMAERSFQSLEYDLGLDGLVEAVSKFTSNEETQHKYGQGVAEKWTAIEGLLGSLGLKPGQQGLLLNGRLVGPIPNEIELGFHEMEQLLSFERTKRLNPVLAAIKDLGFSEAISDPLASSKLTSLVTLSFISNVPEGIFEQAPTLRIDSFKAWKSEYTAIEIGDESTASIHIQVALDPASQESQRWIPILKALSELDGVYLKLFLNPKDVLKEIPIKRFYRYVLESKPVFNSDGSLKDIKAQFASVPQEALLTVGMDVPAPWLVAPKQSVVDLDNIKLSSINGDVNAVYELEHILIEGHSSEKETGQAPRGAQLLLGTAADAHFADTIIMANLGYFQFKANPGFYKINLQEGPSSKVYSIDTLGAPGRDASKPDDSTEISLISFQGLTLFPQLSRNPGQETEDVLEPSTADLKDDIVSKGRKLAESILGFGKKEVVAQTTQAEINIFSVASGHLYERMLNIMMVSVMKHTNHTVKFWFIEQFLSPSFKQSIPALAAAYNFSYEMVTYKWPHWLRSQPEKQREIWGYKILFLDVLFPLSLDKVIFVDADQIVRTDMRELVDIDLQGAPYGFTPMCDSRVEMEGFRFWKQGYWKSYLRGLPYHISALYVVDLRRFREIAAGDRLRQQYHQLSADPNSLANLDQDLPNHMQTLLPIYSLPQEWLWCETWCSDESLAGAKTIDLCNNPMTKEPKLDRARRQVPEWTVYDDEIEGVFRAAREGREQKGEVKNTKSRTLEAEAEGTGRVKDEL

SEQ ID NO: 3903 - protein, 1562 aa, Pieris rapae
MKAVGFSTLLFLILTQVFHSIASNADTKREEKKSKGVTTFVSAKWEATPIVLELAEYLSGESGDIFWSFVDGINSLKSSLSSLNTDKEIYDTCIGIASSLLAPAQLRMAKLALSMHLNSPTVRMFDEIATQNGAKQVNCDVFVSIASQNICNNDILRDVLKTTSQYDADEHRLETYLLDHTYPSSNNKSLTAILYGELGMPEFTVKHKILSTYADKGLINYVVRWNVKPRGNPKLRLSGYGVELQLKSTEYKSQDDATPKESDTDTPVPSEEEDENDPQNQIDGFNFGRLKNLFPALRTPLERFRRHLSEMSEELEPLKVWQMQGLSMQAAAAVIDAHDAGGDEALRVLTSIAQNFPMQTKSLIHVNVPRSLREEVLYNQDIWASSLGLRAAEPLLLVSGAQYDAEEVDIMALLNSLKEDIGPMNTLHAIGLSKKLINKLMSLELGESFTWEEYGLDIRDTAITWLNDLETDERYRRWPASFMELLRPTYPGMLRNLRRNIYNYVIIIDPTSPASLPPLKLGETLLKHSTPVRVGVVLAPNNTPLGIAIRSAFNYVAQDRNSNKEAFFFLTQLLSSSEEEELNFDLLKRLLKKFTNSGANVNEIISEDSEYNFGHQLAEEFVGKLGADKYPQVLVNGVPLWDEGPISLSASVDSLEEALVTSLSRHTGRLQRAVFRGDLSDSDDATDYIMKQPHIMPRLNRRILATDPSQYLDLSGVPSSPELFTEDKIHKLMHLTGRDALATALPLLKYFAKSAKAEKITQTIWVIGDLNDKRTRDFLKNALNFMRESGGVRVAFIPNVDGESKVDQSLNKVVIAALTTLEPAKATKYVAQLLDDEGCHERQDCDILPELVSALNKHAWVLKAARILCVRGMKLRASERALVYNARYIGPLAENETFSSDDFVLLERYSNQVYGEKLAEVFKKKRTLTNIEEDDDDDTISDIDTEKYFKVISILASRSPRTRTPLPTGLKTEHSLVELPPLYTDEAAIEIVAVVDPASTAAQRLAPLLLVLRRVINCRVKLFLNPQDKNSDMPLKSFYRYVLEAELQFTPSGSLTGGAIARFNRLPHAPLLSMEMRTPPNWLVECVKSVYDLDNIRLADVESLVHSEFELEYLLLEGHAWDTALGTPPRGLQLILGSRDNPEIMDTIVMANLGYFQLKANPGAWILRLRPGRSEEIYEIVGHENTDTPMGSSDIQVLMSSLRSHVIKLRVSKKPEKQHLDLLAENDEKNTGGIWNSIASSFVGGDEQEGQDETINVFSVASGHLYERFLRIMMLSVLKNTKSPVKFWFLKNYLSPSLKDILPYMAEEYGFSYELVQYVWPRWLQRQRDRQRTIWGYKILFLDVLFPLHVKKIIFVDADQIVRADLKELVDLDLGGAPYGYTPFCDSRREMEGFRFWKQGYWRNHLQGRSYHISALYVVDLKRFRRIAAGDRLRGQYQALSQDPNSLSNLDQDLPNNMIHQVAIKSLPQEWLWCETWCDNKSKTYAKTIDLCNNPLTKEAKLSAAMRIVPEWKEYDAEVKGLQARVRRGLYQRNDSDQEIEHRVEDSTNTEKNSGDHEHTEL

SEQ ID NO: 3904 - protein, 1487 aa, Aspergillus fumigatus
MAIGLGSVTSWRLCLVILAAFTPLVCGSPSVNVALQASFDSAPYLLELLETAAEENSTSYFPLLDRIAEGTFDDATTEKQLYDRFLQVVYDDGHLSTPELLSSFKLSLAIRSAAPRITAHYHFYNASVQHSLMAAQDAACPVWVHSEGKQYCSSSMERAQQDVMGESDPRELPFDRVLGDLSLPPAVLYADIASPMFKDFHHTLSALAKDGQVSYRVRYRPPQHWISRPLFVSGYGVELALKRTDYIVIDDRDAEKRSQKDSGSSEWASVEEESPDDLGALSSSEVARLGLNTVSYVMDSEEPLDTLVRISQDFPKHSAKIAAYNASDALLKDIRTSRLGMLPSGVNVMWINGVQIDPRQIDAFSLLDHLRRERKLIDKFRSIGLSAQEAVDLLCHQTLGETLAKDSPPRYNYRDQIEGGGVIIWMNDLEKDTKYQSWPDDLSAYLQPMYPGQLPAVRRDAHNIVAPVDLTSSDDMELVVKTLQVFVKRKIPVRFGLVPLASSPGSVAQLKVAHYLHETFGLASLIHYLEESAAKKKIGSPDKAIFQHAIKDRTSRPNKQILSFDEILKSDELEILVSRTKQYQDRLGIKGNAPYILVNGVFVPRDDNWPQEMSMRVGRDLQTIQQGVVDGSIEEDTWLPELFLSEAFDRRNPLIIPEDSKDIRIVDISKLAKSRGDSADTLRIASEMDTLDSKHLIVVGDFDSENGLKLLVEALELRATHGEVEMVLIHNPAPDVETESGSALIYNALKGTDKVDASRVLRHLKTAENTNFPEAEAKKMSQFWEAQQALARDLGFLPGTNGVIVNGRAIGPLPDGSTLSKEDLDGLLTYEEARRIGPVAKAAKDLGLESKLSGPLALAELSSLAALSTVSDVPEGIFEQMSSIRMDLFKKWNDLLSVITVSTSEDPAIIIAASIDPTSETAQRWLPILKVLSRLAGVRVTLALNPRDQIQELPTKRFYRYVLDSEPSFNDDGTLARPTATFSGVPVEALLTLGMDVPSPWLVAPKESIYDLDNIKLSSLKPDANVDAIYALEHILIEGHSRDVTVKTAPRGVQLILGTEDNPHFADTIIMANLGYFQFKAQPGLWKINLKPGRSQRIFNLDSVGGQGYSPQPGDENNEVALLSFQGKTLFPRLSRKKGQEMEDVLDTDVKSGSAMDYVSKGFNFAQGVLSSVGVGSKDGLAEKQADINIFSVASGHLYERMLNIMMVSVMRNTKHTVKFWFIEQFLSPSFKSFLPHLAREYGFSYEMVTYKWPHWLRAQREKQREIWGYKILFLDVLFPLSLDKVIFVDADQIVRTDMYDLVSLDLEGAPYGFTPMCDSREEMEGFRFWKQGYWKNFLRGLPYHISALYVVDLNRFRALAAGDRLRGQYQMLSADPNSLSNLDQDLPNHMQHHIPIKSLPQEWLWCETWCSDDSLSTARTIDLCNNPQTKEPKLDRARRQVPEWTKYDDEIAALAERVALEQQRQQLEEMESADEDEESGWEKDEL

SEQ ID NO: 3905 - protein, 351 aa, Trichonephila clavipes
MTKSPFLIPLIALHDLELDVLHELILVTQLCFPFSFSVFASSMPIIGGIVEEWRTIWREVTSTFSGNKSDLENGDDKINIFSLASGHLYERLLRIMMLSVLKNTKTPVKFWFLKNFLSPTFKDFLPVMAKRYGFEYELVQYKWPRWLNQQSEKQRIIWGYKILFLDVLFPLDVKKIIFVDADQVVRADMKELVDLDLMGAPYGYTPFCDSRKDMDGYSALYVVDLKKFRRIAAGDRLRGQYQGLSQDPNSLSNLDQDLPNNMIHQVSIMSLPQEWLWCETWCSDATKQYAKTIDLCNNPKTKESKLASAMRIIPEWKDYDTEIKQLYKDYENNKIEPSEKGNKKTDQHEEL

SEQ ID NO: 3906 - protein, 1577 aa, Brachypodium distachyon
MAAARGSRSGVSGAALALLAAVLVGCLAGGASAAEIRRQKNVQVALRAKWAGTPLLLEANELLSKEGKDLFWGFVDHWKELDKGSECLTAKCCVQKIVEDVHSLIGEPLASIFEFSLTLRSASPRLVLYRQLAEESLSSVPVEDDALEQISGHGPVEGTCCWVDTGSALLFNSADLHKWLEGSGKRTMDSTGQPELFDFDHVYPRSNVTAPVAILYGAVGTKCFKELHVRLAEASKKGKVRYALRPVLPSGCQATSSFCASIGAVDAVTLSGYGVELALKNMEYKAMDDTAIKKGVALEDPKTEDLGQEVRGFIFSKILERKPELNDEAMAFRDYLLSSTVSDTLEVWELKDLGHQTAQRILHASDPLQSMQEINQNFPSVVSSLSRMKLDDSIKDEIIANQRMVPPGKSLMALNGALINIEDLDLYLLMDMVREELSLADQFIRLKLPKSAVHKILSAAPPAESNSFRVDFRASHVHYLNNLEEDDLYKRWRSNLNELLMPVYPGQMRYIRKNLFHAVYVLDPASACGAETIDTIMSLYQDSVPVRFGIIMYSSRFINVIEENDGTHQVNDGSKSEDDTSTLIIRLFLYIKETYSTQLAFEFLSNIHKLRNGGDDYSEEPVEAHHVEEAFVDSVLSGAKSHPQDVLLKLQKENMYKQEAEENSRFVHKLGLYKLHCCLLMNGLVHESNEDATMNAMNDELPRIQEQVYYGHIQSHTDVLEKFLSESSYKRYNPSITGKSTEKKRFVSLFASYHQEDSVLHDINYLHSDGTTDDVKPVTHLLAVDLSSKIGTKLLHEAICYLMDGSNRARVGLLLYARSDSASNILLMKDIIDRTISSFSDKEKVLGFLHGFCKFYESQHMPASTAVGDRISPMMDEVYNLAAETDLPVDDYKSWLASFSADTVLKRIDKLNDFLFGQLGLEFGSNAVITNGRIFVVGVGDSFLTDDLGLLESMEYELRTKYIHEIVEEVEWAGVDPDYLTSKFYSDITMLVSSSMSVRERPSERAHFEILHAEHSAIKLNYMNSSIHIDAVIDPLSPAGQKLSPLLRILWRQIQPSMRIVLNPISSLADLPLKNYYRFVLPSMDDFSNTDYSVHGPKAFFSNMPLSKTLTMNIDVPEPWLVEPVVAIHDLDNILLENLGDVRTLQAVFELEALLLTGHCMEKDREPPRGLQFILGTKQMPHLVDTLVMANLGYWQMKVSPGVWYLQLAPGRSADLYELPSKLIAIDSLRGKLIHIEVQKKKGKEHEDLLNADDENHFQEKMDLKDARQGETINIFSVASGHLYERFLKIMILSVLKKTQRPVKFWFIKNYLSPQFKDVIPHMAQEYGFGYELITYKWPTWLHKQKEKQRIIWAYKILFLDVIFPLSLRKVIFVDADQIVRTDMGELYDMNLKGRPLAYTPFCDNNKEMDGYRFWKQGFWKDHLRGRPYHISALYVVDLAKFRQTAAGDTLRVVYETLSKDPNSLSNLDQDLPNYAQHTVPIFSLPQEWLWCESWCGNATKARAKTIDLCNNPMTKEPKLQGARRIVPEWVDFDSEARQFTARILGENLESAEATSVPSDAPKPDDKDSRQDVKDEL

SEQ ID NO: 3907 - protein, 1820 aa, Leptomonas seymouri
MKMCTVKSPALQQLVVLLTLSVLLCIIQPTNAKGIRVTVEASWNETSFLQEGCEWAGRTFGPTAFYHCVDALWNFELPHAGGDGGDSSVNAAAGHEAVSARYSTQQVQYSALRKLVQTVTEAQLADKALFEMEMASRVYSPAVEAHYAAARKTLSEVAALTSTTEEGANTLASLRSRCSCGEPFGVLYTRALSADGQMSAQQVCSAAGLKEVLAALQQHHDIAGTSSPASSAPLVSVHDVSLPRLDYRHPSLAVQKKVSAVFVLYGLLGSSVTREMHTAAVEWLESCEGALGTTSGAAATPTLAYFFRHLPVSRTRLCGPKTSQDVSEGNDRAAFLSEQWDTPLAVQGYGVTVDIKNMEYKVLDEKAAAQQRAKEEAERKDAASSNSSVTDLPPSGQTDVVVGGFHIQRLKERYPDLALPLSELATLMEDEVGTKDLKVDFGVWELQNLGHAAAQYIREVKNNSHRLHALKDLVNRFPLYAATLSRIATQPSRFEVVQKALDSVRARLPSGLSALFVDGWRVEEKDLSLFGVLDALRANEILSHHIKRSLTTRLIPRSKEEGVTGVIEGAGDVATVKVKPALLEEVSNYLKRSVGRKAHTHDASSTGGIALAIPDQYVMWLNDVEAEEELKDLPKKLSTLLTRTPGITAFPRRNLLNVIFIWNVLKVSHVQKLNTIFHFGSQGQVARYGVLLLDPEWSPEVAQEKITDAAGQAPGFGGKSSLSWDILTIASIAYHLDAAGKPEAFLKVLMGLLQASMTSQTKLSDVISSDTVQQVCREVADSMLGESLDDLISNVDFLNYYHGTQELIRRFPMDAHPTTLLNGMVLGPSVGQYTTVLHNELTQLRKWVTSGALRDDMENLYAQILLLRGAVDHLQPALFRPPKTMLWTTTQALVAFIESAPYLYSAAYAFDVSSLTQILALPCHATQATLQQLQTVLSALQSCGDVTNEGAAHYAVCRRLRVSIVLCPDAVASGSSTSASIAAVPTSPAALDHILALLQKMAQRDVKETKRFIAVQRYISHLLKALSTSPTVSKAYRRTGVLDHETVTAALAHDPLPDDLKTEKTGAAAYMSQRSGGGKDFWVALEDAAPVSDFSVTLVTNGRIVTMDSTFTDWDVLYAASQALPMARAVEEVVLVVNFAEMAPSSAGVASYSSDEMDNAFYSGKIACLTTVFEHEINTRVSSTPPSPLSQEKSLFASAEDQKRMRVLLFSLNNTPNGAAAPGEDDAAGEQGELHQITAVVDPSSRDAQPIVSIVSYLMQSPLKLRLKVLLNPSPAVMLPIRNFYEYVANAKVNFDPLSGRVVAPVATLAPLPKHLLLTIGAEEPPSWTVFSQEAEVDLDNILLSKLSPGIPFVSAVYRMHSILVTGDTTDVLTGNPPVGLPLSLIPAHGGRYSNDAYMRSTDTQVMANQNGYYQLQAAPGQWYLSVKPGPVAAAYCIEAVDTYSIPACAEGRREVNFSQGHHIPVVIDSFSGRHLSLRVRHTPLRSLAASAESGGNVEDLHEFLKKMAANVTYVWPPKWNSRGAQAHPPKKPTLNIFSVASGHLYERFLRMMFYSVHKTSSDKYGANTTRIKFWAIENFLSPQFKRYIPLLAAELGFEVGFVTYRWPLWLPRQTEKQRKIWAYKILFLDVLFPLDVDRIIFVDADQTAQADLHELYNMNIGRSPVAMTPFCQTHRNEDTARFRFWEHGFWAEHLKGKPYHISAIFLVDLRQFRAMLAGDIYRSVYASLADDPNSLANLDQDLPNYLQAKIPIFSLPEQWLWCETWCSADSKSAAKTIDLCNNPLTKMPKLDNAKMVIPGWEELDNKLQNMSDSLLGLYG

SEQ ID NO: 3908 - protein, 1299 aa, Mesocricetus auratus
  MOD_RES (290)..(290): Any amino acid
MGSRGDANAAGASAARWVTGLCYNMRLLIALASLCLFSLVEANSKAITTSLTTKWFSAPLLLEASVRTLRMQTLSASCTGLTHRQIAVDEPPPEGCKSFFSVHGQQTCDFDSLESLLLTAPDRPKPLLFKGDHRYPSSNPESPVVIFYSEIGHEEFSNIHYQLKSKSKEGKINYVFRHYISNPRKEPVYLSGYGVELAIKSTEYKAKDDTQVKGTDVNTTVIGENDPIDEVQGFLFGKLRELYPTLEEQLKEFRKHLVESTNEMAPLKVWQLQDLSFQTAARILAAPVEXALIIFLFFRAITKTAVSSQLRTEVEENQKYFKGTMGLQPGDSALFINGLHIDLDTQDIFRIGFIFVVNDSEDVDGLQDAGVAVLRAYNYVVQEVDGYHAFQTLTNDARGYYEQTGVGPLPVVLFNGMPFEKEQLDPDELETITMHKILETTSFFQRAVYLGELPHDQDVVEYIMNQPNVVPRINSRILTAKREYLDLTASNNFFVDDFARFSTLDSKGKTAAIANSMNYLTKKGMSSKEIYDDSFIRPVTFWIVGDFDSPSGRQLLYDAIKHQKTSNNVRISMINNPSQEISYSNTPIFRAIWAALQTQTSNSAKNFITKMTKEETAEALAAGVDIGEFSVGGMDVSLFKEAFESSKMDPILSHALYCRDVLKLKKGQRVVISNGRASYKDNHKPHLIRVDTTYWYPHLPPPPTLFPLISMLMFCSFDFFFSAIKLKPNEGDTYYDVVAVVDPVTREAQRLAPLLLVLTQLINMNLRVFMNCQSKLSDMPLKSFYRYVLEPEISFAADNSFAKGPIAKFLDMPQSPLFTLNLNTPESWMVESVRTPYDLDNIYLEEVDSVVTAEYELEYLLLEGHCYDITTGQPPRGLQFTLGTSANPTIVDTIVMANLGYFQLKANPGAWILRLRKGRSDDIYRIYSHDGTDSPPDANDVVVNLNNFKSKIIKVKVQKKADMVNEDLLSDGTNENESGFWDSFKWGFSGQKTEEVKQEKDDIINIFSVASGHLYERFLRIMMLSVLKNTKTPVKFWFLKNYLSPTFKEFIPYMARKYNFQYELVQYKWPRWLHQQTEKQRIIWGYKILFLDVLFPLVVDKFLFVDADQIVRTDLKELRDFNLDGAPYGYTPFCDSRREMDGYRFWKSGYWASHLAGRKYHISALYVVDLKKFRKIAAGDRLRGQYQGLSQDPNSLSNLDQDLPNNMIHQVPIKSLPQEWLWCETWCDDASKKRAKTIDLCNNPMTKEPKLEAAVRIVPEWQDYDQEIKQLQILFQEEKEMGTLQEVRTQEGPQEHEEL

SEQ ID NO: 3909 - protein, 1414 aa, Colinus virginianus
MAALPLGRKRKRGARKRRQRREPEGRVAARLGGLPGRPARPRPRGGQRERQRKVDLFSSSLLDLPYKMGILIAILGAWFSCSFVKGDSKAVTTSLTTKWSSTPLLLETSEFLSEESQEKFWNFVEASQNIRTAEHDGSDHSAYHEMLKVASQSLSPLQQNLLKFSLSLRSYSATVQAFQQIAADEPPPEGCTLFFAVHGEKTCEYDSLGALLKAASGRPKPFLFKGDHTYPASNPDSPVVILYAEIGTEGFYRVHKLLVKKAEAGEITYVLRHYIANPSEEKVYLSGYGVELAIKSTEYKAKDDTQVKGTDVNATVIDEDDPIDEVQGFLFGKLRQLYPDLNEELKELRKHLVESTNEMAPLKVWQLQDLSFQTAARILAAPSVDALMVMKDLSQNFPTKASLFDVLRNEARVMEGLHSLGIEGFSLHNILKLNIQPSDSDYAVDIRSPAISVLIVDPAHETTAELLNVAEMFLSNHIPLRVGLVFVVNDCDDVDGLQDPGVALLRVYNYVAQEMDNNYAFQTVMSIYNKVKTGDQLKVEHVVSVLEKEYPYVEVNSVLGIDSAYDQNRKAARSYYEQTGVGPLPVVLFNGMPFQKDQLDPDDLETVTMHKILETTSIFQRAVYLGELSNDQDVVEYIMNQPNVVPRINSRILMSDREYLDLTAMNNFYVDDFARFSTLDSREKTAAVANSMTYLTKRGMSSKEIYDDSFVRPVTFWIVGDFDKPSGRQLLYDAIKHQKSSNNVRISMINNPSEDPNSSNTVVAKAIWAALQTQTSNNAKNFITKMAKEEVAKALEAGADILEFAVGGMDTNIFKEAFESPKVDFILSHAIYCRDVLKLKKGQRAVISNGRIIGPLEDGEMFNQDDFHLLENIILKTSGQKIKSQIQQLGFEEDLASDLVMKVDALLSAQPKGEARIEYHFFEERHSAVKLRPKEGETYFDVVAIVDPVTRDAQRLAPLLLVLNQLINMNLRVFMNCQSKLSDMPLKSFYRYVLEPEISFTAENSFASGPIAKFLDMPQSPLFTLNLNTPESWMVESVRTPYDLDNIYLEEVDNIVAAEYELEYLLLEGHCYDITTGQPPRGLQFTLGTSTNPVIVDTIVMANLGYFQLKANPGAWTLRLRKGRSEDIYRIYSHDGTDSPPEANEVVVVLNNFKSKIIKVKDFIPYMAKKYNFQYELVQYKWPRWLHQQTEKQRIIWGYKILFLDVLFPLAVDKILFVDADQIVRTDLKELRDFNLDGAPYGYTPFCDSRREMDGYRFWKSGYWASHLAGRKYHISALYVVDLKKFRKIAAGDRLRGQYQGLSQDPNSLSNLDQDLPNNMIHQVPIKSLPQEWLWCETWCDDSSKKRAKTIDLCNNPMTKEPKLQAAMRIVPEWQDYDQEIKQLHNLFQKEKETGTPAQMSGQHTQDAAAHVEL

SEQ ID NO: 3910 - protein, 1657 aa, Micromonas pusilla
MTCWSAFACIHAIFFTCVIIVVAEESTSASKVVSVTLTTEWQLTLSPSHHTGHRFSKATSSLLEAAEFFADEGDDQYWAFVEDWNESGEKDCQGNVYEYLERRAASEETLKVLKLSLSVRNYSPRLEMFRSLWSSTITAVKRTDGEKETAGCCLVMVGDKFARTKEELASLLATTSSGTPTAGRQATRLDHIYPGKASIPSSRRIFDSTQVFTSIPIVTFYGAMGTPCFGHFHALLKSASAQGQVHYVHRPVIMNAECARKGCIGLGTHVDTIGIDGNVGRLHVVGYGVELAVKNMEYKASDDSIMNDIGALLLAPIASESHDSLAFEVVKGFNFSRLNYRYPELNRELTSFRHYLVGKTAEDETLKIWDIKDLGLQATQRILLADDPFQMMMDISQNFPSLASSLSRLDLDSTICAEIENNQKHVSPGSLFMSINSEPIELDTVDIFTLADKITSEIREAARFRDIGLGSTAVRELLRLRIAPPGSELNFPRLNLFDSTTVPIISFNKNIESDRNYAHWSPDIMQLMRHSQLGQVPPVRRNMFNVILILNLGQSNSWRLVDALHEYTRAGVPLRLAYVLVDDSEGDTVKELWNPTSFLTDFAEFEEKEELDINFPRGLSLGTVIGRAGNLILRRFGGEAQVDFVNEVANARGVMFPGNHFIPAVKSKVTWSLVQKAFTRIFIQWYSKVDSVDSDDLVAPDMTKVHSLIDAHVANILSLAGATESEPGAYLSEAKALIADKGVAAPSALVNGIYFTLDDAERLGAEMEQVVMHFVQQEANSIAEAVLSGVLSNEILDKYPGGIFGWLHRTAVAKNTPFIVDNVKYPPTYVEMRPPQDNSEGLLAYIENCDVKASKGNTLWVVADAGTRKGMDLIASACECAARTRADGESTNSRVAVLHPPGVVATHRARAVALVSRWKTGYYCGNYSTFLSEILSSDAPETIKSALSALGMEQYASDSGMDDEELNTLLEQQGNFVASLIGMDANDSSESGTDSIVIANGRVIQIPTGYHMDADDFALLISKESSARGATVRNILESHSPVIPVSSSFNIFDQYMIACSLVAIRQTKSVSRSQVRTLESLESKHSAVIVQGDGVVVMDAVLDPLSKEAQRIAPLFYVLRDALFPHISIRIILNPRRELMEIPIKSYFRYAAPNPSLDAIPRVHFSQLPHHQTLTAHLDVPEAWLVTTVVATYDLDNLKLSDLPEEQDTMDAEYRIEALLVTGYCSESGAKDPPRGTQLILGDAGTVVMSNLGYFQLPAAPGVFELSLRPGRSADMYVFAEHVESTNSDVLLTVKEEHSARDVTYSSVEIIVSSWQGMTTQISLQRRPGMEREDVLPIHRGKDKDGGLWNKIISKWRNAKRSRLETINVFSVASGHLYERFLKIMMLSVRRNTNNPVKFWFIKNWLSPQFKDILPHIAAKYGFEYELVTYKWPTWLHKQTEKQRIIWAYKLLFLDVLFPLTLNKVIFVDADQVVRSNLKELWEMDLRGAPYAYTPFCDNNPEMEGYRFWKHGFWQTHLAGKPYHISALYVVDLETFRHTAAGDKLRLIYETLSKDPSSLANLDQDLPNYAQHQVPIFTLPQQWLWCESWCGNDTKTAAKTIDLCNNPMTKEPKLIGAARIVEEWTSLDEEVRSFTKQLEEHLLADKYVFTPPVRALS

SEQ ID NO: 3911 - protein, 1335 aa, Zygosaccharomyces bailii
MKIYLAFFTVLLYLKAVQCVLLSSIGTSVPESAKIWSIASYLLRNCNENILQSIYPMILQLDDETEDSLGDSLCYTVAKLISDLGEPHLASLMPLYCKWYPMGNQDPHERYTYVPNELYFILNGKKYENPDDVYYLKSGELKKQAQLPDSKMLAPGEVVIGNNREAPIVHFYGCPDEKGVFQEFNRNLFSEATQTGKLRFIWRSTCSLEKTALGPFPVALTTKEQSNLENLPQEILKIPESFDKSKYDLLTPREDEFTNVDLKAAKLIADHYQNNQNFDAAFLYAKDFVNNFPILVSELLSLSGDTDVISKSNDELANKGVDHNLLGLYINGQNWKVSSLNEVTLLDALEAELHKLRQLSFSLSKIDNRVSLLTAKNLINDFARISLPNLQQSQPVKLDLHRIRGFSESVIYFNDIEIDDQYHDLSQDIEKFFEKSKFGEIPEYRHNWSELIFVIDFNNLEDPDTKLALEGLQRAISVITQGYPQRIGLLPLNTGEAESIIKKIYHLRDKDLLLLEDFLKDLPIGRGRISADYQNTPDTAKLLRNLQIDQTSIIINGEIYPFRKNTWHYLVAKTIKKDTGFLKRELSKYIKHDEGKVRPMIDVRGILHLKSSETRHKKYTPDYFADSTYTAMDNTVLDVWNDRLCEYFKGKEYNVLHTITIVDDFNTVQALKRLYNLVHVKFVGIRFRAIHTGILSSTWNKVKDSSSKSSFNSILKSIIKKCSHYEPKYQLDDIVLQSWLPDLTPLFFSAKSFMIINGRFLHFEIDEIPQTKLFEATIKREAQRTLDTLEALEISYPGFSEKKIDSELVESISAILTKMFYQGTDIYHNGPDYSTETSLSRIDLTKILEINNFTIFQNVNHELRPIDLVLIVDPLEERTQKFYSLLEEVKGLSFVNLKIVLYPTKDLKIMPINRIYVQDFKNELGSKLPELSKIFDVEIEAPSNLAITSNQRVIGYVIEVHAFDKDDAVSEGVVDGIGGVCLELVDAKENVVDQTITMKTFGYAQFIAPQLWCQYYVRSCDPQYKVISFSSDARSDYLPVKSFDLKNFNPIKVYVQLEKTAAPVISAERENIINIFTVLKNDIAAEGNYKKMVLSILLSPQRHQQDVKFWILDQPYLSASLKKFIEDVNSDPQLDAKIELIQYKWPSWLRPQRFIARRIDALKILLLDVLFPQTVQKVFYMDPEISQLPDPFKLNEKITTKLPFAMFKMVGHGYWETGYWAKRIGEHNLKFHSVEPMFAINLKKFRDLDGGDKLRIHYQRLSADANSLAKVDQDLINDVQEEVPIRTLSRSTIKYLKTDPHVIEAWLEKKEAGTSLSGDDTELLSESNEVLHDEL

SEQ ID NO: 3912 - protein, 1584 aa, Acanthamoeba castellanii
MPDEPWGLNSSPPGMPLPSISKLHCAPGSLTKPVNRREFFAEETSQGFWAVVDGLHPGAAEDTDDTATTEETLYGKVMQLANALLPSSSKRLLHYALLSRYYSPKVEMFRQYSRGQAEHCRNAAWVHAGTHMLCTPEEVQRYLEQPNSRNESGSVPEATLVFGDQEHLFPNAAPSSAPLLVLYGQVGSSKFTQYHSVIRVAASASTVRYAVRHYTPEEPAKRLMNVQGYGVELAIKSTEYKVIDDKVPEKDQDGDDEQQSGQEQDTTIEGFQFDKLKQRKPELATELDAFKEHLEMVSQQNEGFQQLRAWQIKSLGYQAAQRIMSAGEPLQLLRDIAHNFPPIANSLARLRVDADIRSEIEDNQEQLAGLHHLPGNFINMNGRNLAADQLSPYVLYEFIKDELSKLDALSVFGLGRKDSEKLLSLVPSTPTIRFDLRDREVFPSGGTPATDDPNNVNGAIQFANNLEKDAMYGHWPGIHALLQPVYPGQMRYIKKNIQTMILVIDPSSPQGLSVIGNFLYMLRQGLPFRVGFVFSSGSTTESASTWEHSAENLAKLAKGESGDASQGSTESADNAPLPENLAATIIKTYFLLKQRSGEGVRPLDFFGFLGQSEEEATEVTEERVWQAFAAFMHQQGGSITQSEWREGMKSEAVATEYRTMQRYIEQKGIALLDRGSQYIFTNGKFQQIPADSSVGSALQNLLMQETFYGYSRFQEAAYKRELQHVDDLWSWILQESSPVFDRFSSLIFQTTGEDENGWVSLARHRELLAPATAYLSFPASEFNLKEYTHLVVGDLTTRPGLTQALEAVMRLAEEGSEKVRVGFLHNTEQDSQQVPPERRENEFLVARALQAALTSGKTLKRVFPFVTRLLATALAVGPENVRAAHIEELALAAELKDLPALMSKTVAAAYAQFERDRNLASSALGLLPGQRAVVTNGKVTRLPDQVMLVQDLKLLEAFEGLARVDQIRATLDGVSEHFGVDPDDLTSEFYSNELAAAVSVLSAETASSEQRVNLPQLTPSFVAGEQNDPTLKIVAVLDPLSKGAQQIAPLLLSLVNNDMGIQVQVVLNPKRDLTELPLKTFYRYVLQDELVFDAAGRLARKGEAVFNNLPTSLLLTMNMDTPHSWVVQAVRSCIDVDKGSPAVGLQINLGNHQQSHITDTTVMANLGYFQLKANPGLWWLSLGKRFGDEQQEGVSPYQLLSTDGRTPVPRLAAKIDRFTNTEYLQPYKVKRGAAQQVEGTKEELAKQDGGMWGQWMSYFQDSQKDTAEAEAKKDETIHIFSVASGHLYERFLKIMMLTVLKNTKSPVKFWFLENYLSPKFKEYAPVFSQAYNTSIELVTYQWPSWLHHETEKQRVIWGYKILFLDVLFPMDLRKVIFVDADQIVRTDLKELYDMDLKGAPLAYTPFCSSRTEMNGFRFWDSGFWKNHLGGRPYHISALYVIDLKRFREMAAGDVIRATYQQLSQDENSLANLDQDLPNFLQNRVPIFSLPQEWLWCETWCDDESKARAKTIDLCNNPLTKTPKLENAVRIIPEWRDLDEEARSIEERYSSSFASSATATATTAPDAAAADHVPPPTAPFEEIHA

SEQ ID NO: 3913 - protein, 1648 aa, Trichuris trichiura
MLRMWRIVVHGGVLPLLLVWFYAARPSSCRATQKNVIAYVQSKWADTPLVVEASEFMAHEGDGYFWKFIEVLGKNESNMGSGIGLSMVSLTLSLLICQHFPATDEIMYERLIGIAKSVLDSKSRVKLFQFALAIRCYSPSVEMYRQLSLSLSGRPAGHVFVDVHGQLSANINSLDELLNQAIERSPPIFSFDHLYAARSNKAKKWAILYANLESNDFITWHNLLKSRAKKGELNYVFRHLPRLRIAFKVGKGKVPLSGYSVELAIKSTEYKAQDDAKIRSKPTAGTNLTDDGDEEETDLDGFNIRLLKLLHPELRDKLDEFKLHLLEADELAPLKVWQLQDLSFQAGQRILLAAKEDVLHTLQELSQNFPLMASILNGCQARIPQRSGDQSSTVWRVVSRTYSLRLKEAFSEFGIEPGDSAIFINGMRIDLDEMDIFALLDKLKKEERLLAGFFDMGFRVNGRQNMQIASFVFLFVQKETQSLLYRISSETSSSKFAVDYTQWLPDVSWRLAECCDFASLVYFQFVNDLEKDPQYRQWGNSVQLLLQPYFPGMIRPIARNFFTLVRSRHFRWLLVIHFAATDARRYLPFNLATTAQEIFCKLRNRFTSTKAHWEDDFTSCRVGLILATNPDKKVSGYSDGGVALLNAYNFVKGDKSIERALKFVLHVYSRVPSGNVTSSDVIDVFKQKYPDEDLTTVFDVDSDYNTGRQRWAQFAQSSGLNKLPSVLLNGFPMADNDVTSDQFEEAVVLEVSQVTSELQRAVLEGKLTDGVDVQRFILNKPFVLPKLNPKVLATDNKALILTDVMGRAYVGIARSSQSVAVSEYKVSTVGEFKKLERKQQNQYIVQSRRYLTKNDESILRPVTLWVVANVATKDGRDLYLAAIRSLKQLPNERVGLIHNIARKDKVGYAIASLIQACLKLPLHQAKVVITKMLEKQLKSMEELEKLDIHGVDWNFLQKELNKKGEDIVAIDSYYSTRILNIPSGKVGLIINGIILSDVTSKDFSSAEDFALIEKYLLSSGCKVIASQIRKWNVPHEDGRSSDLVMRVFSLLKAYASDTKRQWVTPLMQNDSCVDILSKDMMSATFEIVAIVDPLSASAQQISHLLSTIGHVINADITLCMNCKPKLSDIPLKRFLRVAIPTQLEFNQDGSLKRQPVARFSILPQKQLFTLNVIAPHSWLVEATEAAYDLDNIKMSDAFTDVVGIFELEHLLLEGHCFDEVTGSPPRGLQFTLGTAEQPVMFDTIVMANLGYFQLKANPGAWLLRLREGRSKEIYKVNSLDGAQVSNDERMVVILDNFGGLSKSRSLLPNFASRSNFGSLLQVAKKPDKFEEELLPTSGEEDEESSLWQSISKFVTKFTSSKDDYDVLNVFSLASGHLYERFLRSAVYSESVDMHCSKIMMLSVMKHAKSPVKFWLLKNYLSPHFKAFLPFMAKRYKFSYELVQYKWPRWLHQQTVKQRVMWGYKILFLDVLFPLDVKKIIFVDADQVVRTNLMDLMKLDLEGAPYGYTPFCDSRKEMEGYRFWKTGYWKQHLGDRKYHISALYVVDLKKFRQIAAGDRLRGQYHGLSKDPNSLSNLDQCNNPMTKEPKLQSAMRIIEEWRDYDAEIKKLLDEYDRQRGIERSASNEKEEEEEEEPQQPSGTLADKLST

SEQ ID NO: 3914 - protein, 1480 aa, Exophiala spinifera
MQLPSLLRQSAAGGLLCAALLTPLIGASPSINVALETSFSAAPYLVELLETAALENSSSYFPLLDRIADGAFVDLQTEQQLYNKFIEVLQQDGHLSNPESLSSFKFALALHAAAPRVEAHFQYYNHSVQPHLMAAQDAACPVWVYLDGQQYCSPALDRAQQAVSMPEAEELLPFDRVLGSNIEAPPSILYADVTHPLFGQFHTIISQTAREGRSTYRLRYRPSAVAASQPLYVSGYGVELVLKRTDYIVIDDRDAQKSEASKPEQVSLQQAEDDDLTDLKPLTSSEVVSLGVNAASLIASSPDPLERLLQITSDFPRYSSVLASTNASKEFLAEHRANREQFLPSGYNVFWINGVQIEPRLINAYSLLEHLRRERRIIGNLQKIGLTPSEAVSLMSSEVIAETQANESPQRFDWRDDLEENKVLMWLNDLEQDKRYAAWPSSLRALFGRVYPGQLPQVARDIHNLVVPIDVTDLKDIELVTTALQNLVKRSVPIRIALVPTGVGAIADTYSKLSYHILDTYGLGTLMSFFTEITTSKKLPENPQKVFTATTKDRPVREGKQATPYEEILKAETLNDQLKARDNYVKRLALASSSRPFIVNGVVLPRSENWFEVLSSRVFSDLQLLQQAIYEGAIEEDGWVPGILLFAAATRRNELVFPSDPKDVEIVDVSRLTNDFADQFASLPRVPGNAAALLSDRAHVLVVTDLNTAGGRGFLQQSLDFWETHPEADLLLLHNPSSKTEPTSVASGLHALTRQSRDLTIEQVRTLLEQDTTSSEGEEEAGRFWASYQNLLNEVGLAAGQNGLWLNGRVIAPVDESFEATDFESLLEYERRERIAPVTTAITGLGLEERFGDALDVAKVTSLVARSLKSDLPEGLRESAPLIRMDRFKVWNDTYTSFKTSNGDNPTIQVVAVVDPASEIVQQWVPLLRTLSQLRGVNVKIFLNPKDRLTELPVKRFYRQVIGSEPTFDSDGFLQKPTASFQRIPRDTLFNLGMTVPPSWLVAPKECTNDLDNIKLSSVADGENIDALYELEHILIEGHARDVTTGPPPRGVQLLLGTEQEPHFTDTIIMANLGYFQFKANPGFWHITLKPGRSSKIFNIDSVGPKGYAAQPDDETTSVALLSFQGVTLFPRLSRKPGMEDEDVLEASGGAMDYFNKGASFASSALSSLGLKTGSSNNADINIFSVASGHLYERMLNIMMVSVMKHTKHSVKFWFIEQFLSPSFKSTLPDLARHYGFDYEMVTYKWPHWLRGQKEKQREIWGYKILFLDVLFPLDLDKVIFVDADQIVRTDMMELNRVDLKGAPYGFTPMCDSRTEMEGFRFWKQGYWETYLRGKPYHISALYVVDLKRFRQLAAGDRLRQQYQALSSDPNSLSNLDQDLPNHMQHVLPIHSLSQEWLWCETWCSDESLGVAKTIDLCNNPLTKEPKLDRARRQVPEWTEYDEEISGVLKEAAGKRRIQSPEADAAAEEIVVDERKRDEL

SEQ ID NO: 3915 - protein, 1365 aa, Saccharomyces arboricola
MRLLALVSIILCAPFWALAHSLRYGVPESVQVWSILVHLLGDFDVQLLAELYPLVTGLDEEVEAQENLVALTSNVLRERYAREDVADLLDLYARLYPMGVVHDSARSDTTQEPADGNYFVLNSKRYEKSDDIFYLKSKDLVSQQKLPDFNVIQPYDVVIGSNPEAPILVLYGCPTVDNLDFEEFNRNLFMEAMNEEGKIRFIWRPTCSLDGEDVEQPLNFPLAITLQDDCNVSSIPQLNKILSTVPSGLSVETAHNDRLHELKPEELRELDLKVTSLFSKYYQDNHDTLATLNFMKNIVNNFPLLDKQLAGISSVDNEIIVSNEKLDSKGFDFNMLGLYINGQNWKITSLDSYNLLNALKIEYENLLKIASLLQNLDSSKGILDSKLLLNKFSQFSLGKLQNLQPIKMDLHTIPGFSESIIYFNDIENDPQYNELINNVQTFFDKSKFGELPEIRQNWSEIIFVIDFAHLEDNDVKEALSGLVRAIGVVSQGYPQRVGLLPFNSGSDKSIVNKIYELKNSINGPAELKTFLETMLLADELTANTENSKYESVPDVHSLLSDLQIDETSIIINGEIYPFRKNTWNYLIAKVIKKDTEFLRKELSTSSSKNKQVSVRDLLHYKSANLRHNKYIPNYFADSLYSSVNNTALKSIGQDRIMTYTKDKKYNILHTITLVDDFNSINALERLQNLLGISFVGVRIRVIHVGDVSNSWAQLRDSLSKNDPIISINKFIDGLKTKIGRSNKYSKDSLNQVNLHKWLPDIPLFELETGSFIVLNGRFIHLDQKEVPEVKHFEAILKREAIRTIDSVFSLDLFFHDFSQKRIDPDFIEMISSTLTRLFYQSTHIYGNGIEYTTESSLPRMDLSQFFEPNNLTMFEDGKSAPIDLLLILDPLEERSQLILSLVEQVKSLQFINIQVVLMPTLELNIVPIRRIYVDDTEIVKTITSESNGIYQELDIEMDVPNSFVIDNNYHMKELLIELHAFSNKTALSAGNIDGVGGVCLELVDHAGKVIDRTTTMKTFGYGQFRTDKFLKGCSIRSCDSRYTVQSYSVDGHPSFIPSDYLDILSYTPYRISVKLAEQFSYEEDNEESDSYESSVNIFTVLEAGLREEEKYKQMVLSILSKCSESQQVNFFILDQPFISDSLKKYCEYINVSNEMRGNITFLHYEWPQWLRPQRFSSRRRDVSKFLFLDVIFPQNVSKILYMTPTETPFNPFDLFQFHGLRRAPLGLFRMNGNGYWREAYWEKMLRENNLEFYSTEPGFLINLERFRELNAGDKYRIHYQRVSSDARSLVNIGQDLVNDLQLEVPIRFLKGSYKKKLIIDEKLVAEWSDNINAFISSVDDGKSAEGDHGSEDQDYGDSTFLHDEL

SEQ ID NO: 3916 - protein, 293 aa, Thermomyces dupontii
  MOD_RES (19)..(19): Any amino acid
  MOD_RES (23)..(24): Any amino acid
  MOD_RES (28)..(28): Any amino acid
  MOD_RES (65)..(65): Any amino acid
  MOD_RES (116)..(116): Any amino acid
  MOD_RES (134)..(134): Any amino acid
  MOD_RES (141)..(141): Any amino acid
  MOD_RES (208)..(208): Any amino acid
  MOD_RES (211)..(211): Any amino acid
GSADINIFSVASGHLYERXLNIXXVSVXKHTKHSVKFWFIEQFLSPSFKKFLPHLAKEYGFSYEXVTYKWPHWLRGQREKQREIWGYKILFLDVLFPLSLDKVIFVDADQIVRTDXYDLVQLDLEGAPYGFTPXCDSRKEXEGFRFWKQGYWKSHLRGRPYHISALYVVDLNRFRALAAGDRLRGQYHTLSADPNSLANLDQDLPNNXQAXIPIKSLPQEWLWCETWCADEDLKTARTIDLCNNPLTKEPKLDRARRQVPEWTEYDNEIAELAVRVRAASKQSRREEDEKKDV

SEQ ID NO: 3917 - protein, 1715 aa, Vitis vinifera
MGTHFRSGFWVLVVLACASLCWNGSVVADNRRPKNVQVAVRAKWSGTPLLLEAGELLAKERKDLFWRFIEVWLSAEKDDADSFTAKDCLKKIVKYGHSLLSESLASLFEFSLTLRSASPRLVLYRQLAEESLSSFPLTDENPFLVGVNPKSPGGKCCWVDTGGSLFFDGAELLLWLRSPTESGSFQPPELFDFDHIHFGSSVSSPVTILYGALGTDCFREFHVILAEAAKEGKVKYVVRPVLPSGCETKIGHCGVVGTKDPLNLGGYGVELALKNMEYKAMDDSMIKKGVTLEDPRTEDLSQEVRGFIFSKILERKPELSSEIMAFRDYLLSSTISDTLDVWELKDLGHQTAQRIVHASDPLQSMQEINQNFPSVVSSLSRMKLNDSVKDEIIANQRMIPPGKSLMALNGAIINIDDIDLYLLMDMVHQELSLADQFSKLKIPQSTVQKLLATQPPPESNMFRIDFRSTHVHYLNDLEEDARYRRWRSNINEILMPVFPGQLRYIRKNLFHAVYVLDPASVCGLESVDMIISMYENNLPMRFGVILYSTTFIKMVEMSGGELQVSKAEDGQVEEDISNLIIRLFIYIKEDQGTQMAFQFLSNVNRLRTESEDSSGALEVHHVEGAFVETLLPKAKTPPQDILLKLQKEQNFKELSQESSIFVLKLGLSKLQCCLLMNGLVFDTNEDALINAMNDELPRIQEQVYYGHISSHTNVLEKFLSESGIQRYNPQIIADTKVKPRFISLASSVLGGESVLNDISYLHSPDTIDDLKPVTHLLAVDITSRKGMKLLREGIRYLIGGPKSSRLGVLFSVNPGPDSPSLLFVKVFEITASSYSHKKKVLNFLDQLCSFYASEYMLASSIVVEGTQAFIDKVCELADANGIPSKGYKSILSEFSVDEFRGHLNKVAQFLYRQLGLESGSNAVITNGRVMVAVDEGTILSHDLLLLESVEFKQRIKFILEIIEEVKWQDMDPDMLTSKFISDVIMFVSSAMATRDRSSESARFEILNAKYSAVLLNNGNSSIHIDAVVDPLSPSGQKLASLLRVLWKYIQPSMRIILNPLSSLVDIPLKNYYRYVVPTMDDFSSTDYTINGPKAFFANMPLSKTLTMNLDVPEPWLVEPVIAVHDLDNILLENLGDTRTLQAVFELEALLLTGHCSEKDHDPPRGLQLILGTKSTPHLVDTLVMANLGYWQMKVFPGVWYLQLAPGRSSELYLLKEGGVGSQDSPLSKRITINDLRGKLVHLEVVKKKGKEHENLLISSDDNHLQDGKKGNHDSWNSNLLKWASGFISGGEQLKKSESTSVSLVLDHIVYQTFAMGSALVVTQVSLIKCMIQVHALINFGGCVKIPALIGSQMQRTYNKLNKKSTIILNTPLKAFKRSSVYFITFLYTLEGSLILLGHGKGGRRGKTINIFSIASGHLYERFLKIMILSVLKNSNRPVKFWFIKNYLSPQFKDVIPHMAQEYGFEYELITYKWPTWLHKQKEKQRIIWAYKILFLDVIFPLSLEKVIFVDADQIVRADMGELYDMDIKGRPLAYTPFCDNNKDMDGYRFWRQGFWKDHLRGKPYHISALYVVDLVKFRETAAGDNLRVFYETLSKDPNSLSNLDQDLPNFAQHTVPIFSLPQEWLWCESWCGNATKSKAKTIDLCNNPMTKEPKLQGARRIVPEWQDLDFEARQFTAKVSGEVDPQEPVTPPKQSQDPITDSSPEEDDQESKSEL

SEQ ID NO: 3918 - protein, 1631 aa, Cicer arietinum
MGYRSARSSLLLLFVLFFVSTLADTRSPKNVQTALRAKWSGTPLLLEAGELLSKHQQNLYWNFIDIWLNANSNADSQTQTQTQTHTAKFCAKQILEHGRSLLNEPLASLFEFSLILRSASPTLLLYRQLAHDSLSSFPLTHHDHEIFETLNNNTQLDPLRVGVSLQSPGGKCCWVDTGEHLFFHVSELLSWLQNHPLHSQLVDDSFQSPPVFDFDHVYFGSTTGSPVAILYGALGTQCFQEFHNVLVGAAKQGKVKYVLRPVLPAGCEAHIGHCGSVGVSESVNLGGYGVELALKNMEYKAMDDSTIKKGVTLEDPRTEDLSQEVRGFIFSKILDRKPELTSEIMAFRDYLLSATVSDTLDVWELKDLGHQTVQRIVQASDPLQSMQDINQNFPSIVSYLSRMKLDDSVRDEIIANQRMLPPGKSLMAINGALVNVEDIDLYMLIDLVHQDLLLADQFSKLKIPRSTVRKLLSTLPPPESDMFRVDFRSTHVHYLNNLEEDAKYKWWRTNLNEILMPVFPGQLRQIRKNLFHAVFVLDPATSCSLESIDMIISLYENTFPVRFGIVLYSSKYIRQLEDHSAKEDGDKFEDDLSNMIIRLFSYIKGNYGIEMAFKFLSNVNKLRIESDDHVDDAQLEQHHVESAFVETILPKVKSPPQEILLKLEKDPELKELSQESSKLVFKLGLSKIKCPLLMNGLVIDPNEEALLNALNDETQRIQEQVYYGQIKSDTDVLAKFLSEAGIQRYNPRIISDNKPRFISLSTFTFGEASILNDINYLHSPGTMDDLKPVTHLLAVDITSGSGLKLLRQGLNYLIEGSNDARVGLLFSGNQSTDLFSLLFVKVFEVTTSSYSHKKNALDFLDQVCSLYQQKYILTSAVKADDIQAFIAKVCELAEANGLPSEGYRSSLSEFSADDVRRHLSEVEKFLSTSLGSESGVNAVFTNGRVTSPIDENTFLSADLYLLESIELKKRTKHIVEIIEEVNWQDVDPDMLTSKFISDIVMSVSSSMSMRERSSESARFEILNDEYSAIILNNENSSIHIDAVLDPLSPTSQKLSGILRVLWKYIQPSMRIVLNPLSSLADLPLKNYYRYVVPSMDDFSNIDSSINGPKAFFANMPLSKTLTMNLDVPEPWLVEPVLTVHDLDNILLENLGDTRTLQAVFELEALVLTGHCSEKDHEPPRGLQLILGTKTSPHLVDTLVMANLGYWQMKVSPGVWFLQLAPGRSSELYIFKEDDDGSKNKQSSKLITINSLRGKVVHMEVMKRRGKEHEKLLIPDEDEDLQDKKKGSSWNSNLLKWASGFISSNEQSKNAESNSPEDGRGRRHGKTINIFSIASGHLYERFLKIMILSVLKNTHRPVKFWFIKNYLSPPFKDLIPHMAQEYGFEYELITYKWPTWLHKQKEKQRIIWAYKILFLDVIFPLSLEKVIFVDADQIVRTDMGELYDMDLKGKPLAYTPFCDNNKEMDGYRFWRQGFWKDHLRGKPYHISALYVVDLKKFRETAAGDNLRVFYETLSKDPNSLSNLDQDLPNYAQHTVPIFSLPQEWLWCESWCGNATKSKAKTIDLCNNPMTKEPKLQGARRIVSEWPDLDFEARKFTARILGDDQEPIQLPIQSKDLTNEDSLKEDLESKAEL

SEQ ID NO: 3919 - protein, 1527 aa, Durio zibethinus
MGTGFRSRFFILISLAYLIFCGFNFVGAQNRRPKNVQIAIRAKWSGTPLLLEAGELLSKESKNLFWEFIDNWEHVAKTDGDSHSAKDCLKKILKHGSSLLSEPLASLFEFSLTLRSASPRLVLYRQLAEESLSSFPLSDDSYSNNVNGMDASEAIETKKSDPLLVGVNPKSPGGKCCWVDTGGALFFDIAELQSWLQRPNELSGESFQQPELYDFDHIHFDSNIVSPVAILYGAPGTDCFQEFHVTLVRAAKEGKVKYVVRPVLPSGCEGEVGLCGAVGARDSLHLGGYGVELALKNMEYKAMDDSTIKKGVTLEDPRTEDLSQEVRGFIFSKILERKPELTSEIMAFRDYLLSSAISDTLDVWELKDLGHQTAQRIVQASDPLQSMQEINQNFPSVVSSLSRMKLNDSIKDEIIANQRMIPPGKSLMALNGALINIEDIDLYLLIDLVHQELSLADQFSKLKIPHSTVRKLLSTVTPPESDMFRVDFRSAHVHYLNNLEEDAMYRQWRSNINDILMPVFPGQLRYIRKNLFHAVYVLDPATVCGLQSIDMITSFYENSFPMRFGVILYSTQLFKKIEGSGGELHSFALEHDSEIEDDKSSLIIRLFIYIKENHGTQSAFQFLNNVNRLRMESADSTDEALEMHHIEGAFVETVLPKAKSPPQEILLKLEKEQTFKELSQESSLFVFKLGVGKLQCCLLMNGLVFDSSEEALVNAMNDELPRIQEQVYYGQINSRTDILDKFLSENGVSRYNPQIIVDGKVKSRFVSLASSILGGESVLNEINYIHSVETVDDVKPVTHLLAVDVTSKKGIKLLHEGIRYLIGGSKNARVGVLFSASEDANSPSILLVKTFEITVASYSHKKKVLEFLDQLCSFYEHDYNLRSPAAAESTEAFIDKVYELAEANELSSKAYKSSLSKASALKLREHLNKVAQFLYRQFGIASGVNAVITNGRVTSLDAGVFLSHDLHLLESVEFKHRIKHIVEIIEEVNWQGIDPDMLTSKYISDIIMFVSSSMATRDRSTENARFEILNAQYSHDLDNILLENLGDTRTLQAVFELEALVLTGHCAEKDRDPPRGLQLILGTKNTPHLVDTIVMANLGYWQMKVSPGVWYLQLAPGRSSELYLFRDGGDDGSQEKSLSKRITINDLRGKVVHLEVAKKKGKEQEKLLISADHDNHSKEKRGHNGWNSNFLKWATGFIGGSEQSRKSDDSLVKHGKGGRHGKTVNIFSIASGHLYERFLKIMILSVLKNTRRPVKFWFIKNYLSPQFKDVIPQMAEEYGFEYELITYKWPTWLHKQKEKQRIIWAYKILFLDVIFPLSLEKVIFVDADQVVRADMGELYDMDIKGRPLAYTPFCDNNKDMDGYRFWRQGFWKDHLRGKPYHISALYVVDLVKFRETAAGDNLRVFYETLSKDPNSLANLDQDLPNYAQHTVPIFSLPQEWLWCESWCGNATKPRAKTIDLCNNPMTKEPKLKGARRIVSEWTDLDFEARIFTAKILGDELDNPEPVASSEPTSNDRTLEDLESKSEL

SEQ ID NO: 3920 - protein, 1441 aa, Candida haemulonis
MLLSPIWLLATAATAKSVSVKLHADWPEAPFAVQLIEAVSSYDDTLYASAVRALYQSGEEEEALEWDEDDDAFEDAGDAEGDALPKSDKDFYNAVAANLSPVEKGMADLNLVNKINTPRIETHYKHYKNDVEPALEAKVLKQCAQDSFGNAVEDPLGAWVKYGDRIYCSDADLYALQLSKVSEEAKAFDRVVGTADKKPLLVLYGSSSSPRFGQMFETLYQFAESDKLRFAWRYVPSGTEKLTSVPGYGVVVTPKVPLNGTKVSKVRYTGDLPKFLAEVRKQDKPLRALEEDRYHDLSVKITALVLEQPESTRHAVLEDILNNLPLYAPYINLIKDPVGLESVKTVAESNEKKGASDQSVGLYLNGASVHKLEMDLPHVIRKLETELRLVDEMKKLGFSTEQSKFIFSKFALMSAFREVQYRTGDRENRYAIYKHAYDPTDSTSGGVVYFNNLEKDDPYDLFDVNRREAYLGADARRLQFGQVPALRENSHELVFAINFSSSIQVKVLFTFAKIILDRNLPQQVAVVPLVDSDEDELVAEKFYHIMEVSEAKEAFALLYQYYEAPTQEEKQEILDKVEVPEEKKGTFKNYERTVREFSLDHPSVIINGVIHDMKSPWQAAMTKQMGSDVRLLQKKIKDGEDRGQDLKSVLFHDAKDSRNSRVSPRDLSNIRYKEVSKELIDNSYSFRKVTKPNDSPATFWLIGDFNSRIILSQFAKLLELLEVYSERSLEIRILNISEDSSLIDKLSKKYAKDSLTGDDIAKLRTEVSKARSKAYTKISPSKAKLLEKHQIQAHSPGMLFNSRYLKLNELYETPELTELVDFEQRRRLSIFKDLTDTYPDMFSWRGIMFFKKSGFDNFEWFDIMSSIVAKSFFLEDSQVQGDVDRFDFSALSFSNSLNLTKQRRDAPVDVLAIVDPMSDISQKIISMVGALKDLPFANVRILLQPLEAVSESASTSRFYGSAFVSSLPEFGKDGSFLGGNYAASFQALPSKYGFSSELDVPSRWLHVKDSTPNVDHEEFYPKDVEELNYKLDSLIVEGYAKDVKTAQSVATLTFDASNKDTIIDGIVMHTLGYVQLQLKPDIWSLRIQKGSTGSQIYNLLSASVNKYDTNDKTVEEVDLPVLSLHGEVIHPRLLEKSDKERAKAKKDVAKTNNADINVFSLASGKIYERFMSTMMLSVKKNTKSTVKFWLLRNFLSAEFVESLPKLANAHGFEYEFVTYKWPLWLRQQKEKHRQVWGYKILFLDVLFPNQLDKVIFVDADQTARTDLKELVNTDLKGRVYGFPPMCDSREEVEGYRFWKQGYWKTVLQEDLKYHISALFVVDLNEFRKHYAGDRLRTHYQKLSSDKESLSNLDQDLPNNMQRSIPIHTLKQDWLWCETWCSDESKSRAKMIDLCSDPFRKESKLERVQRSIPEWKDYDKQIQRLQNNEDGKSPVNVGHDEL

SEQ ID NO: 3921 - protein, 1574 aa, Serendipita vermifera
MKPSIGAIKTLLALTSLAVSTYASAPVTVGLRTSWPAHNLLLEILETAALEDSASFFPLLDTLTNPDEFTTPLPKLAPEAIYQATLSTIKAQGYLVDETEVKRFELALSLHVASPKLQAFYQFYEDKHLERGGKVLGGDGVAEQDCASWVDWYGTKICGADDLSNVLAREGLDSGKAKPKPNQAKLLPFDHIIPDPSSTIFRPARTAVLYGDLTSSNFRSLHELLLASATSMPPKIQYIFRHVPPPKVVADVKVKPKKQFLTGYGVGLDLKKMDYLALDDRRTKGSGSSEEVTEVSTEEAPAIDPIRELLDSLPPKDGEPINLSNPLTKEEFASLGVQAAQFILNSSKPIETLVQLSQDFPRYATELSKKVEIDPELQFEMAKIESMVPKGTSMLWLNGKVIDNHNDFNPFKLINLLRSERQIMQGFTDLGLTPGQAMEVLTGRPVFESFSQGSALDGIFDVSDREEGGDVIIWLNDLENDDRYSRWPKELESILAPIYPGSFHSVRLNLWNIVLAVDLSNRESLVWIFKHVSNIINRKFPFRWGIVPLVDTPEGEKAARIFYYVQKHYGPKEVMDFIRSLIAAQNEGDTLDFLIANAFFNNLGINVAPLLKLELDQSFSHDYDTVIEGQEPHSIEQLNKAKEWARRIDVKNQQGQLGHGFLSGKYYPLDETFLVNLQQELPLLLNHLQGEVAAGRLNSHNKDIRMSTYFYDLPSTPKRRNRYLFPNPETAPLKVHRLDTLFRHAGFEYPYKDLVYPYSSSPLVVTTWVIGDMDEASTMELIELTLTVLSKQKDFRLGLIHAPQRLPMSDATSTPRVSTLLQQLSGKYDNMSPDELLLRIKSGVPTPVHSGDYLDYCISGQLLAREIGFQPGDLGLLINGRVIGPIEPNVFQMADFEPMIAYEKRRRVDPLLNALTEAGKRYADMTSTAASIVAAVHIPDPTEAGLFKMPLRPRQRGYRQLAASHSRITLGDEQSALYHFVVLLDPVSEIAQRWSSLLLWLSRLDSVYLELLMVTDQTREELPLKRFYRSALWDRLAFSEDGEETPSLVSFQNLPEEPIYTLAMDVPPSWLVRPRESEHDLDNIHLASLSGYERITGVKALFDLDFLVIEGHARDVTTSSPPRGLQLQLKTNDLTPIADTLVVENLGYLQFKAKPGVFLLEIMKGRGEDIYQIESVGNGGWDSPPVNSVAGAEITLTSFEGLTLYPRFRRHRGQASADVLKPQREGFISSAVQKVVQAVSTWIQPPAEKPQADINIFTVASGHLYERFASIMISSVMKNTNSTVKFWFIENFLSPSFLEFIPHLAEEYKFEYELVTYKWPSWLRSQREKQRVIWGYKILFLDVLFPMDLKKVIFVDADQIVRTDLQELVDLDLHGAPYGYTPMGDDNTEMEGFRFWKTGYWKDYLRGKPYHISALYVVDLVRFRQLAAGDRLRGHYQQLSADPNSLANLDQDLPNNMQFEVPIFSLDKDWLWCETWCNKDRLDKAKTIDLCQNPLTKEPKLSRARQIPEWSQYDAEIAAFARRLVKEGKIGSSALSAEVDALAGEKQKPATPNMSTEGEEGVPKEESRMQHEEL

SEQ ID NO: 3922 - protein, 1481 aa, Wallemia mellicola
MLGRSVFLTALLAFASADIHAPPPISVDVQASWNQPPYCEIAMEIAHKLEPGILNKLLPKVDCSATPEEIYSKTRQQVKKSKQSLFDLHIALESSSPAIVAAYNVAEDAGFYYDPSCPNFVVYQGRKLCDVDEIDRLDQQAWPESDTFYTTGSTLDHVLSEPTSEDPPIIIHYADPTAENFKPFFDYFIKRSKRLQYILRWAPTRDHSFRPQKLSGWGVKMDLKKREYLSHDDRVNAEKINNIQTNVASDMSDEEYGVLQPFLKEAFTKPLQTIETKEDIRSLSGNLIALLQKSDNPLGLLTAITQNLPLLAPQLAETDLDGSNDILKELSYNQEKYIEAGQNAVWLNGRRLYDVDIEPFSLLRQLENENKLIDSISTLGFSKSDAIKLLNHRALYAAQVTRPDSIAEGLVDASDRIEGGDVVRWINDLEKDEQYRNKSWSPYLRSLLSPLGRVARNYINCVLVVDLSKNEAIEMLSRNVRAFIDRGIPVRWGVTPYINSLNDDSLMATKLFYNLIDKRGVKTCLDYFSDIAIRTGTFAERAEAAYLDLPILNDVPLQDEFDTVMEDMAKNKILKKAQKYARRLGVSPGEHEIDFIGEIFVNGRPIMFDDRLILSLQEHISAQTDAITKAVYKAEIDERSDVSLYFYDKPSTLKRRNKYLQPSSKIMNYVHSESDFFETTFVVPDTPERIDVTIWLVSDFNKPESMELIKHALSGMIVSPTFRLGFVHNPSELETPTGSISQTIKGLPERVSPLEFFEALQDRGEIPEDAEGMEGASEWIYETDIEPGESGLIVNGRVIGPIPPNGLEEEDYSHLFQYDYAERVLPIVTALEEIAPHRLKGNVDDVANLLTQLGSQLWKNIQNEQPEGIYEPPHTPRARVLERLHSKHTSIRLGKELSSQYSLDVILDPFSEQGQKWSKILHAIAEAGDTYIRIVFNPNLDSDKIAANRFYRFNMHAKPRFDENGHVIDYATKFSQMPVDALFTLELDPPQAWLTRPVYAPVDLDNLNLATAPYKNLNAIYQLDKLVVDGHARDSRTSLPPRGLQLSLKDTTIDTQVVANLGYLQLAVVPGRWELEIREGRGRDVYELESIGSAGWNSPSVKEGLKDFIVDSFEGVKLYPRFLKKPGMEGIDVLSEQHEDGLLPFVKQSITSLKSFFGLRSKSEHADINIFTVASGLLYERFASIMILSVLKHTDHTVKFWFIENFLSPSFIEFLPHLAKEYNFKYELVTYKWPSWLRPQKERQRMLWAYKILFLDVLFPMSLDKIIFVDADNIVRTDLKELIDVDLHGRAYGYPPIGMDRQEMDGYRFWTRGYWKDYLRGRNYHISALYVVDLKRFRQMAAGDRLRGQYQGLSADPGSLANLDQDLPNNFQTEVPIHSLDKSWLWCQTWNSDESLADAKTIDLCNNPMTKEPKLERARKIPEWTDYDRDIQDFSAKLASEKLIKSLLVTETEDLAQGPKVTWEEKTEEGDIKNNHLKDEL

SEQ ID NO: 3923 - protein, 1156 aa, Python bivittatus
HLRESLELQPGEARLFLNGLPIDLDLRDPFSILETLKTEGKVMHILHSLGIKGDLPSKFMRLAAQAQDASYALDIRHSSIVWVNNIETDPMYNKWPSSFQELLKPAYAGMMRQIRRNLYNMVLFIDPLQEEAAGFMKLIEIIYTQKVPLRIGFVFILNTDKVVDGNEDAGVALWRAFNYVAEEVDIPQAFVSVINMYHEVKDGGVLSVDHVKRVLRRQFPHADMEEILGVDSDYDHKRKAGAMFYKKTGLGPLPQALFNGVPFNRKEMNIAELETSLLKIMDATEAFQRAVFMGLLNDHKDAVDFIMEQQNIVSHINDRILGDEKRYLNFESPSVPVDTNDYSTFSFLDSQDKTFVISENMNYVTRQDDALIYPVTIWIVADYDKPDGRQLLSTALKHLKTSSHIQLGIVNNPTSKITEDNTIIARAIMAAFLTQKNSNLKNFLGRILKDETAGALAAGTKIKKFFFPGMDNDALEKKYNTLGVDIIQTHQVFCHEVLKLLPGEMAVVINGRILGPLKEDELNTEDFDLLEKITLNTAAAKIKTLVKEMGVDNKRGSNLVMKVNALLSSLPITDDRQDVEFFKDQHSILKINPEQNEPYFDLIGIVDPLTREAQKLSHLLIVLGQIVNMKLRLFMNCRSNLSEVPLKSFYRLVMEPELSVGSNNFFPLSLGANFLEMPESPLLTLNMITPESWLVEAVSSPYDLDNIHLKDVDGMVSAEYELEYLLLEGHCYDVTTRKPPRGLQFTLGTRNNPVKVDTIVMANLGYFQLKANPGAWILRLREGRSEEIYQVFKHEGADSSEGLEEVIVVLNSFRSKIIRIQVEKKTDNDNEDLLNEVTTEEKEVSMTSSTGGTWKAEMEKKTDVLNIFSVASGHLYERFLRIMMLSVLRHTKTPVKFWFLKNYLSPTFKEVIPYMAEEYGFEYELVQYKWPRWLHQETEKQRLIWGYKILFLDVLFPLAVDKIIFVDADQIVRSDLKELRDINLKGAPYGYTPFCDSRREMDGYRFWKSGYWASHLGKRKYHISALYVVDLKIFRKIAAGDRLRGQYQALSQDPNSLSNLDQDLPNNMIHQVTIKSLPQEWLWCETWCSDESKEKAKTIDLCNNPKTKEPKLEAAVRIVPEWTDYDSEIQKLINRIRKEKRSRTLFHPKESKHDEL

SEQ ID NO: 3924 - protein, 1677 aa, Capsaspora owczarzaki
MRHSKIHTMRRLVAVLLPLLLLLAPATSCASSASPPVHLTLRAKWHATPLIAEASEYMARAGKFWEFLDTTVRLPFAAPSSSTGAAPTDRAMYAALVHAASEHITLTEIAVMEFALAMRYYSVAVDTQFQLASSHFAAVINRADSGADTAPRNPCDHDLAVVRPGVGIACRIADLDALLLGSTNAPNALAASVADTIFPSDHVFPAARGASAPIMTIILYASFESQLLGAFSTRLRELANNGQIQLVFRHLAPSTLASTTASVTRASSQPAQLSGYGVELAIKSLEYKAVDDSKISEALHKQSDLSGIETSDELGGFLFGRLREIYPDSQADLVKLREHMWKEINTLTELKQWELAELGLQASQTVLQSQDPLASLLDIARNMPSMYRPLSRMKLNSTVQDVIIAGSSKVGQLGFGQGTSALFLNGLSIPLDEDVFTILDRFDAETRAYNQLLRIGVPSEQIVSLVHLGVRPQPVPVVAVDVNSPAVIWINNLERDDVYARFPPLLRDMLRPSYPGQMKYVRKNVFHYLFVADLSSPTSYIGIAQLIDAVARMTPVRFGVVFVSGNELLGPNSSPFSIAMREEVSLGKGHVGSLLEVILRLFLHALDEHDRLAAMRFLHSINPTARQDQAVSLKAVRARYEEMGFDSEEFDTVILPTSGYNQAIGDWNDMVNQRGIYQYPATFLNGVYRPFDMVDAPGQMHQDYFQQLYPILMDIHHRVVHEQTDMYAHALSKNQAMARLSLRVIPTDEASIRFASYETTAAEHFLASVRWLYRNEVEHTGATSFSHLLVVSDFVAEHNLRLLRQAFTYLSTGHARKSSRMAVLLNPSRGDVDQVTVFWGLVMQAVSQSQAPVVAGEFAMILFQRLHEQLGGAAEIAHTLPEAVSLLSKVKNSKPDVFAKVFESLDDATFRAGLLSNNAHVQGMFDTSAGTTVIVTNGRIYGPISSADRLSWHDFKLIEENQTRESVRQLTSVVNGLTTSQDKSILLIRAHAVLGSFKGERSRIIGHVSAAPGAIETSSVIADPVLPKFHVVALVDPLSQEAQRLVPLLHTIRDALPVTMRIILTPVHKIDAIKVNRYYRMVLDPRVVFDAQHRMSNVPAAHFSGLPTAPLYTLAVDTPNAWLIGSVSCSYDLDNIRLSDVKTAVTAVFELEHLLIQGSCFEQSGAAPRGLQLIAEPLVADGAAKAKDTVVMETMGYFQLQLSPGVWRVAVRPGRPAEMYSIGFVAEDPNQQFLQLMSRGKQDVVLRTASTVYYPDAHVDSELVAAMTDLRGKNVVFLAQRRPAAVQQDLLYELYQASIAEQKEQRARRAEASAAAAAAAEAAAAAEAPATTAEEKPQEGGVWASFTNLLGGQKAADQKAEAADSEVAMIQPRMPDPNLETIHVFSVASGHLYERFLRIMLLSVVNNTRHPVKFWLIKNYLSPQFKESIHFLAEQFHFEVELVTYKWPAWVFAQTNKIRTIWAYKILFLDVLFPLGVHKIIFVDSDQTVRADLAELAAIDLKGAPYGYVPFCSDRREMDGFRFWDSGYWKTHLAGRPYHISALYVIDLIRFRAISAGDQLRASYQQLAPDPNSLSNLDQDLPNNMMHQLPIFSLPSEWLWCETWCSDEAKKRAKTIDLCNNPLTKEPKLAAATRILPEWPSYDVTIKAVLEQFEANQTAAAQPVVADSEPTESHTEL

SEQ ID NO: 3925 - protein, 1592 aa, Serpula lacrymans
MHYFLALALALFPFANASPPVSVQLRTPWLSPGPLLETIETISIEDPSAFFPLLSLLSTNPPDPNASPKTVHAHVLDLASPLLDGPARASVDALLVLHAASPRIAAFEQHFLARTHEQAVEDASGETCAAWVDWYGHVVCTVDGLKRAVSSISFEHKPQPRSLPFDHVYPSPHSQKPTAIFYASLTAPNFPALHHALVDLTQSAGIEYVLRWAVSPDPQSTRAHDKDALGASLSGYGVSLDLKKMDYLALDDRGRSASTGQGERDRWYVLYSRLSQLIRVHLHPAYTDLGLRATQLIYSYSSPSKREDDKSHENSVTASLSPLTLLRQLTHSFPLYATKLARKDLLDEHDAWAGHQPTGVLSPLFDSVRSNWEKVAPGTSLFWVNGRVLGEGEVGVFGLIRTLRKERSLVRALMQLGMSTREAVEVVVHDAHSRTGADGDYADKDITRRGKGGGVVVWWNDLGADARYARYSSSLSVLLRPLYPGQLPMTRFNLFNAILVLDLAQPRTLSFLAMSLEGIVARGWAVRWGIVPFVEWKEGEGTKMARLFYFVSEKYGRDVIIGFLKRVPAHVQTPTLSWPLVRMAWADFGMPDDFDSVVEGRVVASVGDEAEKDGGNVDTLHKARLYARRVGITDASGHAFVNGRYIGMSDAFLRDLQVEVTQQLQYLQELVYTSILTDSYVPTISTFFYDLPWTPARRNAHIYPLISSPASGGVQPAGSSARPLRMFSLPELPKVVGKGGFVTPREFPMYVIADFDSESGLALVKEALDFIQGSGPSSRVTFVHNPAPSTHSHSVSSLLSQLISKDVLATISPARLKRALGLDEAGSVSTPDESAQVALKADLLREYGVDGGEVVVAEDAYAGYVGSCKALARELRLLPGEQAILVNGRLVGPFDASEFMVEDFEMLETYEMRKRVGSVVVALEDVLGEKADDLDSSSYAHLVSTSSSLISAIQLPDPSEAGLFDTAPKPRSRKYKLLDGNYTSFEIGNADDALYHVAAVVDPLSETAQKWTSLLEWLVEFPGVYLELYLNPSQHSEIPLKRFYRYNLAPRLTYDENGLEVPAKVVFNGLPIEPIYTLGMDVPSSWLVRPREALYDLDNIQLGSLSPQDRVTGLEAVFALDYLVVEGHARETLLNSPPRGLQLQLSTPDGTPVDDTQVVANLGYLQFKAKPGVYELSIREGRGRDVFEMESVGNEGWESPRVEEVGSEVTVMSFEGLTLYPRLVRKPGMEMVDVLDELSYKEEETHGVIEDIVSRMTSLFSHKGEKSLQAQGDGQADINIFTVASGLLYERFVSIMILSVLRNTNKTVKFWFIENFLSPSFLEFIPHLAEAYNFQYELVTYKWPSWLRAQKEKQRIIWAYKILFLDVLFPMDLKKVIFVDADQIVRADLQELVDLDLHGAPYGYTPMGDDNYDMEGFRFWKTGYWADFLRGRPYHISALYVVDLVRFRQIAAGDILRGQYQALSADPNSLANLDQDLPNNIQQQVPIFSLHEDWLWCETWCNKDRLHRAKTIDLCQNPLTKEPKLARARQIPEWEEYDAEIARFARKLAEEGKIRASAATADTNVLANVGATPQAAESVGDNSEEARPRDEL

SEQ ID NO: 3926 - protein, 1305 aa, Trichomonas vaginalis
MLSFLLFSLATSTFRPDHEVVMSVVAPWDETPLFEHILFFMTDFSSEMATQFLRDIVKNHDQLNNETFIWETAFRILPKFHHAFLKSQISIGFYTPRGEMYREMARTKGGSNYNDLMIIGEKLNTFGILCHYLPSDDLDVQPFELQYGIPQSIVYANIYNKEVAEYVIKLIDENIPFSFRPTSKTGKFGVNLRGFGIEMRPFKYSMEYGVKDSIVLESSKEVSLHKDETTENITGIPESYYDLLKEDMFAEKFTSWLENHNDTSLVKRMRDFTNNYPLYINEILKTNISNSSIGSLDQLYRMRYNGQTLSSLNGRVLSLPNLDIFTLIDVINKERVSRQILTDEFKLNETQLDVIFKSYKEDSRSIFFDTRSKYVHYYNDVMTDPHFDDYTDDFSIFYTPLNQMPRVRRPLAQYVLYIDPTTNNGFTELYYATNLIEEGYTVNLGLVPYFNLGSKLSKRIAFAFHHIARNVNSSEAIQFLLDAHYVLGVDMDSRTLYPTSPATYKAAYQLHANSKCLKWDELYKLFAGSPELDAILDTISYIKNAQIAIPCSYMNGKKVETSNGMNVIYYHAQTAITELAGLIRRFRITKDDDFDVFDIISRRYFVAKSLNEEVLYSTPKSLKISTLTYDRQLEYIDLISKTKWDYSNEGRLTNYFFLFCNDSVDTTTFFDFAKRKRFNSAQFKVNPEIPKNLRSIFPSSNSTCSLVVNGRVYEDIDPNDFEFYQLADDWNTYFILDGLFALDQSVKRRRVECLAYSSSLIIDWMAQSVVRRHDSDDFFQVKNPMIYATQNSTSDIVWELVVDPLTREFQRIASIINWVEKNNLAQIRLCLVLPFALNDSLTTLTTYYRSALDEDIAVFTMLNDTTTYSAMPDMPMSWVYESMRASTDLDNILLSQLKTHSQEGVYVLTNILLEGNCQTSDYQTAEGTELAIENEMGERLSDTTSMMNGYFQLQANPGKFNIEIGGARSASIFELPKTTVIIGSFVNPVAKILLNYRPGKEGMKANNVTASGDFATTDRVDVFSVASGHLYERLMKIMMLSVRKRSTHNVKFWIVKNFLSPTFKATLPIMAEKYNFSYQLVSYKWPTWLRGQVEKQRIIWGNKILFLDTIFPLDLERVIYIDADQTVRADLNELMRMDFQGAPYAFTPMCNSRNETEPFRFWKQGYWLNHLQGKPYHISALFAIDLLKFRQMAAGDLLRYHYHHLSSDPGSLANLDQDLPNYAQHQIPIFSLPQEWLWCETWCSDETMAKAKTIDLCNNPLTHAPKLHIAQTRIEEWPGLDELARNISAGPDDYQYKFFKKQETE

SEQ ID NO: 3927 - protein, 1404 aa, Naegleria gruberi
MEGNIIVDGSFVSFKFSEFVYRNLLFSEYFSDKLPDRKTSFLKSIPCEKVDQIKNDRNAILTLAQQSKATVAEVSLLDFALDTRHYSPRVKVQYTKNTNIVKSNLNTIVPKNVEDIEVLDHTFNINSETQINFIYSDITTQEGCKFVKENIDSIKPIVLRLVRLDSTGSIDKEEMIKEKYMEEASSDLLSIRGYGVELQIKNMEYKQTADDDVVSGNDTFYKGVNFNKLKKNYPHLSNDLDTLKLHIQQSDSKSEKLKVWEMKYFGVQAMKKISDQPSFDEKIKMLQDISQNFPSYMKELKNTAFENSFKDQIQSHLSRYDGEFKSRNPNNPQEVIRRNALFLNGLELDLTKLSVFSLFETMDKELKLVKSLSSDYHLSSNSVESVLFTPSTASKDLRFKFSSELEKQVIWFNNIESDSYNNFPRDLKSMLHPTMYGQMRFVRRNLFNVVFILDPASTQKQVAQLLYILGNIMNRGYPIRIGALFIPKVSSGFVDVDLTGSSSASPETVDELSLHAVSLLERMAKENRAVFPILREFMDRESFDSQFVDDLQKRFFGSVRLMSQQELISRYRSFTNMGFDVKSSPIVMVNGAVIQGEEQDSGDQLVMKGVREQYDAVKNLIENNVVVDNDKNLLEKIINHYGGFDKFNSEIFSKKQYGIVSLGDIDQINFVQHPESGGVVKKTHIVCVGDNQDASLLVKEAISFISKNQKTRIGFLNVADSSFSSLAKYHVLYKPNGSNQLSGKNFCSKHFNAKESGIISMNGRIIPLTNLFTSKDITILDAFEDVNSAIISTIESNSYSTVDPDIVTSDYLSDVLFGVSSVLKVFNQYKRQDLNHVQSSSVATLETESNPSAEIKLIAILNPLSKFAQKISPLIRFVKEKLGKSVNVVVHLNPDLETSNLPLQSYYTYVLSGSSVAEFNTRFSDVKGRIFTMWMDVPESWLVDSTYAKEDLDNLKLDECASQKCYARFQLEYFVASGTCIDDNGRPVRGLQLQLVHNYGVNATNVDDTTLVMANYGYFQLRASSPNIYSVNLPKGRHSDIYSVQSTKQVDFYSQSELQHSDGYGSADTKKFLISVHSFDAPFARVVVKRNSGMEKEDLLAPTPSSGGWSSWLSSNSNQEKKTIHIFSLASGLMYERLLKIMILSVRKHLKRSDVKVKFWFLKQFLSPSLKQFLPEYAKAYNFEYGLISYQWPHWLHKQQTKQRLIWAYKVLFLDVLFPLQEVNKIIFVDADQVCRTDMSELFFDLDMQGKALAYTPFCESRKEMDGYRFWKTGYWANHLGGRPYHISALYVVDIDMFRRNYHGDQFRMVYDNLARDPNSLSNLDQDLPNYAQHNVPIRSLPQEWLWCESWCSDESKAKAKTIDLCNNPQTKEHKLASAKRIIPEWTDYDNEIKDFQKKLVVGK

SEQ ID NO: 3928 - protein, 1628 aa, Steccherinum ochraceum
MRSSPLFGIALLVCRSFASPPVQVRLHSSWPAPPVLLEAIETVSDNNPNAFFPLLHETTSEDSLLALQNSIPQELYQYVLDVALRQGYLADTSTTTLAATKMNLGLHSAIPKIQAFYQYYQDRHARRDADDCGSWVDWYGQVVCNAETLAHLAGVETIDASEGHGGDSNYDPPPLLPFDHVHPAVSQLSRPPRTAIFYASLSSSNFRSLHEYLFKASSGSSPHVEYVLRPIPPKDRDASKRSYLRGYGVALDLKKMEYLAVDDRRSSQNDASDTKTETDTSTEVDPIVTLLHQYPENSTADYTSALTSTELLHIGLQSAQLIYDSTNQDLEDASTPPTRDPINALKTLKQLAQYFPKYASTLARRVTVDAGLQSEVAQNGQKVQGGANAAWLNGVVLQEKDMNPFSLLRFMRKERGIMLSLLAQGLSSEQAITLLTHRTVGAAQSESGALDGIFDASDRPEGGDLIMWWNDFEKDERYARWGNTIRLLLRPMYPGQFPSIKLNLMNIVLAVDLSQTSSLNFIGTAVDNIINRSFPFRFGVVPIVETEEGLQMARLFYWLIENVGREKTMQFIQRIGQVDVPPQFLTYHVQWPLVRSEFSAVLTSLTPEDVQPDALSFDALKNTKLDDILKGTGTVGDTVVGAIESKVEKAKEYATRLGVSLEGGSQGSTFVNGKWFELNDEFLRNMQMEIGEQMQHLQAELYADTITDDDSASMSTYFYDLPSSLKRRNKHIFPSKKTGSLKILSLPDLNARFGLPLSEGAFVYPKAADREDEESEKEADIPISTYVIADLDSQGGKKLVREALESLASSHNARVTFIHNPSATPEDHQHPVSSVIGQLISSNALSQLTADRLLNGLPLADSLKNTEQGDEAVFQADDTLLDDLSLPISDSPFLKASSAVVHELQLKPGEQALVVNGRVVGPFADGDFAAGDIQALNSYEYRKRVQPVVQALEDIFGTLKNHTRESLATLIASASSIVSSIRLPDPSEAGLFNAPLRPRLRNYQLLGNDYTKYEFGRNETAMLHFGFVIDPLSEIAQKWSSIIEWLLNDPSVFVELHINPAKYRDLPLKRFYRYNLPAELSFDQHGAEAQSFAVFSNLPVEPIYTLAMDVPQAWLVRPRKAQYDLDNIQLGVIPASEQAQGVLAVFDLDYLVIEGHARDAVQMAPPRGLQLQLSTPDANEDSLAIADTQVVANLGYLQFRVKPGVFKLEIREGRGQDVFTIESVGNEGWDSPGVEEIGDEVTLTSFEGLTLYPRFKRVPGMESVDVLASEVKKEEESKGLLGDVLSGFSSMFSSKPPPPPSTEVIAVDHADINIFTVASGLLYERFASIMILSVLRNTNSTVKFWFIENFLSPSFLEFIPHFAKAYNFKYELVTYKWPSWLRAQKEKQRIIWAYKILFLDVLFPMDLNKVIFVDADQIVRADLKELVELDLHGAPYGYTPMGDDNTDMEGFRFWKTGYWKDFLHGLPYHISALYVVDLVRFRQMAAGDILRQHYQALSADPNSLANLDQDLPNNLQREVPIFSLPEDWLWCETWCSKDRLDRAKTIDLCQNPLTKEPKLARARQIPEWSEYDSEIARFAKQLAERGDIDSGIAAVDTTVLADQAAGVAKAKTPDTKEREEDEHVRDEL

SEQ ID NO: 3929 - protein, 1571 aa, Lottia gigantea
MVLKLLTSILIVIHTIVYVEGKAKSVNVALDAKWRSTPLLLEASEFLAKESPDYFWRFLQDVTNLDPKQISKESNQSLYNSIQKFAGRHLSPLQLNLLKLSLSLRAFSPKVQVYQQLGNEAVSSKKCSTFVNVQSEETCDVDKIVDLIKSAGDRSPPVVYSFDHSYPGPQQHKIKVILYGELGTQDFKQFYSKILNLIVDEPIHFIVRHFVQTPANVNVRLSGYGVELAIKSTEYKAKDDTKVEGMRESDNGSKDQDIEGEEVQGFIFSKLRERHPELKENLREFRHHLIDSETELAPLKVWQLQDLSLQAAERILSSDNKESLSVLTDISQNFPTQARSLVGTSVSSELKKEISKNQEVFERHHSLGVGESALYLNGLTIDLDVFDIFTVLDTMNSEAKLIEGLHSLGFKGDNLDKLLHIDLKSGDDTRYAIDIRHSAVQYLNDLENDRGYQGWPNSIQDILRPTFPGMLRHVAKNIFHLVFVVNPVEDKSKDLLKMAEAFSVHKAPIRIGIIFVTNQDEKATPKTDASMAMARAFNFIKLDQNPSKALSFITDVYEKASTADELTSDLIIKEFQSQFPGEDNDIVFGEDQDDYDDIRKAGLDFISRSGLSDFPQVLMNGVPFKKQFLSTDTFEEGVVTEIMTATPTIQKAVYNGELTDRENVLDWLMSKDNVLPRLNSRILSPEFKTLDLTENVDSSIFEDVSTFSRMTVKDMVAIVSDRMKYITKKGRFIKFELIIIIIDESSIRAVTLWLVCDVETPQGREIFYNAIKELKHSNEIRLGLVFNPASLTEDHIISRAIYVAYNTLGNNHAKSFITKLVKEENVAELKAGTKTLKDLEVHGMDMNKFMTDFNKQNKDFLKSYKSFVVKVLNFEENDRGVIANGRIVGPLGNDEMFTPEDFNLLEKFTLQQAAAKIREQIKTMDLDSKQGNELVLKTCSLLTGQPQIESRKKVQFHSDKHSVLKLSADESSPAFILEAIVDPVSREAQKLGPILMVLREIFNVEIRVFMNCRDKLSEMPLTSFYRYVLEPDVQFLSNGSLASGPEARFTSLPQKSLLTLNMNPPESWLVEAVRSVYDLDNILLEEVETGVSADFELEYLLLEGHCHDSNTMQPPRGLQFILGTDTQPAIVDTIVMANLGYFQLKANPGVWNLKLREGRSREIYDIQSHENTDSPDNSKDIITAIQDFKSKIIRVKVAKKADKQNEQLLVDDDKQSGLWDTLSSSLSGGGTNGEDESDKTLNIFSVASGHLYERFLRIMMLSVYKNTKSKVKFWFIKNFLSPSFKDFIPHMAKEYNFEYELVQYKWPRWLNQQKEKQRIIWGFVKVFVEISTNPIIFQFFFYKDRSFIVRTDMQELHDLDLGGAPYGYTPFCDSKREMDGFRFWKSGYWASHLAGRKYHISALYVVDLKRFRRIAAGDRLRGQYQGLSQDPNSLSNLDQDLPNNMIHQVAIKSLPQDWLYCETWCDPNTKKDAKTIDLCNNPLTKEPKLKAAMRIVPEWKNYDYEIKVLWDRIYGTNTRSQIEYNPPGVEAENIGWYTNLSICSSHSLISDLRSPTTVRERVCCGKRAMSY

SEQ ID NO: 3930 - protein, 1627 aa, Pyrrhoderma noxium
MRKSRRAKVVLCTCLSLVGCVTASPPVRVGLHTSWPKIPLLLEAIESISIEEPNAFFPLLNALVNSDTLPTLGKLSSEAIHQASLQTATELGYLQDPGAYASAELQISLHAAAPKVQAFYQFYKDQYSDSVPETNCGSWVDWYGERICDVDTLARVAGHETIDAEDPTSNNTYTRPKLLSFDHVTPDPSRIFQLPSRTAILYANPFSKNFQELHNYLYRLSSGRQPRIEYVFRHKPANSNSHQEKSYLSGYGIALDLKKMDYLVLDDRRAVNTENDGSSSQESLESDDDLILSLIEQYPLDDTDTSSPLSGEELKDLSLKATQLIVNSSDPLVVLKQLSQNFPKYASALSHHVVLNQSLVDEVQDNRLKVPGGINMMWLNGLSIQETDLTPLGLVRLLRKERSIARSLASIGLSPIQAVELLTNKYLAKSQSESAEALEGFFDASDRQEGGETIIWWNDITKDSRYARWNPSLTGLLRQVYPGQFHNIRQNLINVIIGLPLRFGVVPNVETEDGTKMAKLFYYMINTFGRAKTMNFLGHIGKIQASESFVDWTLIRNEYTKLKQGSDSTLSIAEFDSIFDGSIDESPSTEDEDSEEDKSQKDTEKTAVTLAERVERANAYIRRLDATQKSFPGGHAFVNGKHFDLDDSFLKLLQTEMNTQITIFQEKIYLGELGDANVDKIDTYFYDIPEAYSRRNRYVFPSSTINGLSGSARRDLRIVSLPEVFEKSDFTISPNSYIYPEGKEASTTIFVIADLDSESGVTIALEALKSLDAGLEARLSFIHNPVIETSRINDRRHHISPVISNLVSRGLLSNVPLNELKAILSLESSDYKDFMEALEQVAFSEDHGIKEILREAGSPTDGTKNSGAHEKYETASKLLLRDIGIAPGDLGLLINGRVIGPIEYGSFDDGDFATLVEYEKRKRTGPIIEALKNTSILLGDVSSYEYSEFISLASSVVSSVLLPDPSEQGLFNGNQRPRQTNYKQLADNYTSFSFGDPETSIYHFGILLDPLSETAQKWSSFLELVASVPYVYAQVYLNPGIYTEMPLKRFYRYSLPPRLSFNENGDETQAQIVFSDLPVEPIYTLGMDVPPSWLVRPKEAYYDLDNIQLTALSPEDKTSGLNAIFELDYIVIEGHARDVLTNAPPRGLQLELSSLDGSPIDDTQVVLNMGYIQFKAFPGVFQLDIREGRGRDIYLLESAGNEGWNSPTVSDAGTEITVTSFEGLTLYPRVRRRPGMERADVLDEFVIGDEEPEGILNDIASRIKSFFKSQEPEVKAIAPRQADINIFTVASGLLYERFASIMILSVLKNTDSSVKFWFIENFLSPSFLEFLPHFAEAYNFEYELVTYKWPSWLRAQKEKQRIIWAYKILFLDVLFPMDLKKVIFVDADQIVRADLQELVDLDLHGAPYGYTPMGDDNTDMEGFRFWKTGYWKDFLKGRPYHISALYVVDLARFRQVAAGDILRHHYQQLSQDPNSLANLDQDLPNNLQREVPIFSLHEDWLWCETWCSKERLHRAKTIDLCQNPLTKEPKLSRARQIPEWEEYDAEIARFARKLADEGKIRSHVSAADANALANAASGAGTPESHDKPVNREADTGEDKDIGRQSNAEFEGVNEAAGDEEQHRKDEL

SEQ ID NO: 3931 - protein, 1523 aa, Dinoponera quadriceps
MGVLIFFYTLLCLCSVQLRADKKINKYVTTLINAKWNETPLVLEAAEYFNDENPTYFWKFVDAFSKKTNGLAIATEKESYDIIMELAKNYLSESEIAVFKLGLSLRIYSARVEMFSQMAVNKNISSYACDSVVDIGGTFTCSLEDIDELLDSSQITEQDTWETTDTYNIDHRYLSTSETDKTIILYGQIGTPTFIEFHEKLKNIAETKGINYILRHYVKERANKKLCLSGYGVELQMKSTEYKATDDSDIKDNTGKSSEVTNDGVEEIEGINFMTLKKLYPEQHVELDKVQTHLLETSHEIGALKVWQFQELSHQAAERIMKSPSTESLNVLTDISQNFPMQAKSLIRTKVNSDMKKEMKLNQEIFMASLNIQPTDTALFINGLFFDLEAIDVLTLLESLRSELRVMEALHKIGFNNKKMSKLLALDLSGGMDSQNFAMDIRDSAINWINDIENDSRYSKWPPSLTELLRPTFPGMLRNIRRNLYNLVLIIDPLSEDSMPLIALAQSLYSHSAPLRVGFVFVTIYTTTVTGLTDAGVAVNNAYHYFADTKSTKEAVHFLAELGNYIGPYGLDVEDVKKTIKSRDSSANINYILGEESEYDVGRHLAGDFIKRCGFKKFPQALLNGIPLTPSQLNSESYEEAVLSTIMSQTPALQKAVYRGDVTEGDDVIDFLMNQPNVMPRLNERILKVDKHAWLNLIGTLPEDEDYTKWSNQDLSTYLMKKMQYFFVPRRTNTHHMYSFWVVADLKSLLGRQLLREAFIYVESNTDARIGVIINTKDDSDDSDLKSDINRIVLAALDALSPERAILYIRKVIKEENAALIANGNFDLENDAVAVLLKIQNSILQLHQHYVKSVLNLEPGARAILCNGRVIGPLDSDEEFTNEDFSLLERFSQSTYGAKLFMRLLKDQFFNDDEYEENDITDDMIMKIASLLVPRPQTRNRFDVPFHGDDHSVIKIPAANPDEVAFNFIAIVDPVSRGAQKLGPILKTLQQALNCNIKVFLNCLEKNSDMPLKSFYRFVLEPELQFTAEGDISGSFAKFTKLPTSSLLTQYIHAPENWLVEVVRSVYDLDNIKLDNVAIGVHSEFELEYLLLEGHCFEAVMGNPPRGLQFTLGTKKQPVMVDTIVMANLGYFQLKANPGEWVLRLRQGRSAEIYDFTTVDGQDAIQNGNDVKVLISSLRSHVLKIKVSKKPDKASMDLLSDNEKDSGLWNSISRTFATTDESEDQDEKLNIFSLASGHLYERFLKIMMLSVIKHTKTPVKFWFLKNYLSPTLKDFLPHMAEEYGFEYELVQYKWPRWLHQQTEKQRTIWGYKILFLDVLFPLNVKKIIFVDADQVVRADLKELATMDLGGAPYAYTPFCDSRTEMDGFRFWKQGYWRNHLQGRAYHISALYVVDLKRFRRIAAGDRLRGQYQALSQDPNSLSNLDQDLPNNMIHQVAIKTLPQEWLWCETWCDDASKRYAKTIDLCNNPMTKEAKLQAAIRILPEWVGYDEEIKALQQKVENENRQTEKDGETIEDAAKHEEL

SEQ ID NO: 3932 - protein, 1613 aa, Diversispora epigaea
MKFKYNLIKFVIWIINIIIAIDSLSLSSNAETPPVQIWLKTSWNAPQLVLEILESVSAENSTAYFPLVEEFLKQGLFSSKLTNYEIYKSALDIIEKKKFLYTPTTKSLFEFGLSLHTTAPTIQSYYHYYNSTIIPTRNSSNEEFNPDCDVWVDWYGNQACNVESLTRFIDTKLDISNPTPNLLSFDHIRKSKVNESEYMIILYADLSSPKFPEFFNFLNSGINNINVNYVLRYIPPKENQESLYLSGYGVELALKNTDYIVIDDRKVEAETDDVDKEKESINDSESSNDHLFDQNISEIKPLKAGEIKSLGVKTAQVILESQDPLKTLTQLSQDFPKYSHYISQVPLSHPLVKEIEMNQEHSHLESNLFWLNGLVMNPLSVDPFSLLKLLSRERQTISSFLNLGLNPGQAIGVLSSPIISESQSLQDSSRGVFDVRDISPNNNVVVWLNDIEKDSRYSSWPNRIQDLLRPVYPGQLRMIRKNIFSILFILDFLSPDNLDIITDQVKTFISRNIPLRFGLIPLFSKDQPDAIAISRIFYYIVDQFDSSIVMKFFEMIFEIRKSSKIEFLKTFEQEFNKLIKKEVSNNEKLVNSFEEIINGDNTLVEEQIHESSNFIKRFKINTNDRGVLFVNGKFFDLDEFYQRNMVQTVNELTVFLQQKVYLGEINDETDIYEYLLTLPNIPNRRNPYIFTSELQPLQVINLADDDDNGFSLIDNLKYIYSENDDKVPVTIILISDFDNVNGISQIIEALKYLKSTKNVRISIIHQSNQSSTKLDSENHFNPSTMIYHLLYEEEPITSNSSHFQNIFEEYLEHLEGNSRIGGDDDKQIPIGQSFYNLAHSSGWQIIENIKAEKFWQDLSDLKIFEKFEKDKTTIIVNGRIIGPFAQEDIFYEDDFQLLIDIELSERISPVIRVVDEYKLTKLEGNDYSNFMAKISSIISASSVSDVPMGIFDEQEHKRDISFMKLKGDKSRIKIGNAGDAIYNIMAVIDPISEIAQKWSTILMILSQMEGVYIEIYLYPRLHMEEIPLKRFYRYVLNPRLNFDSNNGTIIPSSAHFVNLPDDVLLTLGMDVISSWLVTPKSSIYDLDNIKLSNLDIKSRVKGIEAIFELKNILIEGHARDLTSNNRPPRGLQLQLGTNSYPSMVDTIVMANLGYFQLKANPGVWTLSLREGKSTDIFDIQSVGNEGWLSRNISEIGNEIVLNGFEGLTIYPRMIRKSGKENDDVLKTENDNDNDGIWDYLKHKFTPKKDEKKKAEINIFSVASGHLYERFLSIMILSVLQHTNSTVKFWFIENFLSPTFKDFIPHMAKEYNFEYELVTYKWPHWLRAQTEKQRTIWGYKILFLDVLFPLDLDKVIFVDADQIVRTDLKELVDMDLQGAPYGYTPFCDNRPEMDGFRFWNHGYWKDHLRGKPYHISALYVIDLQQFRLMAAGDNLRGQYQALSVDPNSLSNLDQDLPNNMQHLIPIFSLPQDWLWCETWCSDESLTTAKTIDLCNNPLTKEPKLDRAKRQIPEWESYDKKVADLAARISQQKDSILTSNEIQDQKIKETNDDGTNVDETDEVIIGDVTIDDETNYETDVVYDGTNDESKEKIIVEESTNVISSASPTTHRKDEL

SEQ ID NO: 3933 - protein, 714 aa, Sporisorium scitamineum
MYRLLAEGRTEAVSPTQVLEALEQAHSHPDVSVQQLEGALGLTASDANSNQKARHFWQSISPSITSKLAIPPGPAILVDSHLVTNLSPSTIDARDITALVEYEAGQTLPSLIQALHLLRPNLSDLPPHQRQNLIFASLSVLNGIHHQAGSSMFTSKAASRSGLPEQLGTGDHVFEVGNRAEADVRITVLLDPLSEAAQRWSSVLLMLRELEGVYARVILNPQIKLRELPLKRFYRFSAPRALKFSEGRVVAPELRFFDMPEDAVLTLGLDAPAPWLTMPMEAVYDLDNIRLADVPSGSRGKGVKAVYELKHLLIEGHAREERAGSAVTVPRGLQLLLETPDEGTRLDTIVMANLAYFQFKAQPGLWKLRIRGGRSDELYEMQSVGSQGWNSPTVEVTGQHVVLDTLSGGHLYERMTYIMILSVVKHTSSTVKFWFIENFLSPSFKEFIPHLAVEYGFEYELVTYAWPHWLRSQTEKQRTIWGYKILFLDTLFPLDLGKVIFVDADQVVRTDLQELVDLDLEGHVYGYPPMGDDSEDMDGFRFWKQGYWKDYLRGRPYHISALYVVDLHRFRLFAAGDRLRGQYQALSADPNSLSNLDQDLPNNMQSSLPIFTLPKEWLWCETWCSNDWLDRAKTIDLCSNPKTKEPKLERAKRQIPEWTVYDGEVGRLAQRLVEEKVGKSVVAPDSQVETKSGNTQQQAADANANADAHVHDEL

SEQ ID NO: 3934 - protein, 749 aa, Castor canadensis
GILNDQVNAIDFLMDKNNVVPRINSLILDNKQQYLNLISSSDKSAVIAKNMYYLNQEDDAVAVVTLWIIADFDAPSGRKLLFNALKHMETSVLSRLGIIYNPTSKINEENTIISRGILAAFLTQKNSLLRSFLWKLAKEETATAIYSGDKIKTFLIEGMDKNTFEKKYNTVGVNIFRTHQFFCQDVLKLHPGEIGVVSNGKFFGPLGEDFCVEDFYLLEKITFSDVVEEIEDIAKSIEVNSKNISDLVMKVDALLSSLPTRASRYDVTFLKENHSIVKINPQESDEFFDVIAIVDPLTREAQKMAHLLVVLGKIINMKIKLFMNCRGKLSEAPLQSFYRFVLEPELMSETNNSPSPGPVAKFLDIPESPLLTLNMITPEGWVVEIVQSNCDLDNIHLKDIERAVTAEYELEYLLLEGHCFDTTTEQPPRGLQFTLGTENKPVMVDTIVMANLGYFQLKANPGAWILKLRQGKSEDIYQIVGHEGTDSQSDLGDVIVVLNNFKSKTLKVQVQKKPDKVKEDILTDKYERKGMWDSIKSFTRRLHEDDQKNDVLNIFSVASGHLYERFLRIMMLSVLRNTKTPVKFWFLKNYLSPTFKEVIPHMAKEYEFQYELVQYKWPRWLHQQTEKQRIIWGYKILFLDVLFPLAVDKIIFVDADQIVRHDLKELRDFDLGGAPYGYTPFCDSRTEMDGYRFWKTGYWASHLSRRKYHISALYVVDLKKFRRIAAGDRLRGQYQALSQDPNSLSNLDQ

SEQ ID NO: 3935 - protein, 1572 aa, Stemphylium lycopersici
MRASASTLSAKALLALGAFKHIGALASPSINVALQAAFNPAPYLVELLETAAEENATAYYPILDRVSEGYFDEKTTEQELYTAFLDLLYSDGHITQPEALASLELALSVRSAAPRIESHYQFYKTSVEPSLVAEQTKACDIWASFHGKQYCSVHLAEPFGAIESERTYQLPFDRILGNSSALPVILYADITAPRFKKWHRTLSNTAKEGKTSYRLRHKPSSKSSASPLVVNGYGVELQLKRTDYIVIDDRQAEEGDENTAQKPMGSGLNDEEEVADLKPLSKDEVSDLGLKAASFVTQSEQPMDTLMKLVQDFPKYSSIIAAHNASDAFVDEHTKNREQLLPTGYNVIWINGVQIPARDVNPYSLLAHLRRERKLINGIRNQGLSGPEVISLLSHSAIADTQTANEPQRYDFRDAAEGGNVIVWLNDIENDDRYESWPTNLRALLQRTFPGQLPSCRRDIHNAIVSVDLTSPEDVTTVLDTVWSLIRRGIPLRWGIVPQTRTPEALEQAKIVYHIQDVYGMSAVEVYLQASRDGKKLAQPDKSIFDATVKTSTLRDEHTSLSFEDVLGSEEIGQRIAGAKQYLSRLAAEGPKAPVFVNGVPIPANDEWLGTISQRIGMDLRQIQKAVFEGALTDESWVPQQFLFQAASRRNPLIIPENEKNVTLVNMAEFEEVNGNIYSKMPRIYASESASKSDWVHITLVADFDSENGFALLKAMANFREANPNVEAVLIHNPQVGAEQSRFSEAVLKSFVESGHKLPIETMLELLARDPSHEPIPATSTLFWKAAEPIYEAFGLQPGQHGLLVNGRFVGPIPKDYEFSQDDMETLVSFEANKRIEPLNKALEDLQLLGKIESPFDVAKIQSLVALSTVSDVPEGIFETASTLRMSTYKNWTAEHTAIVKGDQEKAVFQIVVSVDPATELAQKWVPILKTLSDMEGVHLKLFLNPRQMLQELPVKRFYRYVLEARPHFNSDGSVGSLKAHFSGIPKEALLNLGMDVPPSWLVAPEESIYDLDNIKLSTIPAGTNVDAVYGLESILIEGHSRDTTNGGQPPRGAEVVLATEKDPHFADTIIMANLGYFQFKANPGFYNIQLKSGRSQEIFNLDSAGPISWAPQPGDETTEIALMSFQGATIFPRLSRKPGQEETDVLAPEESLTSELVGKTSQKVNKFLGKMGLNFDSEKVFQKGADLLSGGKVVKKGTQADINIFSVASGHLYERMLNIMMLSAMKHTNHTVKFWFIEQFLSPSFKSFLPHMAAEYGFEYEMVTYKWPHWLRGQTEKQREIWGYKILFLDVLFPLDLEKVIFVDADQIVRTDMYELVQHDLQGAPYGFTPMGDSRTEMEGFRFWKTGYWSNFLRGRPYHISALYVVDLNRFRQLAAGDRLRQQYHALSADPNSLSNLDQDLPNNMQFNLPIHSLPQEWLWCETWCSDEDLAKAKTIDLCNNPQTKEPKLDRARRQVPEWNVYDEEIAALARRVKGEQKLADLVDVQEQEQLREKKEKDAERIEHNEFKSDSELTCLGHDVQRSVTSSTLIGQDLNTTEGPIEPSFPRAMSMIGNPPYAVITLKRCTSRKRR

SEQ ID NO: 3936 - protein, 1410 aa, Cyberlindnera jadinii
MREFLVFLLTLGYGLAQISIQLVANWEKSPFELLLLETVSSENESYFIPALSKVSNVLFNEEDDDEADLSAIDTRSDEKLFNEVFDLLTPEERSLYEIPLATKYYSPRIVAHYKYYNETILPKFSDILRKKCGEIPQTWLELNGVVYCEPDDVYALQIDKEGNFDQEPFDRVIGDRGPVLALYGTVSDPKFPQFLSTLYQSSLSGKLRFVWRYTPQPHTQRELLSGYGVDLTLKRTDYIVIDDRELTGSEPQIVLKDDKLLDDQTDTFLDTYDNDIKPLAKGELSSLDLKAASFVLDSKSASDAFNRLLKLTQDLPKFASYLSDQEINEDIFAQMEYNEKLGITSSSTGIFLNGAPLNSVRSNIFDLYKQLKTEMKFIELLKELDVDLTDAKNVIGKFALLSAYGSQSRGIKRYKIPQGLEGAVVYLNDIEKDEVYSEYSTNVGDFLKRFQFGEIPDVKANLHSAIFVMELSNKEDVSNFIHIVDSITRDQLSQHIGLVPLIKSKEDRSLANQLYKIYRTGTREDILEFLKYLKKEEHYDDVDYVSTLVEPFVQNFDVKRPCVIVNGVFYDLHGNWASLMSRQVFADNNFIAGMVYQRSVATLKDIKEKLYEDSLESRNLLLVPSNDADVSQVIITPEFVRQCEHQFSNVVFTFSETSHGSITPTLTFGANFGSLYALEQLSEILKSLDESKIALRVRLVHTGADVSFIGKLRQASHASLKHLSETVNSIINEHQFNNDEEPLSSTKYLLDSIGVDSQSFILLNGRYIDLKGTIARAESLKSFYEYEMTTRLKNAINLINTIEIEKDGDISDWFESFSSVLSASYFNGENRITRFDFSRLQTDPSIKFGDKKESLVNILAVFDPINEYTQKLLPLVGAVKDLPFVSVDIVLVPQEDLAELGIKRFYRGNIPKGVSFKNGSFVEDSVVTFNNVPEDTLFTLDMDVHPSWIVMAKEGATDLDNVLLKKTGTVTGIYELENIIIEGNLFDYTNEEPPAGLSVSVPGSDTNVMMAEGYFQLKANPGLWELSLMDGNSRTLYTFVDPNTKAPVSNVDVDILTIDGVKIRPQVKKNPGKESISLNDLVTGEESKGGILSSWFGGKHTTGKHADINIFTVASGHLYERLLSIMTVSVMRHTKHTVKFWLIDNYMSPTFREFLPYLAEQYGFEYELITYKWPSWLRGQREKQRTIWGYKILFLDVLFPQSLDKVIFIDADQIVRTDMNELVTLDLEGAPYGYTPMGDSRKEMEGFRFWKHGYWEKLLGDDLKYHISALYVIDLKKFRSIYAGDILRQQYQILSADPESLSNLDQDLPNSLQRTLKIFSLPQDWLWCETWCDDASLKTARTIDLCNNPLTKEPKLDRARRQIPEWTVYDDEISALRESAFKRNFEAQLLEVSSRQIGSDPAPIEVHDEL

SEQ ID NO: 3937 - protein, 655 aa, Camelina sativa
YWFSFCRTCSKYFSDVFMFVSSAMATRDRSSESARFEVLNSEYSAVLLGNENATIHIDAVIDPLSPTGQKLASLLQVLQKHVQTSMRIVLNPMSSLVDIPLKNYYRYVLPNTDDYSSTGFDVDGPKAFFANMPLSKTLTMNLDVPEPWLVEPVIAIHDLDNILLENLGDTTTLQAVFEVESLVLTGHCAEKDHEAPRGLQLILGTKNKPHLVDTLVMANLGYWQMKVSPGVWYLQLAPGRSSELYVLKGGNDGSQDQSSLKRITIDDLRGKVVHLEVVKRKGKEHEKLLVPSDDDDGVQQNNERRSWNSNFLKWASGFVGGRQQSMKGDSKKEHEKGGRQGKTINIFSIASGHLYERFLKIMILSVLKNTNRPVKFWFIKNYLSPQFKDVIPHMAQEYNFEYELITYKWPTWLHKQKEKQRIIWAYKILFLDVIFPLSLEKVIFVDADQIIRTDMGELYDMDIKGRPLAYTPFCDNNREMDGYRFWRQGFWKEHLRGRPYHISALYVVDLVKFRETAAGDNLRVFYETLSKDPNSLSNLDQDLPNYAQHTVPIFSLPQEWLWCESWCGNATKSKAKTIDLCNNPMTKEPKLQGARRIVTEWPDLDLEARKFTAKILGEDVELNEPVAAATDKPNPPPSNDISEDSEQDLESKAEL

SEQ ID NO: 3938 - protein, 1633 aa, Glycine max
MGCLWRSRCWVLIVLVLLNIGSAFADTPQRPKNVQTALRAKWSGTPLLLEAAELLSNEKKDLFWDFIEIWLNTEKDAARSEAAKDCVKKILECGRPLLREPLKSLFEFSLMLRSASPRLVLFQQLAEESLASFPLGDENYSDDETEEKLLTEKKIERRKLDPLHGVNLKIHGGKCCWVDTGEHLFLDVHELLAWLQGSVELVGDSFPRPEIFDFDHIYYELSVGSPVAILYGALGTNCFKEFHVALVKAAKEGKVKYVLRPVLPAGCESKINHCGSVGAGESVNLGGYGVELALKNMEYKAMDDSTVKKAQLRIAGVTLEDPRTEDLSQEVRGFIFSKILERKTELTSEVMAFRDYLLSSTVSDTLDVWELKDLGHQTVQRIVRASDPLQSMQEINQNFPSIVSSLSRTKLDDSIRDEIMANQRMVPPGKSLMALNGALVNVEDVDLYLLIDLIHQDLLLADQFSKLKIPQGTLKKLLSTSPPSESSIFRVDFHSSHVHYLNNLEEDAKYKRWRNNLDEFLMPVFPGQLRYIRKNLFHAVFVLDPATRCGLVSIDMIISLYENNFPVRFGIVLYSSKFVMQLENHATKEHSDEDISTTIICLFSYINENYGAEMAYRFLSNVNKLRIESDGNADDALELHHVEGVFVETILSKVKSPPQEILLKLYKNQKLKELSQESSKFVFKLGLSKLQCSLLMNGLVIDPTEEALINALNDETPRIQEQVYFGQIMSDTDVLAKFLSEAGIQRYNPKIISDSKPRFISLSMFTFGEESILNDIVYLHSPGTMDDTKAVTHLLAVDITSRNGMKLLQQGIHYLIEGSKNARVGLLFNANRSPNLFSLLFVKVFEITASLYSHKTNVLDFLNQLCSLYEKNYILSPPMEAESTQAFVDMVCELGEANGLPSKGYRSALLEFPAGEVRKHLTKVQNSLYRVLGLESGANAVFTNGRVTYPIDESSFLSADLHLLESIEFKQRTKHIVEIIEEVEWHDVDPDTLTSKFISDIVMALSSSMAMRERNSESARFEILNDQHSVIILNNVNSSIHIDAVLDPLSPTSQRLSGILRVLWKYIQPSMRIVLNPVSSLADLPLKSYYRYVVPTMDDFSNTDSAINGPQALFANMPLSKTLTMNLDVPESWLVEPVIAFHDLDNILLENLGDTSTLQAVFELEALVLTGHCSEKDHDPPRGLQLILGTKTAPHLVDTLVMANLGYWQMKVSPGVWYLQLAPGRSSELYILKEDGEGSYDKQSSKLITINDLRGKLFHMEVLKKKGKEHEELLLPDDNAQDEKKGSGLNSNFLEWASGFIGGNKLSKKAEKSSQEKGRGGRHGKTINMVSIASGHLYERFMKIMILSVLKNTHRPVKFWFIKNYLSPPFKDLIPHMALEYGFEYELVTYKWPTWLHKQKEKQRIIWAYKILFLDVIFPLSLEKVIFVDADQVVRADMGVLYDMDIRGKPLAYTPFCDNNKEMDGYRFWRQGFWNDHLQGKPYHISALYVVDLKKFRETAAGDNLRVIYETLSRDPNSLANLDQDLPNYAQHTVPIFSLPQEWLWCESWCGNATKYKAKTIDLCNNPMTKEPKLQGARRIVSEWPDLDFEARRFTARILGDDQESESILPPNQSKNLNSEDSSNEDMESRAEL

SEQ ID NO: 3939 - protein, 360 aa, Poeciliopsis prolifica
MMNEDLLSETSENKGIWDSIVSITGGGSKKDEGEKKKEDVLNIFSVASGHLYERFLRIMMLSVLRHTNTPVKFWFLKNYLSPSFKETISHMAKSYGFQYELVQYKWPRWLHQQTEKQRIIWGYKILFLDVLFPLAVDKIIFVDADQIVQADLKELRDLDLQGAPYGYTPFCDSRREMEGYRFWKSGYWASHLGQRKYHISALYVVDLKKFRKIAAGDRLRGQYQALSQDPNSLSNLDQDLPNNMIHQVAIKSLPQEWLWCETWCDDASKATAKTIDLCNNPKTKEPKLMAAARIVPEWVDYDKEIKEMLRQVQEPTPTPSLHQKGKGGGKGCPSTVLSCCINQTAAFVCYSSARLNLFHL

SEQ ID NO: 3940 - protein, 1861 aa, Chara braunii
MDSFHRVRDAVTLFDRVSLSSLSPSFYPSSSASPSASSSSSSSSSSSSPTLSARRLSGYGVSVLSSARCGPLAMAAMAVSVLIFAVTMMTVVIADGSPGVTYLPKGVQVSLRAKWSGTSLLLEAGEFVGATREDLFWPFVEEWIHGQPPPQSIGATGESLPADERCAAAMGGSVRRLLGPAFEPIFLLSLSFREYSPKLVVYRQLAWQSLRRFGFTSSSPSDDDATAAEDGGRSGRHVARPGPANSAAAKDRHRLDSSDPFPTNGSCCWVDVGGQKPLLDPAELDTWIERAKLGATVADEAEHLVEVHSFDHVISDGSSVAAVAVLYGAMGTACFEKMHAALSAAAREGYFKYVYRPVLPHGCGGDGGNCLLMGAGADVTLGGYGVELALKNMEYSAIDDSSVKKDVATESGKPTEDLDRAVNGFIFSKLLARRPEKAAELLTFRDHLMSAADIDDKINVWDLKDIGLLASQRIAQASDPLRLLQEINHNFPSVVSSLSRMKLNKTVSDEILSNQRMLMAGKNLLAINQAVIDLENLDLFTLMEIARKEIALGSQLSKLKLPREVMKQMMNLPEPSLDMVVRVDVRSDEFLHFLNDLETDAKYRRWGNNLFELLMPMFPGQMRYIRKNLFTAVYVIDPGSPKSLRAVDSIMHYYNNNVPVRFGIIIATGEVLSIVEEKGGAGGEAVVKKALQEENGTVSQSVSLMTARVFYHVVRNFGAKEGFSFLAKLNEVRGGEEGGDAPSAGADSEEEDDAISQEHLEEALRATLKRLLAKEKKEKVAADELIAELRGNLDYLDDVILSTLFAHRKGLDNAAIPCLVMNGLVFPSNQVLIAMNEELGRIQEKVYYGLISQKTNVLDRLLQEHGFARYNPVVLSSDGTKPKYVELASAAVEEKSILRKLRYLHHPGGDDEVKAISHLVVVDIERKEGKQLVLQALRHLASDVEGKSRVGILHNPRRTRDRTSAPGADDDPERPAAAAAAAAASLLPRILLAATSLPGQSAKLLPFLQTLLESSAVAELMTSTNKLQAEASVRDTLLDSVAAMAKSAGLRPDGLLKSLTDPTAIRDALQRIQEEQEFVKSLGIEPGLDAVVTNGRVLLLGRDCKQLTAEDFELLGKVEYSQRVSEVETLMEDLEWSDADPDDVTSEFLSTMIMAASSAVSSRTKTSETAKFEFLSDQHSAIVHQDDNSLLTVDAILDPISTTAQAITPLLILLRDWLHPSFRIILNPQTNLADLPLKNFYRFAQPLNKDLVSSLQDGAAARFINMPASRTLTMNLYVPEPWLVEPVVAPYDLDNLQLQKLDAGTMHVAFELEALMVTGHCFEEGSRDPPRGLQLLLGTKENPHIVDTIVMANLGYFQLKAAPGVWALRLAPGRSALLYSTVHADADNTLIPEKGDAGEEEVVSVRVVVSDLKGKVVRMKVKKRPGKETEKILWEEGDWNNEDEEQGATIARHGAGGSNKRGSSWSDWFLGLGGRKKEGSNLSSLEASSPEGLPPSSRRTGEMIHIFSVASGHLYERFLRIMILSVIKNTNRPVKFWFIKNYLSPSFKDLIPHMSREYDFEYELVTYKWPSWLHKQVEKQRIIWAYKILFLDVLFPLSLKKVIFVDADQIVRTDLGELYDMDLKGKPLAYTPFCDNNKEMDGYRFWKQGFWKDHLRGRPYHISALYVVHLAKFRLIAAGDHLRVVYESLSRDPNSLANLDQDLPNYAQHKVPIFSLPMEWLWCESWCGNATKAKAKTIDLCNNPMTKEPKLEGAKRIVAEWPALDEEQRIFTAKIERMYMQLQPDAELPEVDMKSPEEPASAPSSMLSEQSMEGEGQKGTTDSVVDTSTNGRSSCPSGVHQEEGKGSGSAVTRSSGERDEL

SEQ ID NO: 3941 - protein, 1569 aa, Vanessa tameamea
MKATGGIVFLIILAHVLFTFATNSDSLKREERKSKGVTTFVSAKWEVTPIVLELAEYLSGESTDLFWSYFDGINSLKTNLNTLETDKQVYDACIGVASSLLAPAQLRMAKFALSMHLTSPTVRMFDQIATHNGAKDVSCDTFVSIASRKICDNDALRDILKSSAKYDPEDHKLETYLLDHSYPSSDNKSLTAILYGELGMADFAAKHKILSGYADLGLINYIVRWNVKPRGKPKVRLSGYGVELQLKSTEYKSQDDTTPKESESGESSVPSAEEDENDPQNQIDGFNFGRLKNLFPALRTPLERFRRHLSETSEELAPLKVWQMQALSMQAAAAVIDAHDAGGDEALKVLTSIAQNFPMQTKSLIHVNVPRSFRDEVLYNQDIWASSLGLRAAEPLLLVSGAQYDAEEVDVLALLNALRDDIGPMNTLHALGLSKNFINKLMALDVGETYTWEEYGLDIRDTAITWLNDLESDERYRRWPSSFMELLRPTYPGMLRNFRRNIYNYVIVVDPTCPSSAPPLKLGETLLKHATPVRVGLVLAPPARAAARRAALALAVRAAFNYVAQEKNSNKEAFYFLTQLLQTAPEDGVDIDHIKEHLKKYASFSANLDDIISEDSEYNFGNQLAEEFVSKLGTDKYPQVLINGVPLWDDSATPVTSSVELLEEALVTALSRHTGRLQRSVFRGELADTDDAVDYLMKQPHIMPRLNRRVLSSDPSQYLDLSGVPSSTELFTEDKIHRLLHLTGRDALATALPILKYFSKPGKQEKITQTIWVIGDLNEKDTRELLRNALTFMRETGGARVAFIPNVDGTSSEDQSLNKVVLAAVTALDSAAATKYVVRLLEDEGCQERQDCEILPELVPLLHKYEWVLKGSRVLSVRGARLRAGARALVHNARLVGPLARGERFSLDDFVLLERYSNQVYGDKLSEVLNKKNTVSKNDVDEDDDAVELSTEKYLQVVAVLSARSPRARTALPAGLRAEHSVVDLAPLYDDEAAVEIVAVVDPASTAAQRLAPLLLVLRRVVNCRLRLFLNPQDKNSDMPLKSFYRYVLEPELQFSSSGALGAGAAARFSRLPHAPLLSLELRTPPNWLVECVKSVYDLDNIRLADVDSVVHSEFELEYLLLEGHAWDTNLGTPPRGLQLVLGTRDKPETKDTIVMANLGYFQLKANPGAWTLRLRPGRSDEIYEIVGHENTDTPAGSDDIQVLMSSLRSHVIKLRVSKKPDKQNLDLLVENDEKNTGGIWNSIASSFGGGEDQETQDETINVFSVASGHLYERFLRIMMLSVLKHTKSPVKFWFLKNYLSPSLKDILPYMAQEYGFQYELVQYQWPRWLQRQRDRQRTIWGYKILFLDVLFPLHVKKIIFVDADQIVRADLKELVDLDLAGAPYGYTPFCDSRKEMEGFRFWKQGYWRNHLQGRSYHISALYVVDLKRFRRIAAGDRLRGQYQALSQDPNSLSNLDQDLPNNMIHQVAIKSLPQEWLWCETWCDDNSKQYAKTIDLCNNPMTKEAKLSAAMRIVPEWRHYDDEVRALQARVRRGLYQHADGEQEIDANHEEITKTGTTSDDEHKHTEL

SEQ ID NO: 3942 - protein, 1493 aa, Cimex lectularius
MEFKSLFLLLLINLNHAYSKKKPKSVTTVIDAKWEITPLALEMAEFLADENPSLYWKFVNSLSSLEPPLVDEKTDKDYYERALGLLDPLLSQPQISLMKFSLSLHVYSPRVEMFCQIAKEKGVVCPAAVELGGELYCDYDEFQNALTEGVKSSNVTSNLIRLDHKFLKGDKGPLTILYGEIGTPEFAKFHKLLSQKATDNELQYVARHWVKERQPRKLRLSGYGVELQLKSTEYKAQDDTKVESGTLEDAEEDEDEEVEGFHFSKLKFLYPDKTQNLDKFRQELLESSSELAPLKVWQFQELSLQAAQRIMSAPKEEALNTLSFISQNFPSQAKSLVKTTVNQDFKNEMRKNQDRFTSSLHLQPSDTALFINGMFFDLETQDIFSILEYIREELRVMEGLNDIGIFEKKVFKSLLTLDLSSTGVDFGLDIRDSAVLWINDIESDKAYSRWSSSLLDLLRPTFPGMIRSVKKNLYNLVIIGDPSKNDVIPLVKLMQSFLVHNAPLRLGLVFAIDYKKNGLEDAGVAMLNAYNYIAEIKDNSQALNFLTDIYAAVTDDIKPEDVHELLSVKFPGHKKDEIFGPDSDYNTGLKLSAEFVEKSGLRKMPQVLLNGVPLPEKSLTSEDFEEAVLSEIVNQTPILQKAVYKGELSDTDNVVDYLMERPNIMPRLNERILTTTKSKYLSLTKFTDQSILDLIDKHLFYGSSKKGQGKRSVHFLSNWLIVDLTTEQGRNLLANSLEQIEGNSKVRTSLIINQKEPGYKNINKIALSVLMQGSEKVGSTLRQILNDHSLIESGSKTFSDYGVKEVDEPKVEWVLKFHAQFVKDVLDFQPGKHGVVSNGRVLGPFEPHESFTQDDFGLLERFSSTSYIDKIYQAILKNSEDLESVTSDMLMKAVSLLASRPESKSRFEVNSFGEEHSVVKLPPASEGSAFSLVAIVDPVSSGAHKVGTILSVLQQVINCDIKIFFNCVEKNSDMPLKSYYRYVLEPAIQFTPLGQLASGPMAKFSNMPGAPLLTQNMLVPDNWMVESIASPHDLDNIKLDQVNSNVHSNFELEYLILEGHCFDSLLGTPPRGLQITLGTERSPTEFDTIVMANLGYFQLKANPGEWTLRLRHGRSAALYDIIGYGHAGVDYPVNSSEIKILLSSFRSHTIKLKVNKKPDKTNVDLLGDEEEQQGLWGSIASTFGGSGDNGENKEEVINIFSVASGHLYERFLKIMMLSVLKHTKTPVKFWFLKNYLSPTLKDFLPRMAKHYGFNYELVQYKWPRWLHQQTEKQRIIWGYKILFLDVLFPLDVKKIIFVDADQVVRADMKELVDLDLGGAPYAYTPFCESRTEMDGFRFWKSGYWRNHLQGRKYHISALYVVDLKRFRRVAAGDRLRGQYQALSQDPNSLSNLDQDLPNNMIHQVAIKSLPQEWLWCETWCDDESKKVAKTIDLCNNPLTKEAKLTAAMRIVSEWKDYDNEIKEVLLKIGETEDHEEENIEPVPKPTPDVHSEL

SEQ ID NO: 3943 - protein, 1555 aa, Drosophila serrata
  MOD_RES (71)..(71): Any amino acid
  MOD_RES (227)..(227): Any amino acid
  MOD_RES (1389)..(1389): Any amino acid
MLRAASMCVSVLGLLGLLAAPSSAESSQSYPITTLINAKWTQTPLYLEVAEYLADEQAGLFWDYVQGVTKXDTALNEYDTESQQYNAALELVKSHVSSPQLPLLKLVVSMHSLTPRIQTHFQLAEELRSGGSCQGYTFVQVGTELACSFNELQKKLDLPLAKDSLDAPVVTYSFDHIFPGSENNTRTVVLYGDLGSSQFRTYHKLLEKEANNGKIRYILRHQLAKKXTRPVRLSGYGVELHLKSTEYKSQDDAPKPEAGASSDEDLANESDVQGFDFKVLKQKHPTLKRALDQLRQRLLQGNDEIAQLKAWEFQDLGLQAAAAIAEIQGDETLQILQYTAHNFPMLARTLLAHKVTDALRAEVKHNTEAFGRSLNVAPPDGALFINGLFFDADTMDLYSLIETLRSEMRVLESLHSNNVRGNLASSLLALDLTASSKKEFAIDIRDTAVQWVNDIENDPQYRRWPSSVMDLLRPTFPGMLRNIRKNVFNLVLVVDPLQPTARSVIKLSESFVIHQAPIRLGLVFDARDASEDNREDYIAISCAFNYVSQKKDARAALSFLTDIYASVGETKVVTKKDIVKQLTKEFTTLSASRAEEFLEEDGTYDYGRELAAEFIQRLGFSDNKGQPQALLNGVPMPSNIVTADSDFEEAIFTEIMSHTTNLQKAVYKGEMTDSDVAIDYLMNQPHVMPRLNQRILSQEDVRYLDINGVAYKNLGNVGALNRLSNRDMTATLMENLKYFGGKKSTEQIGRSSLQFLTIWVFADLDTEEGRSLLTHALEYVQSSESVRLAFIPNTESVSAKSDKKNLNRLAWAAVQSLPEPSQATELVLKWLKKPKEKIEIPAQLEDILGSTELHLKMLRVYSQRVLGLTKSQRLVIGNGRLYGPLAAEETFDSADFALLARFSSLQYGDKVRQVLKESAQDVREEFTSDTLLKLYASLLPRQTKTRFKLPTDLRSDHSVVKLPPKQEKLPHFDIAAVLDPASRAAQKLTPILILLRQVLNCQLNLYLIPVPQHSDMPVKNFYRYVVEPEVQFESSGSRSEGPLAKFSGLPANPLLTQQLQVPENWLVEAVRAVYDLDNIKLTDIGGPVHSEFDLEYLLLEGHCFDAASGAPPRGLQLVLGTQSQPSLVDTIVMANLGYFQLKANPGAWSLRLRDGKSSDIYGISHIEGTNTHHTAGSSEVQVLITSLQSHVIKLRVAKKPGMQQAELLADDNEPAAQSGIWNSIASSFGGSNGNQAVTDEDTETINIFSVASGHLYERLLRIMMVSLLKHTKSPVKFWFLKNYLSPQFTDFLPHMASEYNFQYELVQYKWPRWLHQQTEKQRTIWGYKILFLDVLFPLNVRKIIFVDADAIVRTDIKELYDLDLGGAPYAYTPFCDSRKEMEGFRFWKXGYWRSHLMGRRYHISALYVVDLKRFRKIAAGDRLRGQYQALSQDPNSLSNLDQDLPNNMIHQVAIKSLPDDWLWCQTWCSDTSFKTAKVIDLCNNPQTKEAKLTAAQRIVPEWKDYDGELKTLMARIEDHENTHGSRDSNDDDPIVQDPLEVTTVTPSHEPKHGEL

SEQ ID NO: 3944 - protein, 1558 aa, Sorex araneus
MSGGVGSVLFSRSAHQAHCFTWSPKDVSNWKINDDFEFMAEESNEKFWQFLETVKQIGIFKETESAYSYYNLILKKAGQFLDNLHINLLKFALSIRAYSPTVQMFQQIAADESPPDGCNAFVVIHKKYTCKVHEIKKLLRKASSRPRPYLFERDHEFAPKKEDLPVVILYAEIGTRAFGTFHEVLVAKALNKEIVYVLRHYIKNPSSQKMYLSGYGVELAIKSTEYKALDDTQVKPVTNSTEDELQTNEVQGFLFGTLKEKYSDLIDNLTAFQRYLIESSKEMAPLKVWELQDLSFQAASQIMSTPVYDALKLMKDISQNFPIKARSLTRIAVNQKMKAEIQENQKDLLSRYEIQPGEACLVLNGIRLDMDSFDPFSVLDMLKVEGKMMNSLHSLGINAEDMSKFFKLNSPVWDDNYALDIRHSSIMWINDLENDEMYVSWPTSCQELLKPVFPGTIPPVRRNFHNLVLFIDPTEEYALDFIKLAELFYHHKIPLRIGFVFVVNSEDEVDGAADAGVAFWRVFNYITKEYDVSKAFHLMPLMYEKVKNQNLLTVENMKEVLQDEFPQADVGEILGVGSVYDKGRKGGASYYRMTGLGPLPRALYNGELFDDEELSIKQLEVAVLQKMMDTLIRLQKEVFMGTLNDGTDTVEFLMAKNNIVPRINPLILQSEQEYLNLISTSVTADIEDHSTYYFLDSQDKSAVIAENMYYLTPKDDSGISPVTLWIIADFDEPSGRQLLSNALRYMKLSTVSRLGVIYNPASKINEENTAISRGVLAAFLTQKNQFLSDFLSKLAEEETATAIYSGDKIRTFLTEGMDVDAFEKKYNTIGVNIFRTHQLFCRDVLELNPGEMAVISNGRFLGPLDEAFCVEDFLLLERMTFTDLVKKIKGIVETMSLSPKNMSDFIMKAAALISSLPRHASRSDIRFLKENHSIIKINPLENDMFFDIIAIVDPLTREAQKMAQLLIVLGKIVNMRLRLFLNCKGRLSESPLKSFYRFVLEPELTFGTKSSLGPVAEFVDIPESPLLTLNMITPQGWLVETVHSNCDLDNIHLEDMESSVRAEYELEFLLLEGHCFDADTEQPPRGLQFVLGSRWNPAVVDTIVMANLGYFQLKANPGAWILKLREGKSEEIYQIVGHKGTDSSPDHGDVVVVLDSFKSKILQVQVEKRPGKMQEDILAEKDEERKGMWDSIKSFTTGLHKKEEKPGTDVLNIFSVASGHLYERFLRIMMLSVLRHTKTPVKFWFLKNYLSPTFKEVIPHMAGEYGFQYELVQYRWPGWLHQQTEKQRVIWGYKILFLDVLFPLAVDKIIFVDADQIVRHDLKELRDLDLGGAPYGYTPFCDSRTEMDGYRFWKTGYWASHLLQRKYHISALYVVDLKKFRRIAAGDRLRGQYQTLSQDPNSLSNLDQDLPNNMIYQVAIKSLPQDWLWCETWCDDASKQSAKTIDLCNNPKTKEPKLKAAARIVPEWVEYDTEIRQLLDQLENKKKSAKRCPSGGPQEGSVALGVPVGSVDSGRRRALDTTASFSSLKAGRLLGEDPDVFPVTPSVEELPGTRSCGC

SEQ ID NO: 3945 - protein, 1006 aa, Tinamus guttatus
RIGVVFILSTKEEIDGNEDAGIALWRAFNYIAEETDTSQAFTSIINMYHEVEDGKVLTVNHVKNVLGREFPYADVQSILGVHSEYDEGRKAGATFYKKTGLGPLPQALFNGVPFNREEMDGTELETVILQRIIDATGFFQRAVFMGLLNDHVNAIDFLMEQHNVVSRINPTVLGAERKYIHLRSTSVPFDVQDFSTFSFLDSQDKTAVISDGMKYLTKKDEDILHAVTIWIVADFDKPAGRKLLSNALKHLKTSRHTRVGILNNPASKIKEDNTAIARGILTAFLTQNNSNLRGFLSKLIKEETAKSLAAGTKITKLLMPGMDGDTFEKKYNTLGLDIIKTHQMFCQEVLKLLPGQMAVISNGRILGPLDENEFYAEDFQLLEKITYATSAEKIKTIVKEMGISAKSGSDLIMKIDALLSSLPKTEMRQDVELLKEQHSVVKIDPEQNQPFYDVIAIVDPLTREAQKMAHLLIVLKDVINMRLRLFLNCRSKLSEVPLKSFYRFVLEPELTYGINNHLPSEPVAKFLELLESPLLTLNMITPESWLVEAVNSSCDLDNIHLQDIKGNVIAEYELENILLEGHCFDVTTGQPPRGLQFTLGTKNNPVIVDTIVMANLGYFQLKANPGAWTLRLRKGRSEEIYHVFSHEGTDSEADLADVIVVLNSFRSKIIKVQVQKKSDKMNEELLTDGITEKKGHLDSVTSFSEEIPTEEMEKRSDILNIFSVASGHLYERFLRIMMLSVLRHTKTPVKFWFLKNYLSPTFKEVIPHMAKKYGFKYELVQYKWPRWLYQQTEKQRIIWGYKILFLDVLFPLAVDKIIFVDADQIVRSDLKELRDLNLNGAPYGYTPFCDSRREMDGYRFWKSGYWASHLGKRKYHISALYVVDLKKFRKIAAGDRLRGQYQALSQDPNSLSNLDQDLPNNMIHQVAIKSLPQEWLWCETWCDDESKKKAKTIDLCNNPQTKEPKLQAAARIVPEWVEYDSEIRKLIEKIEAENKNGTSFFQKGDL

SEQ ID NO: 3946 - protein, 1464 aa, Anas platyrhynchos
SEFIAEDGNEKFWQFLETVRELTIYKQGDSEHSYYNLILKKAGQFLSNLQINLLKFALSIRAYSPTVQMFQQIAADEPPPEGCSAFVVIHEKHTCKINEIKKLLKKATKRPRPYLFKGDHKFPTLKEDGPVVILYAEIGTKDFVKFHKILSEKAQKEEIVYVLRHYVQKPSSRKMYLSGYGVELAIKSTEYKAVDDTQVKGSNDTQKEEDDDDEESDVQGFLFHKLTQMHPDLKNNLKEFKKHLIETTNNMEPLKVWELQDLSFQAAARIMSTPAYDALKVMKDIAQNFPIRARSLTRVPVDKQMRNEIEENQKHLHETLGIQPGEARLFLNGLHIDLDFHDPFRKSKLSALSSLFHKNYKKIRGVKFSLKIPWIILGMLWINDIEKDHSYSTWPASYQELLKPTFPGVIQQIRRNLYNLVLFVDPVQEDTDDYMKLAELFYHHNVPLRIGFVFVLNTKEDIDGNEDAGIALWRMFNYIAEESDTSQAFTSIINVYHEVKDGNVLTVNHVKKVLRNEYPYADVQSILGVHSEYDEGRKAGATFYKKTGLGPLPQALFNGVPFNREEMDAAELETVILQKIIDATGFFQRAVFMGLLNDHINAIDFLMDQKNVVPRINPTILGAERRYIHFRSTSVPFDVQDFSTFSFLDSQDKSAVISDNMKYLTRKGKRKKILNIQLYDNEDALYAVTVWVIADFDKPAGRRLLSNALKHLKTSSHTRVGILNNPSSKIKEDNTAIARGILAAFLTQNNSSLKSFLNKLTKEETAKSLAAGTKIVKFLVPGMDDDTFEKKYNTLGVDIIKTHQMFCQEVLKLLPGQMAVMSNGKILGPLDKDEFYAEDFNLLEKITYSTSAEKIKAIVKEMGISTKSGSDFIMKIDALLSSLPKTEVRQDAELLKEQHSVVKVDPQENEPFYDVIAIVDPLTREAQKMAHLLIVLKDIVNMKLRLFLNCRSKLSEVPLKSFYRFVLEPELMYGINKHLPSEPVAKFLELPESLLLTLNMITPESWLVEAVNSSCDLDNIHLQDIKGTVTAEYELEYILLEGHCFDVTTGQPPRGLQFTLGTKNNPVMVDTIVMANLGYFQLKANPGAWTLRLRKGKSEEIYQVFSHEGTDSVADLADVIVVLNNFRSKIIKVQVQKKPDKVNEDLLTDGITEKGNLESVTSFSEEIPPEEKEKKSDILNIFSVASGHLYERFLRIMMLSVLRHTKTPVKFWFLKNYLSPTFKDVIPHMAKKYGFKYELVQYKWPRWLYQQTEKQRIIWGYKILFLDVLFPLAVDKVIFVDADQIVRSDLKELRDLDLKGAPYGYTPFCDSRKEMDGYRFWKSGYWASHLGKRKYHISALYVVDLKKFRKIAAGDRLRGQYQALSQDPNSLSNLDQDLPNNMIHQVAIKSLPQEWLWCETWCDDESKKKAKTIDLCNNPQTKEPKLKAAARIVPEWVEYDTEIRKLIEQIEKEKKKQTSFVQKG

SEQ ID NO: 3947 - protein, 920 aa, Ustilaginoidea virens
MSLDAILEAEEYIEHLRYAGQWVSRLQGDTAVRPLFINGITVPQDQGWMQSMSMALAGDLQTLQKGLYHGVLEEDTSVVDIFLDRAAPRRNVYISLADEKSLRVLNLAKLHSENRAFFDILPVIDSDPTASKEDWAVVTVLANMTSDSGLSLVQSALQFRRLNPAVRIEFIDTQEDAMASSRVNAAMKDVEEKLKDVKSLEELKSLVRAAPEYDASEFYARDVIKVLAESKLTLGSQSVIINGRVVGPIAPSSPFLADDFEELLSFERTRRILPVYAAIEELGLREKINDSTAAAKLGSIIALSAISDLPEGIFESAPATRSTVYNTWNTEDIAIEKGDPKTASIHIIGLLDPASEKAQRWAPILKILSELDGVYVKLILNPRDEIEELPVKRFFRYVFEPKPIFDEDGRIKALEATFAGLPSDVLMTAGMDVPPAWLVAPKSSAQDLDNIKLSAAKSDIEATYQLKHILIEGHSREDKGSAPRGVQLVLATDTQPFLTDTIVMANLGFFQFKANPGVYSIRLKEGRSHDIYNVESIGAHGWEPVPGDEGTELTLMDFQGVTVYPRLKRRKGMERADVLENHDRHSGTNIVARGFKYAESLLGKFGNEKSKSLLQKEQAEINIFSVASGHLYERMLNIMMVSVMRKTKHSVKFWFIEQFLSPSFKEFIPYLAREYGFKYEMVAYKWPHWLRQQTEKQREIWGYKILFLDVLFPLSLDKVIFVDADQIVRTDMIDLVNIDLNGAPYGFTPMCDSRTEMEGFRFWKQGYWANYLRGKPYHISALYVVDLRRFRELAAGDRLRQQYHALSADPASLSNLDQDLPNHMQFQIPIHSLPQEWLWCETWCSDDDLSKARTIDLCNNPLTKEPKLDRARRQVPEWTIYDEEIAALQTRLKERNTTSRTVSVHPKEPQTDIQLQRDEL

SEQ ID NO: 3948 - protein, 1494 aa, Geotrichum candidum
MKGNTFFSALSLALLFSCSCAADVPATRNKNVQVSLVANGPKIPFQIELLEAIAAENASVYYPLLNEFTTLYEGPAPSDKQLHDFAVSYALDNDYIQPDQVAFIDLALAIHTHSALIHSYYQFHDTLAEPAAQHLEPDCSTWVAYNGKTSCNSDLVFALETAGKSARMPLLLPIDKVLRAPLTNDDSLPYAVLYTDLVDFEGFAKFHTHLYGSALAGKLNYVVRYRAPTTTAESNSARQQLTGYGAELYVKRTDYLVIDDRDTKASESSENSEDSDEVEQLSKAQTVLQPVNEGGTISKANLKLLGFKASKFILESNDPFGALVNVSLDFPKYSFSLSEMPGTRRDWANMVSDNVRPGSNLLYINGAPVATSDDNIFSISKAIDRERTYMNKFKSLGLSSEDALDLILSEIDPKDGDNGDKKKVRYDYRTPSLVWLNNLKTDKRYKQWSADPKRILNLPPNQILPPVRLNIHTIVYVIDFSRPAQYNNLAELLNLMARNSAIQIGVIPIVHTKAAEVIAREFFAAQLEAGSEGAVAFISGLMQSEDHQTIYKHVVGPDSDRDVENDEEVNQLIQEARVFAERLDIDTSAQTVFTNGLITPITQRWFYDITDIVGKDMATLKKFVRKNNGKFEGEPKDLFLENALTKRNSLINPTDASAISFLDISNLYIQKEKYGYVGFSSSGSAENTDNENENLYSFWVAGDPSMSQFKSQVVNALEYVKDTKLNVKVNIVPVVSSVDSVSETGLKVISALTKNNSIDTVLKSLSDLDSADAIRPDELAKFQAHSDIFTSSSVTLVSGGRVISLPTNKLFSPSDLEMLYEADFAGRIQPISELASVNEISINGLTGLDKFDLQDLLVSLVWFVKTTFEEKNSFFVSGPAARVDTTDYLGLEQASFDIPNIYDDDENHEPLVHITAVLDPISEKGQVYTALLKSLSQIPEIKISVILSPKPGLTEIPLKRFYRANIPAKPEFDKDTGKRSQDYLVFTDMPQSTLLNLDLNVPGSWIALPESSVHDLDNIILDQINEPVLEAEYLLKNLLLQGHAIDVTTNTAPRGVALELGTVSTVMTDTSIMANLGYFQLKANPGLWSLNIKKGSSAEVFEFKTVGIPNKNSRVEVADESLVFITEMTGLTIYPTFKRKPGMEHQDVLELTPSIGGFIKNTWNSLFGSTKANDDNAEINIFTVASGHLYERFLSIMTISVMKHTDHTVKFWLIENFLSPSFKQFLPHLAEEYGFKYELISYKWPSWLRPQAEKQRTIWGYKILFLDVLFPQSLDKVIFVDADQIVRTDMIELTEVDLQGAPYGFTPMCDSRKEIEGFRFWKQGYWKNYLGSDYKYHISALYVVDLARFRKLAAGDQLRQHYQMLSADPGSLSNLDQDLPNHLQKQLPIFSLPQDWLWCETWCSDESLLTAKTIDLCNNPMTKEPKLDRARRQVPEWVEYDNFVASLSSKVQSQAVKADVDVSTPSKDAEDEDISKAPTAEDNEGDDEDLYDEL

SEQ ID NO: 3949 - protein, 698 aa, Camelus dromedarius
MPGRLHLAVAPGTAMHNPDLQLAGRFSSRKLSCGLFGHGVHPSPRNQMPIDVFCDSVDTSQETNGLFYMYFRVRSEKCQERASDLVMKVDALLSAQPKGDARIEYQFFEDRHSTIKLKPKEGETYFDVVAIVDPVTREAQRLAPLLLVLTQLINMNLRVFMNCQSKLSDMPLKSFYRYVLEPEISFTSDNSFAKGPIAKFLDMPQSPLFTLNLNTPESWMVESVRTPYDLDNIYLEEVRISLLPSGYFQLKANPGAWILRLRKGRSEDIYRIYSHDGTDSPPDADEVVVVLNNFKSKIIKVKVQKKADMVNEDLLSDGTNENESGFWDSFKWGFTGGQKAEEVKQDKDDIINIFSVASGHLYERFLRIMMLSVLKNTKTPVKFWFLKNYLSPTFKEFIPYMANKYNFQYELVQYKWPRWLHQQTEKQRIIWGYKILFLDVLFPLVVDKFLFVDADQIVRTDLKELRDFNLDGAPYGYTPFCDSRREMDGYRFWKSGYWASHLAGRKYHISALYVVDLKKFRKIAAGDRLRGQYQGLSQDPNSLSNLDQDLPNNMIHQVPIKSLPQEWLWCETWCDDASKKKAKTIDLCNNPMTKEPKLEAAVRIVPEWQDYDQEIKQLQTRFQEEKESGTLFRDKTTKEPSREGPHIMNSVYLVAESVDEGLTARDGDAVSRIIGRKQRGSSFADIVTWNRSDTSLIA

SEQ ID NO: 3950 - protein, 1489 aa, Oidium neolycopersici
MGGSNLASRITTFLLINVFQKCVYGFERPSIDVELRTAFPSPPFLLELLETAGNENSSSYFPILDRIADGDFSTTSTDEELYKRFLKFLIDDGHLADPESVSSYQLSLSLRSSAPRIESHYQYYETTAETSFKSDPNESCLNWYLFQGFKYCSPSFDKAPGSVRLALKEEKLLFDRVLGNSSTPVTILYADITSSSFASFHKLLAKNARDGKSSYRIRHRKSTNSQVKPLTIPGWGIELALKKTDYIVIDDRNDDDDDSKTVIPVAEKVAKLEDDELDELKPLSTSEVSLLAVKASSYIMQSNSPLDTLVKLSQDFPKYSSTISSHNVSMEFLTEHHNNRAQLFQDGRNTIWLNGIQLTERQMEIMDLIDIMRKERRLISGMSILGFAPSEAIKLLLHTEIASAQSPDGMDRFDWTDNIEGGNIIIWLNNIEKDKRYSDWPVSLNAMLQRGYPGQLPFVRRDAFNLIIPVDLTDHLDLELILVNALNIVNRRIPIRIGLIPIINNSDTTNQAKVLYHLVDTYGLQTAIAYLRSLSESKPSTNSQETFHQVTQKAKVKTDKTQLSFEEVLRLDDLNSRILASKKWADRLCADDVVPPVFINGVIIPKDESWLQKVSQQIYTDLQLIQQTILLGTESVKSKDFWVPSIFLDEAIHRRNKLIVPENPKDFKFFDLNVLEKSSLEAFKNMPRFISGSSSPNLDSVLMVLIVDLDSESGENLLANTAALHKLLPSIEVLILHNPTSENESKLSHDLFVYLQNKNFTGLEGIENIATIINRQETIHDSSKLEESRMYWQRFAPILRSLELAPGQNAILVNGRLIGPILHAKNFGLEDLKLLVLFEQKRRIAPIYKALKDLGFENKIQSLLQAAKLSSIIALSIFPETKNSIFEEASSIRVNKFNILKSQHTAIEVGDAVNDSIQFTVLLDPASHLGQRWASILKVLSKLKGVYLKIFLNPKNRLTELPVKRFYRYVLDSKPLFDETGAIQSPNGSFSGIPQEALLTVGLDINPAWLVAPKISAHDLDNIKLGSVKSSVGAIYELKHILIEGHSRDVTGDQPPSGAQLILGTKKAPYMGDTIIMSNLGYFQFKANPGYYTISLQKGRSSEIYHIDSIGARGWGPVPGDDEAEVVLMSFKGATIFPRLSRKPGMEREDVLEIKSGPETSFVSQGFKYAQSILSRGNNSPESQASINIFSVASGHLYERMLNIMIVSVMKNTKHDVKFWFIEQFLSPSFKNFIPHLAKEYGFSYEMVTYKWPHWLRAQSEKQREIWGYKILFLDVLFPLSLDKVIFVDADQIVRTDLIELVNLDLHGAPYGFTPMCDSRTDMEGYRFWKKGYWAKFLRGLPYHISALYVVDLRRFRQMAAGDRLRQQYHALSSDPASLSNLDQDLPNHMQNVLPIYSLPQEWLWCETWCSDEALKDAKTIDLCNNPLTKEPKLDRARRQVPEWTKYDDEINALDKRRRGINDLAEKVSESRSFETISEIKTTSKKDEL

SEQ ID NO: 3951 - protein, 1589 aa, Myotis davidii
GVCCKMGLLIVFTGLWLFSLVKADSKAITTSLTTKWFSAPLLLEASEFLAEDSQEKFWKFVEASQNIGSSDHHGTDYSYYHAILGAAFPFLSPLQQNLLKFSLSLHSYSATIQAFQQIAADEPPPEGCSSFFSVHGRKACDVDALETLLLTAPERPKPLLFKGDHRYPSSSPESPVVIFYSEIGYEAFYNFHRQLVSKSNAGKINYIFRHYVSRPRREPVYLSGYGVELAIKSTEYKAKDDTQVKGTEVNTTVIGENDPIDEVQGFLFGKLRDLHPDLKGQLKELRKHLVESTNEMAPLKVWQLQDLSFQTAARILAAPVELALVVMKDLSQNFPTKARAITKTAVSSELRTEVEENQKYFKGTLGLQPGDSALFINGLHIDLDTQDIFSLFDVLRNEARVMEGLHRLGIEGLSLHNVLKLNTQPSEADYAVDIRSPAIAWINNLEVDARYNSWPSSLQELLRPTFPGVIRQIRKNLHNMVFMVDPAHETTAELMSIAEMFLSNHIPLRLGLIFVVNDSEDVDGMQDAGVAIMRAYNYAAQEVDHYHAFQTLTQIYNKVRTGEKVKVEHVVSVLEKKYPYVEVNSILGIDSAYDQNRKEARGYYEQTGVGLLPVVLFNGMPLEKAQLDPDELETITMHKILETTSFFQRAVYLGELSHDQDVVEYIMNQPNVVPRINARILTAEREYLDLTATNNFFVDDYARFTALDSQGKTAAIANSMNYLTKKDDSFIRPVTFWIVGDVDSPSGRQLLYAAIKHQASKSSNNVRISMINNPKEDINYENTRISRAIWAALQTQTSSTAKNFITKMAKEGTAEALAAGADVGEFAVGGMDFSLFKEVFESSKMDFILSHAMYCRDVLKLKKGQRAVISNGRIIGPLEDNELFNQDDFHLLENIILKTSGQKIKSHIQQLRVEEDVASDLVMKVDALLSAQPKGDTRIEYQFFEDRHSAVKLRPKEGVTYFDVVAILDPVTRESQRLAPLLLVLTQLINMNLRVFMNCQSKLSDMPLKSFYRYVLEPEISFTSDNSFAKGPIAKFLDMPQSPLFTLNLNTPESWMVESVRTPYDLDNIYLEEVDSVVAAEYELEYLLLEGHCYDITTGQPPRGLQFTLGTSASPVVMDTIVMANLGYFQLKANPGAWILRLRKGRSEDIYRIYSHDGTDSPPDAGEVVVVLNNFKSRIIKVKELNPVLTPGKAYRSRTSWRETALPVLSRSPAGSASESGQRLRTQCLLPGRTQLRLPRAGHRVVQKKADMVNEDLLSDGTNENESGFWDSFKWGFTGGQKTEEVKQEKDDIINIFSVASGHLYERFLRIMMLSVLKNTKTPVKFWFLKNYLSPTFKEFIPYMADKYSFHYELVQYKWPRWLHQQTEKQRTIWGYKILFLDVLFPLVVDKVLFVDADQIVRADLKELRDFSLDGAPYGYTPFCDSRKEMDGYRFWKSGYWASHLAGRKYHISALYVVDLKKFRKIAAGDRLRGQYQGLSQDPNSLSNLDQDLPNNMIHQVPIKSLPQEWLWCETWCDDTSKKRAKTIDLCNNPMTKEPKLEAAVRIVPEWQDYDQEVKQLQTRFQEEKAAAARGKEPRADGPQTHEEL

SEQ ID NO: 3952 - protein, 1616 aa, Arachis duranensis
MVSRSIHRTWLLIVAACLPLLLIPQPALSQTPRPKNVQASLRAKWSGTPLLLEAGELLSKEDQRLFWDFIEVWLNADEDAGGSHSAKDCLKKILEHGRPLLREPLASLFDFSLMLRSASPRLILYRQLAQESLSSFPLSDDDSFSENDKIGENKFNPLHDGVDLRSPQGKCCWVDNGDQLFFDGSLHVLKFVIRVGDSFQRPEVFDFDHVHFDSGFGSPVAILYGALGTSCFKEFHGALVGAAKEGKVKYILRPVLPAGCEAGIGHCGSLGASESVNLGGYGVELALKNMEYKAMDDSTIKKGVTLEDPRTEDLSQEVRGFIFSKILERKPELTSEVMAFRDYLLSSTVSDTLDVWELKDLGHQTVQRIVRASDPLQSMQEINQNFPSIVSFLSRMKLDEAVQDEIVANQRMVPPGKSLMALNGALVNIEDVDLYLLIDLVHQDLLLADQFSKLKIPHSTVRKLLSTSPPSESSTFRVDFRSTHVYYLNNLEEDAMYKRWRSNLNEILMPVFPGQLRYIRKNLFHAVFVLDPATSCGLKSIDMIISLYENNVPMRFGIILYSSKYIMQLENHSTKDGDKFEEDISDMIIRLFSYIKENYGTPLAFQFLSNVNKLHTESDGHADDALELHHVEGAFVETILPKVKSPPQEMLLKLEKEQKLKELSHESSMHVFKLGLSKLECSLLMNGLVIDPNEEALFNALNEETQRIQEGVYFGQINSHTDVLDKFLSEAGIQRYNPQIISDNKPRLISLSTFIFGEGSILNDIDYLHSPGTMDDLKPVTHLVAVDVTSSSGIKLLRHALNYLVSIVLFRLKIIVLLKLFGPINSTKVFGITTSSYSHKKNVLDFLDQLCSIYQQKYFHTSAVEVDGTQAFIIKVSELAEANGLPSKVYESSLLEFSADEVRRHLSKVENFLYRALGSESGVNAVFTNGRVTYPIAEGTFLSADMHLLESIEFKQRTKHIVEIIEEVKWQDVDPDMLTSKFISDIVMGLSSSMATRERSSESAHFEVLSDQHSAIILNNENSSIHIDAVLDPLSPTSQRLSGILRVLWKYIQPSMRIVLNPVSSLADLPLKNYYRYVVPTMDDFSNTDSSVNGPKAFFANMPLSKTLTMNLDVPEPWLVEPVIAVHDLDNILLENLGDTRTLQAVFELEALVLTGHCSEKDHDPPRGLQLILGTKSTPHLVDTLVMANLGYWQMKVSPGVWYLQLAPGRSSELYILKDGGDGNLDKQSSKLITINDLRGKVVHKEVVKRKGKESEKLLIPDEGEQDKNEGGSWNSNFLKWASGFISSNELSKKAESSSSDKGSSGRHGKTINIFSIASGHLYERFTKIMILSVLKNTNRPVKFWFIKNYLSPPFKDLIPHMAKEYGFEYELITYKWPTWLHKQKEKQRIIWAYKILFLDVIFPLSLEKVIFVDADQVVRADMGELYDMNLKGKPLAYTPFCDNNKEMDGYRFWRQGFWRDHLRGKPYHISALYVVDLKKFRETAAGDHLRVFYETLSKDPNSLSNLDQDLPNYAQHNVPIFSLPQEWLWCESWCGNATKSKAKTIDLCNNPMTKEPKLQGARRIVSEWPDLDLEARKFTARILGDDQETMQSPNQSNDMSSDDSLQVDAESKAEL

SEQ ID NO: 3953 - protein, 1560 aa, Cynara cardunculus
METRIRSGLRILLLIAVCIIVCGYSVSAETQRPKNVQVALRAKWPGTSLLLEAGLDIRYSKLTGYHMHAFMGTNGMRLTLRVPELSFYSGVAESLELLSREWKDLFWEFIDVWLNNESGNTDPYTAKDCLQKICNYGKSLVTGPLASVFELSLTLRSSSPRLVLYQQLAEESLSSFPLSDDLSTSSIDGGVSELNEGKKDKKADSLLVGVNPSSPGGKCCWVDTGGALFFDLPELQLWLRSPHKDGDIFQQPELFEFDHVYFASSIGSPIAILYGALGTDCFKEFHLSLVEAAKEGKVKYVVRPVLPSGCESKSGHCGAIGTKDPLNLGGYGVELALKNMEYKAMDDSEIKKGVTLEDPHIEDLSQEVRGFIFSRILERKPELTSEIMAFRDSLLSSTVSETLNVWELKDLGHQTVQKIVHASDPLQSMQEINQNFPSVVSYLSRMKLNDSIKDEILSNQRMIPPGKSLMALNGALIDIDEIDLFVLLDMVHQELSLADQYTKLKIPSSSVRKLLSTLPPPESNMFRVDFRSEHAHYINNLEVDAKYRQWRSNLNELLMPVFPGQLRYIRKNLFHATYVLDPASICGLETVDMIISLFESALPIRFGVILYSTKLIETLEANGGEFPLSSLENDNHTPIPLRQRESWDAERLSISQQCKQIADGVRRGRCTFAAPCGGGICRNNILEKDQSFREPSQASSLFIFKLGLAKLECSLLMNGLVHDYNEDSLMTAMNDELPRIQEQVYYGQINSRTDVLDKFLSESGIQRYNPQIVGDKAKAKFVSLTASFLGDESLLNNIEYLHSAGTIDDLKPVTHLLAVDVKSRKGVKLLHEGIRYLMAGSANARVGFVFNSDVDPDSNSLTFMKVFEIATSSYSHKKKVLNFLDQLCSFYGNEFRLGSSQDAQSTQALLNKISDLADANGIQSKGFMSALSEFTVAKLTSHLKKVGQFLYGQVGLENGINAVITNGRVVRVPDDVTFLSQDLHLLESVEFKQRIKHIADIIEEFLFLLNASCSKFLSDVIMSVASSLSTRDRSSEGARFEMLSAEYSAVVIGGQNATIHIDAVIDPLSSSGQKISSLLRILWKCSQPSMRLVFNPMSSLVDIPLKNYYRFVTPTMDDFSNTDITVHGPKAFFANMPLSKTLTMNLDVPESWLVEPVIAIHDLDNILLENLGDTRTLQAVFELEALVLTGHCSEKDHEPPRGLQMILGTKKNPHLVDTLVMANLGYWQMKVSPGVWYLQLAPGRSSDLYIMQDGLDMRSTKRITIDRLRGKPVHLGVVKKKGKEHEKLLIPSDDDDSSRKQVGFLLFGDQDSWNSNILRWASSLIGGNVQSKKSGSTKVDVIPHMAQEYGFEYELVTYKWPSWLHKQKEKQRIIWAYKILFLDVIFPLSLEKVIFVDADQIVRADMGELYDMNLKGRPLAYTPALYVVDLVKFRETAAGDNLRVFYETLSKDPNSLSNLDQASANSHTFQHVPICQTMPSTRYQSFRFHKNGCGVSLGAGAKRIVAEWPDLDLEARHFTSKILGEGVSPVEKVVSPIEKIVSPPAQPQEPEEDLESRAEL

SEQ ID NO: 3954 - protein, 1620 aa, Coprinopsis cinerea
MKRGLQLLLAAAALSLSAADEIPQVEISLKTSWPAPPLMHEILESIALENPYEYFTFLDALTDPTAVPKNTELNPEDIYKAAIELGISRGFNLATGWIANLKANLALHSTSPKIEAFYNYYTNYVNNTKGNECGSWVDWYGEVVCDVDTLTRLTAKDPIGDGKYPRPQSLSFDHIYPPPDRVAEKPPRTAILYAQFASPNFRALHSHLYDLARQEDARVEYVLRYVPPPPSDKPREPNVLSGYGVALDLKKMDYLALDDRFQQENSVAQHNGWGRPYDPVLDLIEAHPEKPDAPNATVPLTEEELAGLGAQAIQVISEGYAPMEIFQQLAEDFPKYATSLARRVVANESIVEELKENSVKAKGGVNMFWLNGALVENYDVEALPLLRMLRKERDLMLSLTRLGLSREQAFDVLTHPIISAAHRDTSDALFDASDRQEGGDVVFYFNDIEKDSRYSNWAPSLHELIRPMYPGQFPNIKANLFNVILALDLSQVTSLNFIAGPVSNIIERGMPFRFAVAPIIETEDGKKMARLFYYATKTFGKKKTVELLRNGAVHDLQPDDPIPPVRWSAIEEGFNQIASALETEDPEKKILPFKQVLEGKAMAEGLEDKIQAYHKRLDTTLATGPTGHAFFNGKHIVFDQTFLKHLREGGMEQQQFLMEQVYRGVLKDDILKEKGMGDYWYDLPKTNKRRNRYIFPTSHKDLKVVNLPDALHTKAEMSFGAESFVYPKNAQIQTPIFTTFIVGDFESEAGLALAREALKLVESEKSQSRITFVPNPAEWAAVKDESANALVSKLVTKKALKAASPSIVAKALNVDISSPVSSGDDKQVPLSSKVAITQLLGSEPGEVDKKEVRRYLKRSRIFAREAGVKPGETAIIINGRVIGPIPVNDFSVSDFEALEEYEAVKRTGPVLGALNAVAGSLNEDKDKFADAIYLASSIISWTQIPDPSQAGLFDAPPRPRTRNYEQLNDTYTSFEFGDREYALYYLTFLVDPLSPTGQKWAGIMRWLSMSANVYIKVYLNPDTYKEMPVKRFYRSCLEPQILFNFWSREDPAKVQFKGLPTDPIYTLSMDVPASWLVRPKESRYDLDNIQLTQLFPEDKSLKAVFSLDALILEGHARETATQTPPRGVQLQVVASDPSKEEKAVPVQDTLVVANLGYFQFRLNPGVYGLEIREGNGRKIYDMESVGGLGWDSPGVDEVGNQVALTDFEGVTLFPRLKRKPGMEKVDVLEEDKASSGVLENISTKVKSIFKGKETGVVPVKEQAEINIFTVASGLLYERFASIMILSVLKNTKSTVKFWFIENFLSPSFLEFIPHFAKEYNFDYELVTYRWPSWLRAQTEKQRIIWAYKILFLDVLFPMDLKKVIFVDADQIVRADLKELVDLDLQGAPYGYTPMGDDNKEMEGFRFWKTGYWKDFLQGKPYHISALYVIDLVRFRHDILRGQYQALSADPGSLANLDQDLPNNLQRQVPIFSLDEDWLWCETWCSKDRLHRAKTIDLCQNPLTKEPKLSRARQIPEWEEYDAEIARFTRRLAEEGKISSGLSTADANVLAGASNTEPEEVAKPEEVKPETKEESSPVPETKEEPAVPEKKEEPKETVEEEAAPSSATSVEAEAARPTDEL

SEQ ID NO: 3955 - protein, 1516 aa, Microplitis demolitor
MWYFRIICLLLISSCIAIVDKKHNKYVTTLINGKWKDTPIVLEVAEYLNDENTNLFWSFVDLISKQDDDFITKGTDKEIYDKVMSLAENFVTPTGLAVLKLSLSLRIYSARVEMFSQMAENKEKIPDCNNFIDVGGSKFTCSADQVEELIKNSKENLDTYSVDHQYPGSSKVNKNVILYGQMGSTGFNQLHNKLKSIADSGKITYVLRHYVKDRPDNNLRLSGYGVELQMKSTEYKATDDADIKDSSGKESEENNEGVEEIDGINFGVLKKLYPEKKSQLDELLTHLLDTSDEVSALKVWQFQELSHQAAERIMKSPPSEAVKVFTDIAQNFPMQAKSLIRTKVSNEMKKEMKRNQEIFFGNLHIQPTETVLFINGLYFDIDVIDILALLEALRAELRVMEALLKIGFSNKKMDKLVALDLSSNLDNQDFAIDIRDSAIMWINDLETDKRYQKWSSALTLLIKPMYPGTLRQIRRNFYNLVLIIDPLSDKIKHLLNTVDTLNKHTAPIRVGFVFVTNFNTSVTGFTDPSVAVNNAFHYLMEERNSMEAFKFLLTLQNYISGDSIDVSDVKKALRIRDPSADIDDIFGEESQYDVGRHLAMDFVRRTGFKSFPQVLLNGAPLGNIDDADAFEETVLTTIMTQTPMLQKAVYKGEVVESDDIVDFMMSQPNVMSRLNDRILQPENSKWLNLIGDLPKNDEVSSWSQQDTATWLMKNSNYLVMPRRVAKQHLYSYWIAVDLEDKKGRELLRDAIKYLDSNADVRITIIVNSADKSGDTDSDVNINTIVLAAMEALSQQKVVKYIDNILQEDNVALIKDRKFDLNDDSVKEKLNNQEFKLKVHKHYAKTALKLVPGDRAVVCNGRVLGPLDKDEDFTRDDFSLLERFSHNTYGEKLVKNLQTLQSADDDDDDTEISDDVIMQITSLLVLRPQTLNRYDVPYSGDEHSVIKVPAARPNEAAFNLIAIVDPVSRGAQKLGAILSTLQQSLNCNIKIFLNCVDKNSDMPLKSFYRFVFEPELQFNADGQLMGAQARFTKLPTSSLLTQYMHTPENWLVEVVKSVYDLDNIKLDNVAMGVHSEFELEHLLLEGHCFEASMGNPPRGLQITLGTEKQPVMVDTIVMANLGYFQLKANPGEWLLRLRQGRSADIYDIHSVTGQDVIQDNNEVKVLISSLKSHVLKLKVSKKPDKLHTDLLADDDIQSGIWNSISRTFGSDDTEDKDEKINIFSLASGHLYERFLKIMMVSVIKHTKSPVKFWFLKNYLSPTLKDFLPHMAKEYGFEYELVQYKWPRWLHQQTEKQRTIWGYKILFLDVLFPLDVKKIIFVDADQVVRADLKELVNLDLEGAPYAYTPFCDSRKEMEGFRFWKQGYWRNHLQGRSYHISALYVVDLKRFRRIAAGDRLRGQYQALSSDPNSLSNLDQDLPNNMIHQVAIKTLPQEWLWCETWCSDGSKKSAKTIDLCNNPMTKEAKLQAAMRILPEWVGYDEEIKALQLRIENENKQLEREEKDEHVSEDHSKHEEL

SEQ ID NO: 3956 - protein, 1507 aa, Lygus hesperus
MEFTRLRFLVVLSILLMLTLTVVNCKKKQKSVSTVLDAKWEITPLVLEMSEYLSDESQTSFWNFVDVLSEQKEPIVFEKTDKAYYDRAIELIGSFLSEAQVSLLKFALSLHVYSPRVEMFCQIASQKQLQCPVAAYVDGNFECDVLQLQSAIKNAQAAPVKNHTADILTLDHKYPGSDSGPLVILYGELGSPEFSEFHKYLSDKAKRGEIQYVIRHWVKERQQRKVRLSGYGVELQLKSTEYKAQDDTKVEGGGSEVTEEDEEEEIEGLNFSKLKSLYPDKASELEKMKLDLVESSNELAPLKVWQFQELSLQAAQRIMSAPKEEVLHVLMYIAQNFPTQARSLVKTVVSQEMKNEMRQNQDRFATTLHLQPSDTALFVNGMFFDLETQDIFTILEYIRDELRVTEGLNDVGVTDKKASKSLLALDLSSTGVDFGLDIRDSAVTWVNDIELDKQYNRWSSSLMDLLRPTFPGMIRSVRKNLYNLVICGDPSKQEVIPLIKLVQSFLIHNAPLRLGIVFAVDGTKTGLEDSGVALLNAYNYVLEMSDSAEALNFLTDVYAAANNVEITPALIHDLLKSKHSKADKDEVFGADTDYNTGLKLAMDFVEKSGLRYMPQVLMNGVPLPQKSLTAEDFEEAVLSEIMNQTPVLQKAVYKNELKDNDNVIDYLMNRPNIMPRLNDRVLSTSKSKYLTLTKFANPTIRNLMDGKLNYVSSKSHKKVHLISNWIITDLETDRGRALYLNALNHMSGSSGMRTALIINNANPEADKNLVNKAVLCALSQVNGDKVTKKIKNILENANDVAKGLKGLKDFNLDDTCLKTVDETLISHEIFIADGIGFPRGARGIVSNGRLLGPFDDGEIFTLDDYDLLERFSLSTYVDKIYRALTKNAEDPDLIDSDVIMKSVSLLASRPESKSRFEIKAFSEEHSVVKLPTATNGPALDIVAILDPVSNGAHKAGTILSTLQQVVNCDIKIFLNCVEKNSDMPLKSFYRYVLEPFIQFTPSGQMAPGPMAKFLNMPGAPLLTQNMLVPDNWMVESIASPHDLDNIKLDQVDSNVHSHFELEYLILEGHCFDSALGSPPRGLQIILGTENDPNEFDTIVMANLGYFQLKANPGEWTLRLRHGRSAALYDITGYSHLGNDFAFNATESGIKILLSSFRSHTVKLKVTKKPDKVNVDLLGEDNEENQGLWGSITSTFGGRDESPNEKDEVINIFSVASGHLYERFLRIMMLSVLKNTKSPVKFWFLKNYLSPTLKDFLPRMSKQYGFQYELVQYKWPRWLHQQTEKQRIIWGYKILFLDVLFPLDVKKIIFVDADQVVRADMKELVDLDLGGAPYGYTPFCDSRTEMDGFRFWKSGYWRNHLQGRKYHISALYVVDLKRFRRIAAGDRLRGQYQALSQDPNSLSNLDQDLPNNMIHQVAIKSLPQEWLWCETWCDNSSKKKAKTIDLCNNPQTKEAKLTAAMRIVPEWKDYDNEIKQFQLKLGATEDHEEENEDHTSSKSAHGSSHTEL

SEQ ID NO: 3957 - protein, 791 aa, Colletotrichum higginsianum
MTAFVLGKALAFRRSNPGVRLDVVYNPLTPASASAVNAALKNGGDKFTEAESLPEIRSILDNAAGEPDGIFAAALNEFLSFAAIKPGSNVLILNGRVVGPFTEAEPFQTDDFQYLLEFEQKARILPVYAAVDELGLTEKISGPLAAAKVTSVTAISTISDLPAGIFESAPSLRVSAHDTWSSSYTAIEIGNPETSSIHIVGVLNPASEQAQRWAPILKVVSELDGVYLKLFLNPKDKIDELPVKGFFRYVLESEPSFDETGKVRALEASFKGLPSEALLNAGMDVPPSWLVAPKVSLHDPDNIKLSSIKSNVHASYELESILIEGHSREGGQSQPPRGAQLVLGTEKEPHFADTIIMANLGYFQFKANPGFYNIQLKQGRSSDIYTIDSIGARGWTPVPGDEGTEVVLMDFQGTTLYPRLSRKPGQEEADVLAEPEDKSIVGRGLKFAEGILGKKKSASDEEHAEINIFSVASGHLYERMLNIMMVSVMKNTKHTVKFWFIEQFLSPSFKDFIPHMAKEYGFKYEMVTFKWPHWLRQQKEKQREIWGYKILFLDVLFPLSLDKVIFVDADQIVRTDMISLVNHDLEGKPYGFTPMCDSRTEMEGFRFWKQGYWANYLRGNPYHISALYVVDLRRFRELAAGDRLRQTYHSLSADPNSLANLDQDLPNHMQFQIPIHSLPQEWLWCETWCSDESQKDAKTIDLCNNPQTKEPKLDRARRQVPEWNVYDNEIAALDRKRKGLPVEAPKKGENKVGGGDKGEQQEPDVAEEEKNTKSRNWEEPPAEKTHVIDEL

SEQ ID NO: 3958 - protein, 1662 aa, Micromonas commoda
MSFKISHAVVLCMLFPAICAANYQDVEVSFTLTTRWQATSFLLETAEFFADYGPDSYWAFTESWLEPGDHDCRARILNAARGASDSEDIFKALQLALRVRQYSPRLEMFRSIAQESFKNNFNRNFEEKQMLKCCWAELGTSGFVATTEEELRNLIFSSSKINVSGIRRSSVFDHVYGGLAVYMNMSKTGTGQLESQNMTPLGSPTIILYAALGTSCFNSFHNIMAAASLRGQIQYVHRPILLAGCEVSGCVGLGATDDELRLGGFGVEMVIKNTEYNSVDITRIRSKDDGDMSKMRHVLSRHVEVGGCNLTALVVRFPGLASKLTTIPNHPQHENIRENLDIWHFKNIGLQATHRILSAADPFQMLEDISQNFPSLAASLSRVEPGNILMTEIIENQKVIRPGAHVMHMNRRPLNLDTIDLFSLVEHIWTDIREGHSLKDFGLDSEQIRALLQPQLPMQIAFGEGQPRINLEDSDRLVSWTNNIELDKNFEDWSRSIELLISAQQDGSIPRLRRNIFNIVAVIDLSQREGLNLVSTVQRYINKFDVPLRLGLVFVDREAESESEWKRDANDNGVFQNKKQNGDFELPFGISIGTALARAGTLLSRRYGGKYAGEFARGIGETHKLISRVNVLNDPFYNNATWAAAKEIFNQIFKRAFVAREYSTKGVRPDEDTIDMQLQFALADILSFDLDERDDLTPSSALYVSQAKDLIAAKGITVPSVLVNGLYCSLANARKLESELEQVAMHLVQLEIQTFATAISEGNLTDKILDTYPGGAYGWVLRDATPRYVPFIQDAVIFPSTYLVMRPPSNRVESHTYPIENFVNYICKDSLKVKDTTVWFVSDASRPAAKAVIDAAIDFNKRTWKGAHCQANVRFAVLHPPGVAPSQEAREAAQKFRSHHLGDYDLDSLLVQQGNFVARLLGQEHMATFRPPEVGLLIVNGRILDIPRDYQMDAEDFCLLLSQEHRAHIDLVRQIVGRSVPRSLTATDTTRISDMYMLSTSLLAWRRSEYGVRREEAEILKVLEFTKSAVSISGHGTVAFEAVLDPLSKDAQRVISLINVIKETLTSSVTVRIVLNPINTLHYLPLSSYYRYAVPLAPISIHPRAYFTGLPLKEKYTAHLDIPEAWLVTTTATQYDLDHLSLEELPDGFNLVEAEFQVEALLVTGHCVDINSNEHPRGLQLTLKNPSERAGTIVMSTLGYFQLPAAPGVWSLELRPDQSASNYYMVPNDEFGKYAQKYVYQQPTQDRGVEFMSNHAELYVASWKGISLNLYVKRRPEMESQDVLSGIDHPASLETERKSRITNVQLYVPSVKLNGRFSFSSILASFLGRWKLHTFADTGPSDSLKKLTNSDMPRSRIAENASRDLTLAEACHGEKIHIFSVASGYLYERLIKVMMLSVRRNTKNPIKFWFVKNWLSPRFKQYLPHFASRYRFEYELVTYKWPTWLQKQTDKQRIIWAYKLLFLDVIFPLSLEKIIFVDADQVVRADIKELWEVDLHGAPYAYTPFCDDNKVMDGFRFWKQGFWERHLDGKPYHISALYVVDLKRFRQLAAGDTLRVIYENLSKDPNSLANLDQDLPNYAQHQVPIFSLPQQWLWCESWCGNQTKLSAKTIDLCNNPMTKEPKLKGAVRIIAEWSSLDNELQQHTLEVEQLMSNISGSKSNWV

SEQ ID NO: 3959 - protein, 1535 aa, Coniosporium apollinis
MRAWLRPGRARTLLLLGAIAPFHITASPTVNVALRASFSSAPYLVELLETAAEENSTAYFPLLDRIADGYFDKAATDYELYTTFVQLLHDDGHITDPDTLSSFEFALSIHSAAPRIEAHYQYYNTSVEQALATVQDKPCESWVAFGDNQYCSPELDSAQGTLKSHRTDDLPFDRILGDSSGALPSVLYADITSPSFGRFHKTVSRSAKEGKTSYRIRYKRSASGSNEPLVINGYGVELALKRTDYIVIDDREAEQAGTKEAPKPAGDTLQDEDVSDLKPLSASELSGLSLKTASFVLNTEDPLDTLLRISQDFPKHSSAVAAHNATAEFLAEHSNNGELALPPGYNVFWINGVQVDPRKIDAFSLLDHLRRERRLINGLQSLGFSGPEAISVLSHSAVAEAQAEDEPQRYDYRDGPEGGNVIIWLNDIEKDKRYEDWPTSITALLQRTYPGQLPPVRRDIHNAIVPIDFSNPKDVSTVVETLQNIIRRNIPIRWGLVPYTGSPAAAQQARVAYHLLDAYGLGALMTYLENSSANKKLLMPHQTTFDSVTTDRRLKKDRVSRSLQEVLQEESLEDRLQGAKKYLMRLGAYGDSAPVFVNGATIPRTEEWLQTLSQRVGLDLRRIQKGVFEDEFTETTWLPAQFLAYASLRRNPLIIPEDETNITLLNMGEIISEHGDLFSNCPRIAVAEGSDKEQWATLMLIADFDSLAGQQLWVDAINFRKQHSNVELIFVHNGEASSKVLDTSARLYRFLEHGSSDSLESLEDVLASEVSSEDTKEAAHFWTSVQPLIRALKLKPGKSGLTLNGRLIAPIPEDNAFSAEDLETLLAYESRKRVQPVFTAVKALDLVDKLNSPMAVAMLSSIVALSTVSDVPEGIFETAPTQRSDVFNTWSAEHTAITTGDQATAAIQVTVSLDPASEVAQRWVPILKALSELSGVYLRLFLNPKERLDELPIKRFYRYVLDSRPSFDDNGALQGLKARFTGLPEEALLTMAMDVPAPWLVTPKECVHDLDNIKLSTLKGSSDIDATYELENILIEGHSRDVTQGIPPRGTQLVLGTERDPHFADTIIMANLGYFQFKANPGFYELGLQAGRSSEIFTIDSAGTKGYNAQPGDETTEIAFMSFQGVTMYPRLSRKPGKEDEDVLEPPKSAAADMASKSTELKDKVLSKLGLSGTKTEKAIAKGLKRVSGLLTKTILPTSAVTRSAHADINIFSVASGHLYERMLNIMILSVMKHTTHSVKFWFIEQFLSPSFKAFLPSLAAKYGFQYEMVTYKWPHWLRAQKEKQREIWGYKILFLDVLFPLDLDKVIFVDADQVVRTDMYELVTLDLHGAPYGFTPMCDSRTEMEGFRFWKQGYWANFLRGRPYHISALYVVDLRRFRQIAAGDRLRQNYHQLSADPQSLSNLDQDLPNHMQHVLPIYSLPQEWLWCETWCADEELGKARTIDLCNNPMTKEPKLERARRQLPEWTEYDEEIAALARRLKNGDGVGGRAPIKEGVDERGSETGYEEDDEGEGEAVKIGVPPPQGGIKSRVVDEL

SEQ ID NO: 3960 - protein, 2124 aa, Parasitella parasitica
MPTSRIHRAILGLVAVGLCNFVSADASPTVDLTMIAPWSAPNLLIEVAETIATYNESAYLDSIHDFISLEQQSTSWTPHQTYKEALKIVSALGADETNFFKLSLAVHEASPRIEAYNQFYKENVVPSIAQYNDECDVWAQIENQQYCDEAQFTDALLSTESATPKKPIEILPFDHIVSNAASEPTVALYTDRFSNKFALFLDALRHHNVAHVIRYRPSITNVPVPLYLSGYGVEMALKKTDYLVIDDRSSQKASSIKDKISNMGKKFGQSLFQATQNEAIEPVTPSEIHRLGFKAAQYVSKSSNPLTTLNQLVQDFPKYAKSVSELDIDTAFEEEILDNQLNFLRAGMSAVWLNGKGLEFSQMDPFFLIRALRSERKLVAAFENLGFTAKDAIEVMSNPALTIATQAGNAAHNEIFDMRDTAAEPFVVWWNDLEKDTRYSEWTSSLEGYIRPQYPGQLLPVKRNVFNLIMIEDLGQRDSIARVVNELHMMIKRLVPVRFGIVSIIKEKDSLSTKMAQSLSYMIQEHGKGAGMNFLTLVLETIHSEGEGELTLETIANSFAKTVSRSGKPKSGKKTSFEEALATQDAYTQASSSFLKRMQIAELGPQDGVMFINGKLLEFNEERPWVQVLMPALHEITREIQRMVYLGDFLDESFDFYEYTMSQPNVVKHRNSYIVPSNVHPLVIQEFATAKRSDKLRYFQTAANTTQQASINLWVLADLDTASGARLAFEALSYAQTNPKVRIALIHNSADARNDQDATAPIVDHDNQPTVSDLLGNLIFANKAIGIEQLSKFVENAIEQVNKRSSSGNLAPESIIPGSPIIEMEAKAQSENWKALVDALGKDGLDKSFNGIVVNSRLVGPLPPSAVFSKENFAALVDLEYSKRIAPVEQAIAQVKYAIPASDDLADVITRISVLIEKDKAITSKSVVEENEPVYRHRVYDKIPKTKHTRLVIGDPDNSFLQIGFIIDPLSETAQKWVPLINTLATIEGVSVIMHLNPINGLEELPLKRFYRYVFDNEPHFDPATGVQEIPTAYFGELPTDPLYTLGVETSNAWHVTVREANMDLDNILLNSLSKEEHGVSAVYELENILLEGHCLDSSSKSPPRGLEFEIATPSNHSRKDTLVMANLGYFQLKALPGVWNLGLREGRSSDIYSIQDIGTKGKWNWDTSKENETAEKAGGVLALTSFEGITVMPLVHKNPGMESKDVLESAADKKHGDGLWSSLSSKLFGSRKAQDLVASKAKQAEINIFSVASGKLYERFLSIMIASVMKHTQSTVKFWFIENFLSPEFKDFVPYMAKEYGFDYEMVTYKWPSWLRAQREKQRTIWGYKILFLDVLFPLDLDKVIFVDADQVKHGHIARFARCCINQSHYQIQIVRTDLKELVDMDLQGAPYGYTPFCSDRTEMDGFRFWSEGYWKSHLRGKPYHISALYVVDLVRFRQLAAGDRLRAQYQQLSADPNSLANLDQDLPNNMQHQVPIFSLPQEWLWCETWCSDESLKTAKTIDLCNNPLTKEPKLDRARRQIPEWETYDNEIDALPPIRNNRSTNKVHSNVGNIHDSNEDILRIIKLYNHGTIKTINDEATLNGIKYPRLLKYRASNFYIFLTAALSIFTSIYSTASLSTITVYIIEKQIRPSEATIHNGVDIFSDNAVAYVLSSFFLSGLLLGSLMFGWLGCQIRQRKYLLLIGTCASILAGGGFMVSIEYWMLFPAKFLQGVSNASIWVFSSALIADVWPQRMASGLTIGGVVLEYSDHKVCFFCALALACLTLVMQICIVERCTIPSDWLETKESCQADHRPEMQENLFNEMQRELNIMEEGAMWSKSSSLSTINLRDQPIIFENEKDATMKSTTKEAFQNLLVVRLVGSAQFMSCLYQLVVLSAILGALKPSLFIKLEYQMSILNASFRNAVLSTFLLPCAIFSFTGGWLCDRFGTKIVGLTSAIVSIPAFIWIGVPNQNIQSVVSALVVGGITLSGIAVSAVHTTLNDMQKILIQNQHDKTKLQQQQYQQKHMPATFAIVYLMSGVGLFSGFFLSKLNDIIGFFWLCFIFSMLLLTCVPLMAYFGKGKLKNNSQTDLSASTSKKSIVNNTRPESFAESILSDDETTIGSSSRSDCNVNLESKSIIVIP

SEQ ID NO: 3961 - protein, 3282 aa, Trichinella spiralis
MTVFCANFTVESLLEATVYSMWVFPLIVVCFVSPVLVSPRKAHKNVIVSVRSKWPSTSLIMEASEFMSKESNEKFWQFIEAVIDKHQNSLGNKTDREVYNGILQIGDQILKSKARLEFLKLALTVRVHSATVEMHRQIAATSLDVQNGKSVYAVVHGKQISDLQQLDTILKHAEALARPVTYQFDHIYPGSKQGSVCVLLYADIENPHFKPWHLQLKKLVQRDGISYILRHYPKMNDDMVALSGYAVELAIKSTEYKAVDDSDKQTGSESGVSSSEEEVTDLNGFNLHLLEADELTPLKVWQLQHLSFQAGQRVMLAPKEEALRVLRDISQNFPIMARKDFTLLYAMKGNDPNAEYAVDYTQWSPQIFVLRLGDRASQNLLSTAYQMYEHVLPIRIGFIFVVNNDKSVSGYDDAGVAMLNAFNFIKEDRSVSKAVMFLIKIYNTVMRETISVEDVHKLFKSSYRDEDLKSVFNSEEYNQGRSISPEHIEEAILSKVMRFTVDIQKDVYEGNLKENMDVQQHLMKKPTVLPKLNYNILQMENIFLDMTDTSMDMRIALIHNPKSEAQATKGTASLVQACIQFLPLYQSKAVIGKIFANKITTLEDLINLSPSGISWPEFKKAYNSMSDIWMQLHVHYAKFVLNLDPGVGAIVANGKIEASDPTAAQFDIVAIVDPLSPAAQKMSHLLVILSSVLNVHMKVCMNCKSKLSEIPLKNFFRMVLPRELEFADDGSLKAQPSARFSALPQKQLFTLNLIAPQSWMVESVDAVYDLDNIKMEEVKGDVVAKFQLEYILLEGRCFDERSGSPPRGLQFTLGTFHEPFMFDTIVMANLVAKKNDQLENELLAESEDAESESLWQSISKTFQSGEKYDVINIFSLASGHLYERFLRIMMLSVLKHTKTAVKFWLLKNYLSPGFKEFLPYMAAHYNFSYELVQYKWPRWLHQQTEKQRIMWGYKILFLDVLFPLDVKKIIFVDADQVVRTDMLNLMELDLEGAPYAYTPFCDSRKEMDGYRFWKQGYWENHLAGRKYHISALYVVDLKKFRQVAAGDRLRGQYHFLSRDPNSLSNLDQDLPNNMIHQVKIKSLPQEWLWCETWCDDKSKKFAKTIDLEPKLQSAMRIIEEWKDYDSEIKDLLDQRTKDKWKITEQKIVDIGFQFTAYFLVFLEESWNRAMNKENQVQDNRKAEITRRVVESCFAGLKCFPAYYSDQKMKNDSVDCSHNRDKFKNYYRKHWDTDITVEDETVVELKNRILKGDRSALASAITLVESNHPTKRAQGECLLQSMLKISKKRFDEHGPKSLIFRIAITGAPGAGKSTFIESFGLYLIRELKKKIAVLTIDPSSERTGGSIMGDVARMNELSKEPNCYIRQSATAGTLGGVRRGTHESVVLCEGAGYDVVLIETVGVGQSESAVANIADMVVLLLSPALGDELQGIKRGIMEMADLILVTKADGDLLKQARLTRAEFSSALKYSRSRFHCWRPQVLLVSSRTNKGITEIWNEMEHFRNALSESGVLLLQRHQQMLRWMWNHIDHVLSGLFRHHPDVVKMLPQLIREIQNDNVTPVTAGEKMEHFKKEHWKFRQEKNMLEIKVSKAEEKVYTDGFDLANASGSVNLKKNVRMSEENDLHEKEPERVPVSFADLRREQCDADNKIDPEFWRNRERMKTVSVALVLCLNIGIDPPDTVKPKPCARTECWIDPQCMPMQKALESIGTALQRQYQWWQPRARYKQALDPTVDDVRRLCISMRKNAKEERVLFHYNGHGVPRPTKNCEIWVFNKMFTQYIPLAIYDLQTWMGAPGVYVWDCNGAAQAIRAFKTCAKKQIQAYRCSLAARRKESTKTTVEFEPGVDLFQADDARQAELDRSHRRKTGLDCVSSKPLEVNFRSSSMVPNDPKIETNNKTTAKDASKHLTGNSSGNNNVRNGQHKNDGNNDGNTNGNDDDDDDDDDYDDDGEDDFDDDDPRKPKFKHCIQLAACARDQTLPTDPALPADLFTCCLTTPIRMAVMYYILQNKLTDRYPVCIADRIPGSTGDRRSPLGELNWIFTAITDTIAWNLLPSETFQRLFRQDLLIASLYRNYLLADRVMRSYYCTPVSSPRLPPTHEHVMWQAWDMVVESVLEQLDVQALVAEVEANEATVMLPPGVPTAAGHGGAGVGAGASTAVAAAAMPGGGTATTGVSDAGSRAVGNDPTLTAGQQAQHDKVVASVDYKNSPFFSNQLIAFEVWLQYGFYQGSAPQQLPIVLQVLLSQVLRVRALELLARFVDLGPKAVEQALAVGIFPYILRLLQSVSRDMRPLLTFIWAKILAVDNSCRLMLLKDHVHRYFLVHLNDPTVEVRRKLFAVFALARLMADCRQFQEAALCNGFVATCSDLFSDCNDAPMRQWLALALGHLWTDYEAAKWQAIRCSLHQTLIGLLEDRLASVRAAAVFALGRLISTGGSGDKENKQNDGDQGNHCPNDEQSTNLAHSVAMSLVQHVCADSSATVRREALLGFFAFVRRFYPQFVTIAYEIDRELASSVPSRRHQHHELVSSYTVTTATIVGNNNNNNNNSNNHNHHNLSNGSSNSLASFSPQQQQRTRNFGISSSPVAANVDSSTLVKSTSLLFQPLLTAVSSSLNSSSNSMINIPLVRPSSRKSVSWLFGLARSSQEHQKVDNSKQEQSSQETITVLSRREVRRHRSIGPAALVNVNNVYVSVWRAVLKFLYDPDIEVSRLAHRLFKYVDRSVQNLRLLSSVGHQDSVDSLPVRRRSTAGYFHSSPDNGTAGQHPSPRPKFSFSGTHDHHQQQLVNDGNGNSGGCESPMGVSPITLCTYSAIYTNPRRPVFGDGPASESSVHSSEASPETRRHLAPEREIGTTAASILSPPVDGEPVMKTDYLSTCAQQFRSPMFYLLSESSAPSPAALNAQPRTTQRILPSFIADRISLIHQHSSIEWNLLRDKRKKYGKLWTYKNDFPATCMEFLPLEPLLCIGERDSVTVWNCNKGSVVAHFDNSSTSYTGQSGSDLSGNLVYLTFVNPYTHGFILTGTDCGEVRVWDVRLINEPDLTSKVPKGSIDFALLTAWMCADDARRFHTKPFTCYFWEQDPGLLFAAGDFRNIILWDAHTELKLAELKVGAGGDTYVCSLSADSNGHHLTAAGCSDGSVRLFDRRLPTSDSRIMTLRDLGRAVFKVHLEQASVGGGGGGGGRLVAASRSGQLCIWEPRMYREPVLFKDVGVRCRSSFDVHRNYPLIAAWNGAQVDLINFDGKSMGLFRPDVSNMTTTLGRLAALRFHPVQVSIGLAEQDGQFSLYGLRP

SEQ ID NO: 3962 - protein, 1478 aa, Exophiala mesophila
MSSHSRTPQWSLALLGPLILSIFSTVAQSSAAVNVALKTSFDAAPYLVELLETAALENSSSYFPLLDRIADGAFADLESDQDLYNHFIEIVQKDGHLSAPDSLSSFKFALSLHAAAPRVQAHFQYYNTSVQSLLPAAQDAACPVWVYLDGQQYCSPSLDRAQQPVQLPDVDTPLPFDRILGESSDGPPSILYADITHPLFAQFHHVVSKTARDGASSYRLRYRPPVSTSSNPLYVSGYGVELVLKRTDYIVIDDRDATTPDRKSPEQLSLEKAEEEELSDLKPLTSSEVAPLALNAASFIASSSNPLDTLLQISSDFPRYSSLLASANVSDDFLREHRYNRERFLPSGYNVLLINGMQIEPRQINAYSLIDHLRRERRIIDNLKTIGLTSSEAIDLLSSQVIAESQANESPQRFDWRDNLEDGKALMWLNDLETDKRYAGWPSSLQALFQRVYPGQLPQVARDIHNLVVPIDMNNIKDVELVVTALQSLVRRKVPLRIALVPIGDGETADTYAKVSYHILDTYGLTTLMAFYNDIVSGKKLLSTPEQSFAAVIKGRTPREGKYVLTYDQALAADSVEQHLAARNTYIDRLALQGASIPFLINGVVMTRTDSWFETMSARLYADLQILQQAVYGDLILEESWIPEFFIGQAPSRRNQLVFPHDPKDVRILDVIALATAHGGDLAALPRVAGWDADLLGDRAHVLLVADLDSAAGRALLEETIAVQHQRPHTDILILHNPAVEDASPGIACSLYAMVEDGRRDVYIEKLWDLLERKEDFAVLDGAAVSACRTFWATKQPAARAIGFMAGETGLWVNGRTIGPLVAPFSTTDLESLLDSEREQRISPVTTAITGLGLEKRFEDAFDLAKVTSLVARSLKSDLPEGLRESAPLIRMDLFKVWNETYTAINLANHEDATVQVVAVMDPASEVTQQWVPIIQTLSQLHGINVKIFLNPKDRLTELPVKRFLRHVVSSEPSFDDKGSLQRPMASFKGIPKDTLFNLGMIVPPSWLVAPEKSVHDLDNIKLSSLAEGENVDAEYELEHILIEGHARDVTTSPAPRGVQLLLGTEQEPHFTDTIVMANLGYFQFKANPGYWQIGLKPGRSSKIFNIDSVGPSGYEAAPGDETTSVALLSFQGLTLFPRLSRKAGMEEEDVLESPTGALDYLSKGASFASSALSSLGFGKSTDSNADINIFSVASGHLYERMLNIMMVSVMKHTKHTVKFWFIEQFLSPDFKSTLPYLAEHYGFKYEMVTYKWPHWLRGQTEKQREIWGYKILFLDVLFPLDLDKVIFVDADQIVRTDMMELNRVDLKGAPYGFTPMCDSRTEMEGFRFWKQGYWETYLRGKPYHISALYVVDLKRFRQVAAGDRLRQQYQALSADPNSLSNLDQDLPNHMQHSLPIHSLSQEWLWCETWCSDESLAQAKTIDLCNNPQTKEPKLDRARRQVPEWTEYDDEIARVIEAAKGVGSDGEAMDGKRTRDEL

SEQ ID NO: 3963 - protein, 568 aa, Capsicum chinense
MCSKFSHGVDMYAVVLENESSSIHIDAVIDPLSSSGQKLASLLRLVSKSIRPSMRLVLNPMSSLVDLPLKNYYRYVIPSVDDFSSTDYTIYGPKAFFANMPPSKTLTMNLDVPEPWLVEPVVAVHDLDNILLENLGETRTLQAVYELEALVLTGHCSEKDQEPPRGLQLILGTKSTPHLVDTLVMANLGYWQMKAFPGVWYLQLAPGRSSELYALKDDNDGGQETTLSKRIIIDDLRGKLVHMEVTKKKGKEHEKLLVSADDDNHSQQKKKGNQNSWNSNILKWASGFIGGSDQSKKSKNSAVEQVTGDRHGKTINIFSVASGHLYERFLKIMILSVLKNTQRPVKFWFIKNYLSPQFKDVIPHMAQEYGFEYELITYKWPTWLHKQKEKQRIIWAYKILFLDVIFPLALEKVIFVDADQIVRTDMGELYDMDLKGRPLAYTPFCDNNREMDGYRFWKQDLPNYAQHTVPIFSLPQEWLWCESWCGNATKSKAKTIDLCNNPMTKEPKLQGAKRIVAEWPELDYEARRVTAKILGEDFETQDQAAPPAETPKAIGDPQLEDEESKSEL

SEQ ID NO: 3964 - protein, 1539 aa, Fibroporia radiculosa
MLTDPRTLLSPPSVTPETAYQNILKTVTSNGFLSKPGAYASVEMNLALHASTPTIEAFYQFYTDRHAQRLNSSHEGHCGSWVDWYGHVICDAETLAHAVDAEMAGQAGTDEAHARPTLMPFDHIQPLPTRNLDAPPRTAVLYASISSDNFRELHTYLYKASSGPSPHIEYVFRPLPPKDHDASQKVYLSGYGVALDLKKMDYLALDDRKKGTDSEEAAQEESFSSYSNADPIMALLQQYPENSTLDTGSPLTDEELLDIGLQATQLVHDADEPLVVLKQLVQDFPKYATALSRRVVIESGLLEEVEDNQITIPGGTSVVWLNGHSISEKDMNPFALLRLLRKERATMLSLTSLGLTPSQAVELLTHPSISAAQSESGVLDGIFDASDRLEGGGAIVWMNNIEKDSRYLRWGKSLSLFMRPMYPGQFPSLRANIFNVVLVVDLSQTSNIQFLAVTVSNIINRSFPFRWGIVPIVETEEGTRMARLFHFLITHFGRKRTVEFLQHISQADRSMESTTITVDWNLVRSAYRTLLASSDPLEGVPTDLDDILAGVTEGFRVDLEKTRSYANRLGANLSPGVQGHAFVNGKHFKLDDMFLRMMQMEFGEELDYFREQLMSGQISDSALSSISTYFYDLPGAAKRRNVYIYPSSNVGDLRIFSLPALVGESGFPVWPGSFLYPPELQQVSLTTYVVADFDSETGLLFMKEALGALAAGYNSRISFIHNPTHITSSSSKRPQISSLLAHLIVKDILHQVSPSRLLNVLGLGEVVAPNHNPQVVVSSEDSLNDILGGTVLEDAEYDNYVKASLLISRDLSLAHGDQALIVNGRILGPIQPGSFSADDFPTLSAYESRKRVEPVIGALESILGSFEGLNRESYADLTSLVSSITSAIQLPDPSELGLFNQPYRPRERPYAHLSGDYTAFSFGDNSTALFQFGIVLSPLSEAAQKWTSLMEWLLTIPDVSIDLHINPARYRELPLKRFYRYNLSPRLEFDGNGEEIHASAEFLGLPVDPIYTLAMDVPQSWLARPREALHDLDNLLLRGLSSHERKQGIQAVFDLDYLVVEGHARDTFTNAPPRGVQLQLATNAGVPIADTQVVANLGYLQFRAKPGVFHLAIRPGRGRQIFKMESVGNEGWTSSGVDEVGDEITLTSFEGLVLYPRLMRLPGMGRVDVLAEPAFSDHSSKGLLENAVSWVSQLFSNKHTTELALSSRQAEINIFTVASGLLYERFASIMILSVLRNTKSSVKFWFIENFLSPSFLEFIPHFAKAYGFQYELVTYKWPSWLRAQKEKQRIIWAYKILFLDVLFPMDLKKVIFVDADQIVRTDLKELVDLDLHGAPYGYTPMGDDNVEMEGFRFWKTGYWKEFLRGMPYHISALYVVDLVRFRQMAAGDILRSHYQQLSADPNSLANLDQDLPNNLQRDVPIFSLPEDWLWCETWCSKDRLHRAKTIDLCQNPLTKEPKLSRARQIPEWEEYDGEIAQFARKLAEEGKMRSEIVAADVNVLADVGSGRVSSTVGDVGQTENNPGDENQHNLGTHGVPKLY

SEQ ID NO: 3965 - protein, 1538 aa, Ostreococcus tauri
MWRRRRVVAFVFALCAACVSESNAARSVEVALSAGWNSTSISLEALAYALDVDRDAFWTLARSLDEGVRDSKTECDGFIDEASRRAHGSAASARAAGLARGLRVASPRVAATRDQAETDVGTSDGCCRVMYEGETYGEVEALGRAIEGGTTEGARGRRAEPRDAFWRDENVNISTAIAYAAPGTTCFAQMHEILAGASDAGRLNYVLRPTLFDGCARDDGCAALGQTGDNLRLAGFGVELAVKNMEYKAIDDSKVKTDGGESEDGSDDEATTVSPGAELKDESVLGFNFAKLSETYPDHVEGLRSFRDELVGKAQLSSDAPLKLWDIGNLGLQATQRIALADDPLRELVELSQNFPSLANGLSRMKLNSTLVNEVKGNHKMVYPGGLVMSLNGENLELDTIDIYTLTDIISKEIQHSQTLSRLGLSESAVSRLLRLPGRSGASVKVNMTSDSIIFFNDVEKDLKYKRWSKNLGQLRFQAQGGFHRVKYNMYNLAVFLDPSKPSTWDVIGMMAHFQQSTVPVRMAQVVVTKLGNEDPELKVLGERVYPDVGEPVMRAANYILQQYGAVAQHEFLAAIAASRRPHQDSSPWAPPMYYPPSVSMARAAFVKTLNKYADDSEFEADELFDEFESSDSPKADKYVDAVRAHVLGKGLTTQSFLLNGEYGDEMMAFRGQATLDQLIVHSLRQEMSRMQRLAFTDELTEATKNMAEFVQQGATTKYVPWIVDTQKFPPVYHAPIPFASIDALEYVQHGDIDVVKAMSLVVVADGDTDLGAAMIAAAVSHVSSHAGRNSRVTVVHSGVNVLGERARAIQAALHVPTRRTKIAKFLEELLSSREASAEEIAERVGLNADDFNRVSNDEKLMVDVVQHSKRFLSYHRMNSHCAIVANGRVLDLTERKCTIDVTDIDALVEVEMAQRSTYIFDVVSTEMLGKSEPIIEPKLLSQAISDAAALVAVKQKKASNKRTVESLDKLIAQAKSTAFVAGTGTIVQIEAVLDPLSKEAQRVAPVLALLRDRLPDEVTIRVVLNPRAALQDLPLKSYYRYALPPATLDADPLVVITNVPTHKTLTTHVDFPEPWMVTTHKAKYDLDNLILKDIKEKVVSAEYRLESILITGHVSDVDKDQTPARGTQLILEDKNTAVNPGTIVMSNLGYFQLPSSPGRHRLSLRAGASADIFAFKEVHDLLVADSEKLRVSDDELSIDVLVDSFAGLRLDISLKRRAGMETADVLDAGLSSTSPSGWLSKVLKKKSNERIHIFSVASGHLYERFLKIMMASVKRSTKNPVKFWFIKNWLSPSFKDFLPHMAEKYDFEYELVSYKWPTWLNKQTEKQRIIWAYKILFLDVLFPLELNKVIFVDADQIVRADMSELWNMNLHGAPYGYTPMCDNNKEMEGFRFWKQGFWQTHLRGKPYHISALYVVDLDRFRAVAAGDRLRVMYDSLSRDPGSLANLDQDLPNYAQHDVPIFSLPMPWLWCESWCGNETKAAAKTIDLCNNPLTKEPKLEGARRIVAEWPELDAEVRAFTEVVEHGWRASEPTVKDEL

SEQ ID NO: 3966 - protein, 1305 aa, Torrubiella hemipterigena
MVLTLFSQTEHVEFDRTLGSGKDAILYADPTSPKFGSYHQEISKMAAAGDVRYRLRYRRPNTLQTNPLPVSGYGVELALKRTDYIVIDDRDAGSQDSPKEKNQDTGSLEREDEEELSDIAPLSSSDLEGIGMKAASFIQQSKNPFETLIKLTQDFPRYSSIVARHVVSEEFAKEYEQAAEQRVPVGVNVLWINGMQLTDRQIQPFALISMLRRERQMLNEATSLGFSSKEVVSLLGHEKVAEANSDDSASLRYDWRDGTEDNNALVWLNDLENDEQYKDHPKTPRALLQRAYPGTIPPVGLNIFHAVTPVDFDDSEDIEMLTQLLTLVNRGITVRFGLVPALSSARLESTAKLVYYIMDTYGLPGLATLLEAKTNKADDKAALDHVATSNEPSADKKILELEKIQSSELYGEQVKSAEKWQSRLKASAADGKVMFVNGAIHTRSESWMQSLGMQITEDLQTVQRAIFQGELTDEESIAEAVFLTSAALRRNPYLSGGEGKPQVLDVNAIYSNYEDLFQNTPTFEASKDSAKEFWAAFSIISDFTSAEGRALVLAALEFKRQNDGVRLDFVHNPAADAPTTGIQSALKTKEDELKLVTDESQLGALVKSLESATSSTKVQKSLELLLSSAKLLSGHNYVLLNGRVVGPILADAPFLADDFSLLLDIEHKARIAPVYAAAEDLGLSEKLTDPVSVAKITSLVARSTVSDVPEGIFDSAPSTRSTLYDKWDLTHAKIEVGNPDTASVHLVGLINPLSEQGQKWAPILKVLADLDGVYLKLFLNPKTKITELPIKRFFRYVLESKPTFDARGNVKAPRGTFRNLPTDALLTAGMDVPPAWLVSAKSSVYDLDNIKLSSAKSDVDATYELEHILIEGHSREVEGGAPRGAQLVLGTKTDDHVTDTIIMANLGFFQFKANPGFYNIRLKDGRSADIYNIESIGTQGYNAVPGDEGTRVVLMDFEGTTLYPRLQRNSGMEEADVLAEPEDGVVAKGLKFAEGILGGLGKSASAKEHADINIFSVASGHLYERMLNIMMVSVMKHTKRTVKFWFIEQFLSPSFKDFIPELAKEYGFKYEMVTYKWPHWLRQQKEKQREIWGYKILFLDVLFPLSLDKVIFVDADQIVRTDMMDLVNLDLEGAPYGFTPMCDSRTEMEGFRFWKQGYWERYLRGKPYHISALYVVDLRRFREIAAGDRLRQQYHQLSADPNSLANLDQDLPNHMQFQLPIHSLPQEWLWCETWCSDESQAQARTIDLCNNPQTKEPKLDRARRQVPEWTVYDDEIAAVAKRSRKEEINTKSRAMRDPVHTKDEL

SEQ ID NO: 3967 - protein, 1491 aa, Erysiphe necator
MGGLNLALGLFLILLVNVFQDSLFSFASPTIDVELRTAFPAPPFLLELLETAGSENSSSYFPLLDKISDGIFASASTDEELYKKFLKVLLDEGHLADPEAVSSYQLALSLRLSTPRIESHYQYYNTSVETSITPENDSSCSTWFLFQGLKFCSPSLDKASGSASLDLKGDELLFDRVLGNKSAPATILFADITSPKFGAFHKLLAKNARDGKSSYRVRHRKSQTSEFKTLAIPGWGVELALKNTDYIVIDDRNDDNEHDSKTNLPLTEEEIKLKDNEMNDLKPLSTSELSSLAVKASSYIMQSESPLDTLLKLSQDFPRYSQTISSHNISLDFITEFQYNRAQSIEGGRNNIWINGLPLTERQMQIMDLIDIMRKERKIISGMSDIGFTPSEAIKLLLHKEIVSAQTLDGVDRFDWTDKTEGGNVIIWLNNIEKDRRYADWPVSLAAMLQRGYPGQLPFVRRDAFNLVIPIDLTDQLDLELILETALNFVNRRLPIRIGLIPVIRNSNAAIEAKVIYHLIEIYGLQTAIAYLRSQNESKLSLNSKDVFDQITQKAKIKTNKTRIIFDEVLKSDELESRIQSSQKWVDRICADDLVPPVIINGVVIPKDEFWLQKMSQQIYTDLQLIQQTIVLGTENVRSQDFWVPSIFLNQAINRRNKLIIPENRKDLNFFDLNSIEKKSSEFFKDLPRFSASSSVTNSDIIFMILIVDLDSEMGENLLTNAATLYKKSPSIELLILHNPATESKPKLSHGLFNYLENNNLNGLEAVENMTATLYGQQSFHESTKLGESKIYWQKFAPISRLLGLVPGQNAILVNGRLIGPILNSKYLQMEDLELLISFERNRRVTPIFTALKDLKLEDKIQDPLKAAKLSSIIALSTVSEITNSIFGEASSIREDQFSVWRSQYTAIEVGDASTANIQFTVLLDPASHIGQRWASILKVLSKLKGVYLKIFLNPKDRLKELPVKRFYRYVLESEPLFDDTGAIKSLHGSFTGIPQEALLTVGLDIPPAWLVTPKISAHDLDNIKLSSVKTDINAIYELKNILIEGHSREVVGDQPPRGTQLILGTKKNPYIGDTIIMSNLGYFQFKANPGYYSISLQKGRSFDIYHIDSIGASGWSSVPGDDKTEVVLMSFKGATIFPRLSRKPGMEREDVLETRASSEMSFVSQGLKFAQGILSKGTYSPENEASINIFSVASGHLYERMLNIMIVSVMKNTKHSVKFWFIEQFLSSSFKEFIPYLAEEYNFSYEMVTYRWPHWLRAQSEKQREIWGYKILFLDVLFPLSLNKVIFVDSDQIIRADLIELINLDLNGAPYGFTPMCDSRTEMEGFRFWKKGYWAEFLRGLPYHISALYVVDLRRFRQMAAGDRLRQQYHALSADPGSLSNLDQDLPNHMQKVLPIYSLPQEWLWCETWCSDEALKDAKTIDLCNNPLTKEPKLERARRQVPEWTKFDDEIAALDKRRRGSNDLGEKSSKSSSSETIPEIKSTSVKKDEL

SEQ ID NO: 3968 - protein, 1299 aa, Parastagonospora nodorum
MLSKTAKEGKTSYRIRHKPSNKASKSPLVVNGYGVELQLKRTDYIVIDDRQKDESQPSGQKPLVTGLDEDQEVADLKPLSKDEVSDLGVKAASFVMKSDQPMDTLLKLVQDFPKYSSIIAGQNVSESFLEEHTKNREFLLPTGFNMIWINGVQIPARDVNPYSLLSHLRRERTLINGIRSQGLSAPDVVALLSHEAIAATQTQDEPQRYDFRDEIEGGNVIMYLNDIEKDDRYESWPTDLRAVSQLPSVRRDIHNAIVPIDFTSIDDVTTIVDTILSLVQRGIPLRWGLVPQILTDGALEQAKVIYYLQDAYGIAGVTSYLQDSLNNKNLASPDKNAFASVIKDGQLVADREALELTEVLKSEEVLKRAEAAKQYLKRLAANVPNAPVFVNGVPVAQTDEWLGVLSQRIGSDLRQIQQNVFNGVFNEDSWVPQFFLLQASARRNPFIVPENEKNITLINMAEFEQAHGENFGKMPRIKAAESASKSDWVHITVLGDFDSPSGLALLKSAATYREENPNAEIVLIHNANADSERNTSDDLLKAFTESNGDFTTEALSALLDKTSDSRPVTEESKAFWKSASPILEVFTLKPGQNAIIVNGRQVGPIPDDLEFSKDDIETLVTYETNKRTEPLSLALTDLDLTSKLSTPFDVAKIQSLVTLSTISDVPDGIFESASTLRMSKFNNWTTEHTAIIKGDFDNAVFQIVASIDPATEQAQKWIPILKTLSDMNGVHLKLFLNPKQMLQELPIKRFYRYLLDARPTFNEDGSTGSLEAEFSGIPKEALLNLGMDVPPPWLVAPEESIHDLDNIKLSTLPAGKNINAIYGLESILIEGHSRDTTLGGQPPSGAEVVLATEKDPHYADTIIMANLGYFQFKTNPGFYNIRLKTGRSQEIFSLDSAGPKGWAPQPGDETTEIALMSFQGATIFPRLSRKPGQEMADVLTPDESLASELVGKGTEKVNKLLGKLGLNFDSQKVLDKGAELLGSKSKKKGTQADINIFSVASGHLYERMLNIMMLSVMKHTKHSVKFWFIEQFLSPSFKSFLPHMAAEYGFEYELVTYKWPHWLRSQTEKQREIWGYKILFLDVLFPLDLEKVIFVDADQIVRTDMYELVTHDLEGAPYGFTPMGDSRTEMEGFRFWKTGYWANFLRGRPYHISALYVVDLVKFRQLAAGDRLRQQYHQLSADPNSLSNLDQDLPNNMQFNLPIHSLPQEWLWCETWCSDADLEKAKTIDLCNNPMTKEPKLDRARRQIPEWNVYDEEVGALARRVKGEKAKEEAVVDVQAEEQVREKKEKDEERRRDEL

SEQ ID NO: 3969 - protein, 1470 aa, Chaetothyriales sp.
MPTSILTSSLAGLGLLACMLLSGSAQAASSVNVALKASFNSAPLLVELLETAAAENGSSYFPLLDRIADGAFAESSTDKELYDQFVGLLRDEGHLQSPEALSSFKLAFSLHASAPRVQAHFQYYNRTISPHLPAAQDAACPVWVQLDGHQYCSPALERAQQSLSLDEAEEVLPFDRVLGPEPGEAPSTILYADIANPLFPDFHKAVSAAARAGESSYRLRYRRSAGEHKPLYLSGYGAELSLKRTDYIVIDDRDAAQSDSGHQAVLKEPADADELEIKPLTSSEVSNLGFNTASYIGSHQDPLNALVQVTANFPKFSSFLAGQNASTGFLAEHQANRKRFVPAGANVLWINGLQIETRQVNAYSLLAHLRRERKLIEEMKAIGLAATEAVSLLSSGVIAQAQADEVVQRYDWRDDAEGGNVILWLNDLEKDKRYSQWPKYLVGLFQRGRPGQLPPLARDIHNLIVPFDVADIKDIELVVKHLQSLVKGNVPVRIGVIPTGSSQTAETYARLSYYLLDRYGVDTLLAFYQGLAKAKKISTNAAKHLAAAIKDAELAEGKQALTYDQILQNEALGEDVSKAHDYLDRLELKAHDPHFIVNGVVLPRGETWFELLSSRVFLDLQLVQQAVQQDAIAEDTWVPHFFLFQAVARRNSWVVPSDSKDIKIVDLAALTSAHPDAFAKLPKSDGEEATLLSDRAHLLLATDLDSPTGRELLASALELKAARSEIELLIHFAAFWAAYQQQAKELTAENLRALIQQYVDAAAADDTASSAAATVWEHGRGLIRDLGLEAGQSALWLNGRLIGPLPAPFTLPDLLLLLEYERSSRIAPVTTAITSLGLEERFANALDLAKITSTVARSHKSELPEGLRDAAPLIRTERFKSWNDTYTAITKEPAADPLVQVVAVIDPVSEVGQSWVPILTTLSELDGVNTKIFLNPKAALKELPVKRFYRQVLSSAPSFSQNGSIQAPGAAFTSVPTDTLFNLGLVLPPSWLVSSEEANADPDNIKFNPAGNDADVEVVYKLDHILIEGHARDVTAGPPPRGVQLLLGTTEQAHVTDTIIMANLGYFQFKANPGFWKISLKPGRSSKIFNIDSVGPNGYSAQPGDETSSVAVLSFDGLTLFPRLSRRPGMEGEDVLAEGSKGQVADMVSKGASFLSSLGLSKDSKLAKSSTNAEINIFSVASGHLYERMLSIMLVSVMRHTKHTVKFWFIEQFLSPSFKSTLPILAEHYHFDYEMVTYKWPYWLRGQREKQREIWGYKILFLDVLFPLDLDKVIFVDADQIVRTDMIELTRVDLHGAPYGFTPMCDSRTEMEGFRFWKQGYWKNYLRGKPYHISALYVVDLRSFRALAAGDRLRGQYQALSADPASLSNLDQDLPNHLQHNLPIFSLDQSWLWCETWCADDALTTAKTIDLCNNPLTKEPKLDRARRQVPEWTLYDDEIAAVVRDKTNNNQAQEQAQPVDTQSAWQKKEL

SEQ ID NO: 3970 - protein, 1574 aa, Termitomyces sp.
MRRSLQLLGLSLAVVGGRCASPPVEVLLRSSWPASPPLIEILETIALENPDTFFPLLDKLTDPDVLPTPEKLTPEAAHQAVMEIAAVNGYLTEPGSLAAVELNLALHAATPKIEAFYNHYLDHHNNTKGTDCGSWIEWYGEVVCDIEQLVKLAGVDTIDPTTKPVSSPFPRPRLLTFDHIYPSPAHTLNRPPRTAILYALLSSSNFRELHNYLLSLASKPNPHVEYVLRYVPAKRDASVRNFLSGYGVSLNLKKTDYLAIDDRNTRNGANGQGTVERDESVVTEDPVLALIHNHPENATAPSAKTPLTVEENLNLSFQAIQLVADSPTPLQTLKHLTQNFPKYAPTLARRVVVNESLSSEIYANSLKIQGGGHMFWLNGAMVPDRDVNPFGLLRWLKKERSLIGSLTGEVGLSRKEAFELLTSPEVAGSQGNGVLDGIVDASDRIEGGGVVVYWNDMEKDSRYERWSTSVFTLIQPVYHGIPSVKYNVFNIILVLDLSQMDGLAFIAGNMANLISRGIPLRFGVVPITETEDSTRMARLFSHLISTHGRKKTLKFIQDFIQAQPVEKTTVDWVVLSRTYTDLAESEGSGTHVTSLEDILSGKADPGTLLDKVRDYVERLDVRLEATTTGHVFFNGRHFSFDQDFMRNMQSELSKQMHFLQEKIYTGKLTEAHNETLGTYFYDQPTTGIRRNQYIFQTDAPGSLKVYNLPELFARMRFRVVPATFVYPACTVAESPIIPLSLFVIADLDSQEGLKLVEEALLSIVRFLYMLHFAPDDEYHVSQGLNTRTRISFIHNPIDDPTERTDRPLASWLIAYLIKTQSLSKASPEQLLRALDFSGKEYGEYVITSRLVARELDVKPGERAVLVNGRVVGPFVGGNFRAVDFAALENYEIRKRVEPVMNALETISPSASQTDRATYANLISMASSAIAAIQIPDPSEVGLFQTPQRPRNRQYQLLDSQYTAFEAGDHSMALFHIAVVMDPLSVVGQKWSSLLEWLANVPEMFIEIHLNPGHHIEMPLKTFYRYNLLSSLSYQENGQEVAAQTVFEGLPIKPLYTLAMDVPLSWLVRPREALYDLDNIQLVNLSPEDHSLKAVFDLDYLVVEGHAREVHNNNAPRGVQLELLRGGQEPYAVDDTQVVANLGYFQFKVKPGVFGLEIRMGRGRDVYRMESVGNEGWNSPTIHEKGSEITLTSFEGLTLYPTLTRKPGMDNVDVLTHPERENNFSSILGDLTSRVTSLFKPKGNVPHGEEQAEINIFTVASGLLYERFVSIMILSVLRNTQSTVKFWFIENFLSPSFLEFIPHLAKQYNFKYELVTYKWPSWLREQTEKQRIIWAYKILFLDVLFPMDLKKVIFVDADQIVRADLKELVDLDLHGAPYGYTPMGDDNPDMEGFRFWKTGYWKDFLRGLSYHISALYVIDLDRFRQLAAGDILRGHYQQLSADPNSLANLDQDLPNNLQREVPIYSLHEDWLWCETWCNKDRLHRAKTIDLCQNPLTKEPKLDRARQIPEWEEYDREIAQFTRQLADAGVIHSGLATADTNVLANAGTTQQENFEPSHSEPEGFPVRSSVPERDEL

SEQ ID NO: 3971 - protein, 1504 aa, Tuber melanosporum
MRLPNFGGRLSVGLLLLSPCVRLVSCGPAVGVALKASWNGAPFLLELLETAAEEVGASYFPLLDRIAAGDFANIDSDKALYHAFLRVALEEGFLVDQEELASFNFALSIHAAAPRIEAHYHYYENSLEPIMGRLYEATCEVWLQWSQKQICGTDGDFKDMLNNRRKLQFDRVLETREDKPAAILYADIEAPNFKRFHEVLKDYAKQGILTYRVRYKPRTNRKGRPVILSGYGVELALKKTDYIVMDDRDVSDEGGVKKGRDTQTPIGELDDQEIQDVEPLHPKDMSFLGMKAASFVMDSGDPLATLLKLLQDFPKHASSVAAIEINPDVADALQGNWDSFLGPGQNALWINGVQLENSDINAFALVEHLRRERRFVNSFKTLGVNSSEAVQLLSHQILASSKQDEVPQRFDYRDNIEGGKTIVWLNDLEKDLRYREWSAAVDTLLRRVYPGQLHPLRRNVHHLVVPVDLASKDDLALITEQLRLFVDRKIALRFGVVPLTGTPEAVAQAKVFYYLNETYGLPVALGYLELALGSGQFSKPNAKVLDQVIKEAELIEGRIALSLEEVLSSETIEERIKTSKSWAGRMGANTLIPPVFINGLSLARDEQWMQMMSARLQVDVQLTQRAVYEEIANDETDFAVLLLGNAATRRNYYIFPEGEESIKTTNVGKLLQEYARIFEKLPTVVSDKPDKLAESTIWVIGDFDEKDGYELLQGASELQKVASGVNLVFINNPQLVSERPALSTLLYQLHQVGFFKGPEQLQQLLEEVWQFPDHIESGNFWRESQKMLEVAGFKPGQRGVIINGRVVGPVPIDEEFGAEDFRQLLEYEHSRRILPALRAANEIGVLEKLKGFQSSACLTNLVALSNIPEVPTSMFQGPSLARTDAFNRLWKREHVAIKLGDKDKAIFQVVASIDPASELAQKWVPILKVLSEMRGVYMDIYLNPQRVITELPVKRFYRHVLNSAPTFDENGNLADPQARFENIPELPLLSLSMDVPPSWLVTPKESPYDLDNLKIQSLKDRLKGSDIEALYELRSILIEGHSTDIINGGAPKGAQLVLGTEKEPHFADTIVMANLGYFQFKANPGYYKMELKEGRSREIFHIDSTGTKGFQLGKREITDEDSEISLLSFQGATLFPRLSRNPGMEVEDVLEQSTGVPGNIGDFAAKFLRKVEDVLVNIGFLAPAVDLKPQADINIFSVASGHLYERFLNIMMLSVMKHTDKSVKFWFIENFLSPSFKDFIPIMAKEYGFEYELVTYKWPHWLRGQKEKQREIWGYKILFLDVLFPLDLDKVIFVDADQIVRTDMKELVDLDIQGAPYGFTPMCDSREEIEGFRFWKQGYWKSFLKGLPYHISALYVVDLKRFRQIAAGDRLRQQYHQLSADPNSLSNLDQDLPNHMQSMLPIYSLPQEWLWCETWCSDESLKTAKTIDLCNNPMTKEPKLDRARRQVPEWAAYDEEIGALASRSLKKGGEQEESETAREVEKEEETMEVLGEREGERLAIKEEL

SEQ ID NO: 3972 - protein, 1488 aa, Unknown
  Description of Unknown: fungal sp. No.14919 sequence
MIRLLNQPCSLAATLLAAVCLGPNYVTAGHSVHVAMKAAFPAPPYLIELLETAAGENATSYFPLLDRVAEGAFVESTTDKALYERFLEILQQDGHLATPQALSTFKLALSMRTAAPRIEAHYQYYDTAVTPSLGRAKGNCDEWVLLNNEQYCSVTLANSDGGVSGESQVRVLPFDRVFGTGEEAILYADITKPEFGPFHNALTDMARKGEISYRLRYRISQRGELEALPVSGYGVELQLKRTDYIVIDDREAAETGVDQLQKTGSTEVVLDGEEEVSDLKPLTTNELASLGLNTGSFIMESEDPFQTLVKLTQDFPKFSTSVAARNASSAFITEHRQNREVAAPAGINALWMNGVQLPERQIDPYTLIDGIRRERAFIKGATELGLTAKEAISLLGDREVTMAKTDDEGPRFDWRDQLEDGRVIIWLNNIEKDKRYSGFSPSLSTLMQISYMGQIPQVRRDMFNLVVPVDFSSADDISLVVERLQGLVKRALPLRFGLVPLTPTKESAERTKLVYYLVENYGLPSLMSFLEPFATEGQATQSEEASFDRAIKTRKLKADANELPFGDIFTSEDYERQLQLSKNWVERLQAHTNVPPVFLNGHAIPREANWLQTMSMKLSADLQQLQGGLFMGTVTDDMWLPSLFLENALTRRNPYTFPDSDNPLKVLNVHKLYSEHDDLFGRVPVIEADADTNKENWAVFTLVADFSSPSGLRLLHSMLKFRQSNLGVRVDLVHNPTSAENGHVINAFLAESASKLLEIENLETLEIIVSGDANKGDDGYGHALARFLAFSGLAPGNRALLVNGRVVGPIDAEFVFQEDDLQQLFEFEQSKRILPVYRAVETLGLVDKVSGPIAAAKLTSITALSTISDLPEGIFESPSIIRTTVYDLWNSSHTTIDVGNPDTADIHFVALLNPTSEIGQRWAPILKVLSELNGVFLRIFLNPNERLEELPIKRFYRYVLQSEPSFDDNGALRSQGATFKGLPSDALLNLGMDIPPAWLVAAKHSVHDLDNLKLSSIKSDVEAVYELEHILIEGHSRQIPGGGPPRGVQLLLGTERDPHFADTIIMANIGYFQFKANPGYYNIHLQKGRSSDIFEIISVGAKGYEAVPGDEGTEVALMDFQGTTLYPRLKRKEGMETVDVLEDPSAEGSNDLLSRGLKFAEGILGGSKSKSKSISNEIHAEINIFSVASGHLYERMLNIMMVSVMKNTKHSVKFWFIEQFLSPSFKEFIPHLAEEYGFKYEMVTYKWPHWLRAQKEKQREIWGYKILFLDVLFPLSLDKVIFVDADQIVRTDMIDLINYDLDGAPYGFTPMCDSRTEMEGFRFWKQGYWKNYLRGVPYHISALYVVDLHRFRQLAAGDRLRQQYHQLSSDPNSLSNLDQDLPNHMQFVIPIHSLPQEWLWCETWCSDESQKDARTIDLCNNPQTKEPKLDRARRQVPEWTVYDDEIAALDRRRKGLDAPQNIIGGEETNTKSRRLEDESVKTRTKDEL

SEQ ID NO: 3973 - protein, 1428 aa, Clavispora lusitaniae
MVLLLRFTVLFVAVVFASTLQIGLEANWTEAPFALQLIESVAEFDESLYIGAAKALFRGEEDNSDFDDVDDEEDDEHTGNSNEVPDGPKSDRENYESVAKVLSETQLGLVNLHLVNKLASPRIQAHYDFFNNEFDSEALKTIEKKCATDSFGEPLIDPLKAWVKYGNKYYCSESDLFALQTDTFSESVMPFDRVIGSDESKPLLVLYGDPSCSRFAGMFHTLMSFAESGSIRFVWRYVPSSFGASKIPGFGVTITSKSKSNKNAPQVEGDILKALIKIKKDGRELFDLEDDKLSTLSINIVSLVLQQSDPVSQLALLKEILHNLPLYGPYLGNVEASESSRRVEKHALANEKKGAAYESVGLYINGAATHRLQTDLPNIIDKLAQEVSTMEEFRSYGFNMEQSKLLLSKFALLSAFKESEFKSGSMSNRYSLYNDVFVPFDEDSGGVVFFNDIEKDESYQMISTDTKDMYTGSGASQLRVSQIPPLRENVHDLIFVMNFSNKHQLKVFFTMAKIILDRGIAQQIGVLPLMESDKDQYIADLFYHILEVGEVKEAMAFLYKYYESKEEEENELFSKIKMPPELLGSYTQYKRCIEDFSLTEASVVINGVIHSMRSNWRNALGHQITHDVKLLQKSIREGSDKDKSLKSVLYSDSKSSRNTHVVPLDPANIRYKKVTKEMIDSSYAFVKEKDSNDISLTFWLIGEFNLPIIRQQFINLLKFMDLYNDKSIQIRVFDTSKNQKHLNGIFESYANKSLKSDDIARIISMVKAGKAPHGEKDAEKMAILERNHIQSHSPMMLLNSRYLSLTQEFTIKDIEELLEYEFKQRLGIFKEITDAYPDQFSWKPIMHFRKGNLNHLDWFDLVSSTLSNSFFVEDVLQLSDVSRFDFSSLNFANSIDVTGYSKEKPIDLLAIVDPADEFSQKLVSIFSSLSDLSFVNARILLQPLSESKTPNDLSRFYVDGFQSSQPKFDANGRYIEFSSCNFESAVADTEMCIEIDAPSNWYIIQGKNSDLYDFTKFTMVGDTDLGFTLSKLVVEGYVRDVTTAKSIPGLILEASKGTTSQDAFTMQTMGYSQFRLDPGAWTLQVRSVEDEEPSYDLLSASENKYDKNDCLSDSVPLLVKSLKRHHIYPRMKRTETHTSHLRAAKEQADINVFSIASGHLYEQLMPTMMLSVVKNTGKSVKFWLIENFLSHGFRERVPGLAEKYGFEYEYVGYQWPAWLRQQKQLHRKVWGYKMLFLDTLFPADLDKVIFVDADQIARTDLKELVNIDLEGAPYGFAPMCDSRKEMEGYQFWKNGYWPTVLKDDLKYHISALYVVDLRRLRETLVGDKLRSHYQKLSADPNSLSNLDQDLPNNLQRQVPIHTLPQEWLWCETWCSDESKSSAKMIDLCNNPKTHEGKIEQAKRVISEWEDYYNEISQTEESLRVHDEL

SEQ ID NO: 3974 - protein, 1463 aa, Fusarium fasciculatum
MPCLSQCMTMALLAVAGASASPSINVGMNAAFPRGPYLLELLETAAGENSTAYFPLLDKIASGYFVSAKSDAELYDQFLEVLQNDDHITTPEALSTFKLSLSLRAAAPRIEAHYQYYSTAVDPEPQANGADSCDSWALVDNSKYCSPSLDTSVEGEVSTKQVKVLPFDRVLGLGKDAILYADPASTSFGPFHDALSKAARQGNLSYRLRYRRSAGASRPPLPVSGYGVKLDLKRTDYIVIDDREGGQKTPQTPVAADVDLDATEDVADLKPLSSSELASLGLKAASFILKSENPLDALVKSTQDFPKFSASIASHEVTQDFVAEQEKNVAAGVPSGINFLWMNGVQLIERQVEPFALIEMIRRERKLIDGVRELGFSGQQAVSLLGHSEIASSKADDEPPRFDWTDRLENGKAVMWLNDLEKDARYQKFPSDLTALLQRTYPGQLPQVAINLFHVVAPVDFTNLEDGRAFGQLAQFMQRGITIRFGIVPLATTPESTAQTKVVYHLMETYGFEALITYLQESEEGPEGVANKKSFARAIDGREPLPEMTKMTLSEVLEAESYVQKVKASQAWASRLNADTTVRPIFVNGMAIPREKSWVQAMGQRLTEDQQTIQKAVYFGHVNEEATVSDLFLNSALSKRNTYIFPDDDKALRILDINKLYTEHAGLFGKVAVLPADPESAKEDWAVLTTIADLNTDDGQDLLIAALEFKRNNRGIRLDIIHNPPSPTDAHAINGAFKLSEVKLAEMKSKDDLKAVLEASWTAEEDGFATKLSNFLSTSNILPGTKSLLLNGRVVGPLPSEISFKNDDIKQLLEFEQRNRILPVYAAIKELGFADKLSDPLAAAKLTSITALSTISDLPQGIFESAPSIRSTLYSTWNSTHSAIEVGNPETASIHIAGLLNPTSEQGQRWAPILKVLSELDGVYLKLFMNPKEVIDELPIKRFFRYVLDSTPSFDASGHVQSPKALFKGLPSEALLTAGVDVPPAWLVAAKDSVQDLDNIKLSSVKADIDVTYELENILIEGHSRDGKRGAPRGAQLALATEKDPLVTDTIVMANLGYFQFKANPGFYNIQLKEGRSSKIFNIESVGAQGYAAVPGDEGTEIALMDFKGTTLYPRLNRKPGMEEVDVLESPDSENDGIVAKGLKFAESFLGGTKSPKEISAKEHAEINIFSVASGHLYERMLNIMMVSVMRNTKHTVKFWFIEQFLSPSFKEFIPHMAAEYGFKYEMVTYKWPHWLRQQKEKQREIWGYKILFLDVLFPLSLDKVIFVDADQVVRTDMMDLVNHDLEGAPYGFTPMCDSRTEMEGFRFWKQGYWANYLRGLPYHISALYVVDLNRFRQLAAGDRLRQQYHQLSADPNSLSNLDQDLPNNMQFAIPIHSLPQEWLWCETWCSDESLSNARTIDLCNNPQTKEPKLDRARRQVPEWTVYDNEIAALDRRRKGIKDKNENTESQKAGDGTHTKDEL

SEQ ID NO: 3975 - protein, 1518 aa, Clohesyomyces aquaticus
MRAFRLLLSLRSLLGLSTLAPLRASAGPTINVALRASFSSAPYLIELLETAAEENSTAYFPILDRIAEGYFSTSKTDQDLYTSFVELLQSDSHITDPATLSSFRFALSVRSAAPRIEAHYQFYNTSVEPSLQAEQNEDCQVWVAFEGKQYCSPELKKAHGDIKSGRWAAGRDQGTELPFDRILGPKSGAIPSLLYADITSPAFAHFHKVLSKTARDGETTYRIRHKPSLKGSNSPLTVNGYGVELQLKRTDYIVIDDRPAAEGGKAAAQKSLNTELEGDEEVADLKPLSASEVSNLGASAASFVMKSENPIDTLLKLVQDFPKYSSSIVGHNASEEFLKEHTANREQLLPSGYNIIWVNGVQIPQRDINPFTLLEHLRRERKLINGVRSQGLSGPEAIDLLSNSAIMDTQSEDEPQRYDFRDATEGGNVIIWMNDMEKDKRYEDWPTTLNMLLQRLYPGQLPQVRRDIHNVILPVDLSSREDVFAITETIQGMVKRGIAVRWGLVPRTLNKGGEAHAKIVYHLLKTYGLSTVMKYLSACFEARKFAVPDKTIFDGAIKNAKLRKDHEVIPYEKVLASEESEQRLASAKQYLARLAADGAESPLFVNGVPIAQNDEWVQGMSQRISMDLRAIQKGVFEQIFQEDSWLPQFFLFQAALKRNPLIIPENEKNITLYNMAEFEAKHGGIFSQMPHVLVGEESSKAEWAQLLVVGDFDSTSGRALLSSATEYRKEHDNVELVLIHNPQADSDKSNASEDLLEAWQKSGHVLSIEMLRALLAQESTFSPTPGNSTIFWKSAQPIVEFFKLKPGQGAVLVNGRFIGPVASDYIFAKDDIETLVSYESKKRLEPVAKALENLRLSEKISSPFDVAKISSLVSLSTVSDVPEGMFEHASTMRLDVFKQWNDTFTAITKGDKSTAIIQIVASVDPATELAQKWVPILKTLSDMDGMYLKLFLNPKQMLQELPVKRFYRYLLDSKPTFNQDGSVDSLEAHFSGIPKEALLNLGMDVPPSWLVAPEESIHDLDNIKLSSLNNGANIDAIYGLESILIEGHSRDVTNAGQPPRGAELVLSTEKNPHFADTIIMANLGYFQFKANPGFFKIQLKSGRSQDIFNIDSAGPKGWAPQPGDETSEIVLMSFQGTTLFPRLSRKPGKEDADVLASDESLASELVGKGTEKVNSFLSQIGLGSLKTDKLVAKGAGLLAKTGLSTNPHAGAVQADINIFSVASGHLYERMLNIMMLSVMKHTKHTVKFWFIEQFLSPSFKSFLPTMASEYNFSYEMVTYKWPHWLRGQTEKQRQIWGYKILFLDVLFPLDLDKVIFVDADQIVRTDMYELVTHDLQGAPYGFTPMCDSRTEMEGFRFWKMGYWKNFLRGLPYHISALYVVDLKRFRQIAAGDRLRQQYHSLSADPASLSNLDQDLPNNMQFNLPIHSLPQEWLWCETWCSDESLKDAKTIDLCNNPQTKEPKLERARRQVPEWTAYDDEIAGLAERTRGGEGKGEEARVVVEKEGQGKKEGGHVRDEL

SEQ ID NO: 3976 - protein, 1664 aa, Sporisorium reilianum
MRALPLLSAGWAWLALALTLAIPAIPVHADSPPVKVQLRASWSKIHLPSGGSPFLLELLEAARSQRPSSFFPLVELLTSKYTAAELRGASDEWLANTVQELIQAHRLFGTSGQIADEALDTWRMSLALSNSSPRIQALVQLYQTLQLDETWRKGSKDASCVSWVHFRDQVLCSGEDVRQAVRDGGPATPSIHDPSRDVALGHSRSSVGRNAATQSLVLYADPFSDNFRGLFSALEEHTNQPDASFTYTLRWRPSTTNSASLSDVEQTALLSGYGAILDLKKVDYLVIDDRKLKDDSDIGDVGISASSQSEEGNAAKKAADEARWLRDQIGAESNSSSATLSSLSEDQIADLGIKAARLIMDSPDPLRALQELSQNFPLHAADLAQTTKWDDADRSAALVDAVLNLANMRIEPGHSDLWLNGQSTSTRDFLPLTLLETLRRERSFNHALQHPLAGGGLNVTEAGDLISSSLVGRAFLAQADGSAATAIFDASDRIEVKNAPEATDVGAITWLNDLEKDAATSGWSSDLMDLLHPMWPGKFPRLSLNLFNVVLVLDLSQKESCRFLADTVIQSLGRVGLHWGLVPGGLEDEAGGGDAVRMARLFWFLLDQAGAQTTSDVLRKAAASRAGTAGALDVSLAVKEAKFALKSIDADGALTAKLDEALSGTNATYTHKEALGRAYIKRLRATRKESASGHVFINGQHQPFHAQIVHVLHQTVQEQIQVLAPQIYYGQISGDTPGLETFFYDSVGALSFRSALVGGGGTEGEAGGVEHGAVDLWSALVDDSVPAAGVDKVLKFFYPAATAGLLNSTVWVIADLDSEEGVALLGRSFEALAKDEAKFRLGVLHVPSLDGRADARGNVVSTLLYRLLAEGRTEGVSPAQVLDVLKQAHDDPHVSVRHLEGALGLSTAEADSAQKAHQFWQTLSPVLVSELDISSSPAILVDGHLVSNLDPSTIEARDITALVEYEAGQKLPYIMQALKLLRPGIDDMPPRQRQDLVFAALSVMSGVYDQDSSGQGMFTPKANSRSGLPEQLGTRDHVFEHGERATADVRLTLLLNPLSEAAQRWSSLLLMLRELQGVYVRVILNPHIKLRELPLRRFYRFSAPHAPAFDAAGRAVATELRFFDMPEDAVLTLGLDAPAPWLTMPVEAVYDLDNIRLADVPAAARTKGVKAVYELKHILIEGHALQQTAASPAITVPRGLQLLLETPDGGTRLDTIVMANLAYFQFKAQPGLWKLKIRAGRSAELYEMQSVGGAGWSSASVGVAGEHMVLDTLAGLTIYPRVVKRRGKEEEELLEELDAQGRAVKPRGDAREGGVAASAGQLFLSARDKVASLARSVTGTPSSSTGVVTTRTHADINIFTVASGHLYERMTYIMVLSVLKHTRSSVKFWFIENFLSPSFKEFIPHLAAAYGFEYELVTYAWPHWLRAQTEKQRTIWGYKILFLDTLFPLDLGKVIFVDADQVVRTDMQELVDLDLEGNVYAYPPMGDDSDDMDGFRFWKHGYWKDYLRGRPYHISALYVVDLHRFRRVAAGDRLRGQYQALSADPNSLSNLDQDLPNNMQASLPIFTLPKEWLWCETWCSGKWLDKAKTIDLCSNPKTKEPKLDRAKRQIPEWTVYDREVARLAQRLVQEDKVGRSVVAPDSQVEAKHAQGEDKAADAHVHDEL

SEQ ID NO: 3977 - protein, 299 aa, Chaetomium thermophilum
ETGEATKSVSKTEHAEINIFSVASGHLYERMLNIMMASVMHHTNHTVKFWFIEQFLSPSFKDFIPHMAAEYGFKYEMVTYKWPHWLRQQKEKQREIWGYKILFLDVLFPLSLDKVIFVDADQIVRTDMYDLVEHPLDGAPYGFAPMCDSRVEMEGYRFWKTGYWANYLKGKPYHISALYVVDLQRFRELAAGDRLRQQYHALSADPNSLANLDQDLPNHMQFTIPIATLPQEWLWCETWCSDETLKDARTIDLCNNPMTKEPKLDRARRQVPEWTKYDEEIAELARRVREGTKHHHHHH

SEQ ID NO: 3978 - protein, 1785 aa, Smittium culicis
KTPQESYEAGIVWIRNQLAKPETELDPNSIDWVIGLYDLDLSTHTKVPKLISQFQYYNSIIKKSKEYTTNLEKINSKDSSEKNAIDCYSWVWWNGKMACSQEGLEKLVETDTFYGDTYKSTDSNIPVSLSFDHTYSTNLNDKDPENIAILYGNPSSPNFSKLNSYLMHLSDLGNTKYTLRMIPPKSDDSEIIINNNPNGMEMSGYSVTLFLKSTEYKVTDESDLFSNTDGEIEGSGNEWNFGFGELNELSYNSKKPEPFLEIDNNATVVENIDKELIKNLPKNIALKVLSSPQPFEMLEWILTDFPKYTHLLTDPIQNKTFSDILKKFPTGFGDLQNIVTLNGLVIPVTKLNPFDIVDKLENERNIISSLQSLGLPNDRVIDFISSSFSLNKEKSSYGSDSDAIKFDITDKKEDRVVVGWLNDLSTDSRYKNWPSGLMSILYSQSSSLPKISENIVSTVIALDFSSIEAVQFFIETILEAIFKNYPFRFGVVPMSSSSSASAVSNSKFCKNLSDYDFSDSIISKEIFPETSDPADIMGRVFYYFYNFYGIRATSDYFTDILTLIKSKDFINKVPKNSNLVLNAAKTTYESFFSEGKYKQNLKRINKLLPSFIKDKSLYQKIAKQYEQNPLSWDDIKSDFILSALMCKHNSYISRLDLILQDPAQNSASSVNSSPKVVAFANGDEIDMPNFLTGLLTSYRKSSAFLLTGLLSGTVQNNENDLLSLIISSSPNTSYRNPLITSKCSVDSSQSSNIASKKNQVGILSLYNTQQSKSQLDKVKNWISELKYLTILPDSDSSKIPTTVWLWADLDSAIGKSRVAESIVSIIDNTINNSKQSSGFRVSISHVPKSALRSNKSPKSTDQEDENDQEDGGDEGEGGDSSNDSSTPLPISNDGKLVYLFLKLAEESNSNGSYEKNLLTMVYTKLFLSNQNTEPIAGSTLISELKSIDSNSKSKFDEKLADEVASNLNSLVSKVAESITKETNQYYHKITSGLSNLLKVNYGSNNWDSVSVFTDGFESGDLLISVSGRIFPVVKKSQAFNHNVLSFLLSREYNSRIGGAEKAFIKLISGPDSSHKNIQERKNIDTFLMALSLIEQSKIKSKSDSIFETGKGTDRLDIFEGLKGYQDLTFETSPINSKGGDSNIYAHFKAMINPISDSSQDLVPFLRTLSKIPGIKVTILVNPLPQPDSLPLRQFKRYVMNHKPLFNEKSDGSRVGVGAEFNSMPNESLLTLAMNVPSSWLVSATKSDYDLDNINLRSIDSKHGVAALFSLNSVLIEGHAQDSADRSPPSGLQVVLTNGPHLVSKQKNKVDSSVYNRDAKQKYGKIHAETIVMANLGYFQLQAQFGVYSLSTRSGRSRRLYEMICLGSESYSKCNSVIGKKYTSNTESSNNYGVIMLDSFKGVTVYPVFSKRAGMENEPILAPEKENSFVKSASNDKGVLEQAKDMIGNLFGLKSNKATEDEDENTDETEKDSKIKNKEGELVHVKEADLNIFAVASGHLYERLMSIMIASVIKHTNSTVKFWIIENFMSPSFKKFVPILAAQYNFQYEFVTYKWPHWLNSETEKQRTIWGYKILFLDVLFPLKLKRVIFVDADQIVRADLQDLSNTDLKGAPYGYVPFCDDKKEIEGYRFWKVGYWKTHLRGKPYHISALYVIDLQKFRELAAGDKLRYTYQSLSKDKNSLSNLDQDLPNNIQHQVPIFSLDQNWLWCETWCSNSGLDKAKTIDLCNNPMTKEPKLERAKRLIPEWNVYDAEIQKLRKTFNMESNSSNKKKMGEESAKQFDKQEL

SEQ ID NO: 3979 - protein, 1757 aa, Leishmania mexicana
MVLILGVTAQTALGKGIHAAVEASWNETSLYQEGCEWAARSFGDEAFYSCLNALWPPSPSQDHRGSSADSEGAREAASARFRTQQLQYTRLLEVLFRLPETRGADRAFFEAEMAARVYSPAVEAHYALADKALRETTTPPSLSERDDSDEGEGGSNSRSACADSFAVVYTRTAPDAPLQALRVKTPSGLKSAVGGAGEPHRNALVSIDEVAFASFDHRHPASSLATVREVPAVVVLYGLPGSAAAHALHRVAVELSTPSDAASATAAGVPAYFWRHLPVSVSRLCAAAGAPERSYAAAMTSLWDRPLAVQGYGVTVDIKNMEYKVLDEKAAAQQQTQEQNSMTPDTGSSHDSTDAPASAIRVPETQMDRIVGGFHVDRLKERYPGSAASIDEFAILLDEEMGSDDVKVNFDAWELQKIGLAATQYISQVENHNRRLHVLMDMVKRFPTYAAALSRIAAVPSRLVEVQKTLFILRQRTRPGQSAFFVDGWRVAEKELTLFGVLEALHEEERLVRGIKTVLTTHAVAAADANSVGEDTVREARTVPLAPAVVEKVADYVKRKSRRAIVSFEDSADTESAYAIPSEHIIWINNVETNRRFKRLPPVLSLLLARGNVKTPLPRRNLLNFVFLLNPVSRSSLQMISLLFRLHQGDLVARYGLALADQTWSPVFEAEVQGGVGGFKGESAGSKAALQVFALVYHLAAKGKEDYVLLFLMELFEEATQARADTIPDAVISRVCTRTAQAQLNSDVGELISNADFLSHYHETQASLRRFRVPEYPAIFLNGVLLGNNIAVISTAFQREMALLRGWVERRALRDEMKDIYSAILKQRGAADHLQPAVVRAPVTMRWSDTPTTVAYIESLPYVYSASYAQEVPALTQLATLPCEFTTAMLQQLRTVMTALEECGGAAMAQGTIHEVCGTLRLSLVSCPAATSLFHRHVAALQQRLARSSMRKAARYTTLRRYVSHIAEAVASANVGVNAVLDTETVAAALAAAPLPADLQELVGVSRRTDTNASPQWARAEVQFWSALADAYHGSGGNVALVTNGRIVAMDASFSAADVLSAARLVAPITKAVQKAVMNVRFAEMSTADGGYAADELDNNFFASKAACLSSLFGDEFARHMVKQSSSMSALMREEGVLGSEKDWKPLQAVLFTVSNFAKEAGEEADATSGAVTQPLHHVTAVVDPSSRDAQVIVSLAHYLVQSPLHIHLTVLLNPSLDVKFPIRNFYQYVATPALAFEETTGRVVAPHATFSQMPSSTLLTLGVDEPPSWTVFSQDAEVDLDNIMLSRLPRNTLFVTAAYSIHSVLITGGTTDVQTGVAPDGLPLSLLHSSRARGAAEVASAARTTDTQVMANQGGYYQLQANPGLWYLSIKEGPVAAAYCIKAIDGHAVRDCAEGASGSSLTNWTQGQRIPLVIDSFRGRFLSLQVGHTPTSEVTTDLHTILQQMASDVRLEWPPSYSARTANPTLPAKPTLNIFSVASGHLYERFLRMMMYSVHKTSSDQHGINTTRIKFWVIENFLSPQFKRYIPLLAERLGFEVGFVTYRWPWWLPRQTEKQRKIWAYKILFLDVLFPLDVDRIIFVDADQTAQADLHELYNMNIDGKPIAMTPFCHKFKNKATTSFRFWEQGFWKDHLRGKPYHISAIFLVDLRRFRAMFAGDQYRSTYASLEGDPNSLQNLDQDLPNYLQSSVPIFSLPEEWLWCETWCSEKSKSKAKTIDLCNNPRTKMPKLENAKMVIPGWEELDNKLQSLSDSVLASL

SEQ ID NO: 3980 - protein, 210 aa, Moniliophthora perniciosa
MERADVLSEEDEEDDDDGFFGNIVDNIKSIFSSDDKEDGLVPKNEQAEINIFTVASGLLYERFVSIMILSVLRNTKSTVKFWFIENFLSPSFLEFIPHLAEKYNFQYELVTYKWPSWLRAQKEKQRIIWAYKILFLDVLFPMDLKKVIFVDADQIVRADLKELVNLDLHGAPYGYTPMGDDNYDMEGFRFWKTGYWKDFLQGRPYHIRQV

SEQ ID NO: 3981 - protein, 1335 aa, Zancudomyces culisetae
MRAGYGRLKGLGILLTGMLGFSMATGDTSPVKALIRGDFEAPDFFLELAEVIHSRDAKGFFKFVEYLAENKEVFAETDEKKYEIGKKWITQEMKSEYGNSERGKDFLLGVVDLELGLHSKVPKVVAQYNFYDAVVAKKEGSKACSVFVEWNGKQGCTVEELEKIVEVDTFYGDTYRDNTGNVEVIHSFDHMYEPEKSSSEKDNKDTEETENEEEEEQDEKKEPIKNVGILYGDPRSDGFMELHKFMKYKADQGDAEYRIRFTKKENGEKGKNMILSGYRVELALKSTEYRVVDDTGLFSSKELREQEGKEDEWIGERVNIGPRAQDRSAELRQADKKPIVKERTGKMEPASMKAAQMILEAEEPLNMLEWLATDYPKYSHVMMEYKNSSVLEKLNEYRSGANQNVNMITMNGLRLGEVDLEPFKIVEGIERERKAIKRLEEFGLSTEDAVNYISEGREKLGAEGSKELYDTREKEKVRAVMDIAKMLLFGKMSFEETDIYSAMLELRGRELVQDKSSLIIADDDEREFKMVQTEKLDEGWMKDIKYITNANSSVVNSNTVTIWMRADLDDVKSKKAVAGVLETMVNKVKKIDIRLGLFLEGTKQIKYTGKGGLIELYYLYKSINNESQTVDAQEIVELAKKTSKVNLKVEDVQAYIEKLSKAQDNQKNKAEELNLVLDKSQTEPGTVLVIGGKIYPTINKKVNVNTKIIRAIIEKEFEDNHEGIEMGDTLKQDNADKFIKCNVVYLETMRQHKSQGLFQNSWKHTRSNIELLIKNPEKFTKITKGKNDYFVEFKAIIDPVSEEAITWAPLLRILSAMTGVKVTVFIEPSADKMQDDGEGTIKKFSRIVMNHKPVFYKGERQEPIGEFENLPRQTLLTLDLKVPSSWMVSASKSEYDLDNIVITDNNDHIAAEYRLNKILLEGHAATTDGVSPAGIQLNLSQLRTKNSTVVSDTAIMANLGYFQLQSEFGAYFLNINKQQTVDDVYRIENIKHDDFNAASSDSNIIVIDSFNGKTIFPVFSKEDSGNLGRRTAQKAVKYLMDYIPRFGGGLTKSKKSLNIFAVASGHLYERLMSIMITSVMKQTQSHVTFWLIDNFMSPKFKNVFLPILSAKLGFEYRLISYKWPYWLNKETVKQRTIWGYKILFLDVLFPMDLERVIFVDADQIVRTDLQQLYDMNINGAPYAYVPFCNDRPEIEGFRFWNHGYWKDHLRGKPYHISALYLVDLTVFRKLLAGDKLRAQYQQLSVDKNSLSNLDQDLPNNMQHLVPIFSLPPEWLWCETWCSSKTFKNAKTIDLCNNPMTKEKKLDVARRLLPEWTQYDNYIHSVLNKAPVKDEL

SEQ ID NO: 3982 - protein, 1494 aa, Paracoccidioides brasiliensis
MVFKYIFSPWRLGGLALLATTFLFTPIASAGPLVNVALTASFNAAPYLVELLETAADENSTSYFPLLDHIAEGAFTEITTERDLYERFTQILQDNGHLTDAESISSFKFALSLRSTAPRIEAHYQYYHTSVEPSLVVAQDAVCTVWVYYDGYQYCSPSLKYAQQSVSGDQHERVLPFDRVFGDPSLPALVLYADVTSPMFSGFHQELSRKAREGQFSYKIRYRSSGTEASKPIFVSGYGVELALKRTDYVVIDDRDAEQSVLKDTDAAQTTLAPVDDAKNEPPTDLKPLSASEVSTLGINAASFVMSSDDPLATLLRLSQDFPRHSSAIAGRNATPEFIKEFHENQAAQLPVGLNTMWINGMQIDPNNIDAFFLLSHLRQERKLINRFREFGLSARQAVGLFSDPAVSKTQAADDSLRYQYRDDFEGGGVIIWMNNLEKDHQYDGWTKSLNSLLRPIYPGQLPPIRRDIHNVVIPVDLTSSKDIEIVVRNMQTLVKRRIPIRFGFVPLLQNPNSLEQARVAHYLLDTYGIEALVTYLQASYTANKTASPDQASFTAALKDHKVRDGHNPVTFKDVLTSENYDPILASTKSYLQRLAIEGKEPTFFVNGVAFVRDENFMQYIITAVSNDMDKIQKAVLEGDLEEDVWVPSYFLQGALQTRNPLLIPEDPRSIRIVDLNKIYENNKDIFDTLLRIPATSKSEHSMLDWTSIILIADLESESGVKQLRHLLELHEKHPGVETLLLHNGEASSVSKGLLTRLHSVRHGRDLDPAAVAATLDALVSGEDTPGSDANLATAYWNSLQELVREIGIGAGEYGMVINSRIIGPLPSSTVFDALDLEYMFAYERSERTEVVAQAALDLGLEDKISDPLSLAKLLSLMSLSTASDIPEGILNSVSNVRSNLYKKWNGTHSAISISNSDDPSIYIVAAVDPATETAQRCIPILKVLSELNGVNLKIFLTPREAIKELPIKRFYQYILKSTPSFSEDGSIAKPQATFHGIPGDALLNLGMDVPHSWLVAPKESIYDLDNIKLSSLKEGANVDALYELEHILIEGHSWDVTTRTAPRGVQLLLGTEKKPHFADTIIMANLGYFQFKAQPGCWKITLKPGQSERIFRLDSVGGKGHRPTPGDENNDVALLSFRGKTLYPRLSRRPGHEKDDVLDPDPKPNSAKDYLSKGLSFASSVLSSVTGPKEKHADINIFSVASGHLYERMLNIMMVSVMKHTGHSVKFWFIEQFLSPSFKSFLPHLAAEYGFSYEMVTYKWPNWLHEQQEKQRIIWGYKILFLDVLFPLSLDKVIFVDADQIVRTDMYELVTLDLEGAPYGFTPMCDSRTSMEGFRFWKQGYWKKFLKGLPYHISALYVVDLNQFRAIAAGDRLRGQYHTLAIDPNSLSNLDQDLPNNMQRVLPIKSLPQDWLWCETWCSDEALKTAKTIDLCNNPLTKEPKLDRARRQVPEWTVYDEEIAAVQRRVMEGKKGKEDGEEGRGSDGKRERRKDEL

SEQ ID NO: 3983 - protein, 949 aa, Escovopsis weberi
MKFPEIIESEPYTERMKHAQHWVTRLEAAKGARFVLINGFIASRETNWMQPLGTLLSSEVERIQRLVYLETIRDDTPLEDVILEDAVVKRNRYITPEDDKDLHFVDINRLRVDHADLLDQLPVLEACADSSKENWAVGTVFADLTTKEGRQLALSVLEFRRRNPEVRLDFIHNPKLPNGASAVNAALKAKQDALVNVETVGDLEILIQESGQASEDDSHDKLLDDFLAAVNVERGARVFMINGRIVGPFDEDADFDADDLQMLLEFEQKRRIMPVYAALDALGLADRLSSPLAAAKLTSITAVSTISDLPEGIFESAPTDRTDIFDGWQSEHFAFEVGDRETASIQIVGLLNPVSEQGQRWAPILKVLSELDGVYVKLFMNPAETISELPVKRFFRYVLKSRPSFDKDGRVESQEASFEKLPSEALLTAAMNVPPAWLVAPQDSAYDLDNIKLSSVKSDVTAIYELKHILVEGHSRQGSGAPPSGAQLVLATEKDPLLTDTIIMSNLGFFQFKANPGVYNIQLKQGRSADIYEIKSIGAHGWDQDTPDHGTEIALMDFQGVTLYPRLQRRPGMEAENVLEASSSKAGNDGILSKGLKFAEGLFGGGKAPKSEQQQQQQPPPAKAHADINIFSVASGHLYERMLNIMMVSVMRHTKHTVKFWFIEQFLSPSFKDFIPHLAREYGFEYEMVSFKWPHWLRQQKEKQREIWGYKILFLDVLFPLSLDKVIFVDADQIVRTDMMDLVQLDLRGAPYGFTPMCDSRVEMEGFRFWKQGYWERYLKGRPYHISALYVVDLRRFRQLAAGDRLRQQYHSLSADPGSLANLDQDLPNHMQFNIPIHSLPQEWLWCETWCSDESLAQARTIDLCNNPQTKEPKLDRARRQVPEWTVYDDEIAALDRRLRGEGQPVADGEQAGSETGSGSEPAKAAGAKINTKSRKYEEEDEAHTKDEL

SEQ ID NO: 3984 - protein, 1354 aa, Tetrapisispora phaffii
MEQKMMRFLLFWFFVVTVASLHGVRGSHFAVAPPTRIWSVLNRLLHGSSLRSRVLNDLYPLVTGVEEGVDAYAEDGELVDLVADVLVDKFDLPEMASLFLHYYDLYPMGFPSGNQTFNNENYFILNGQKFLNAEDIFYFKTGDLKAQSKIPDSQIVQDNDVVIGKDPTAPICILYGCPSPGDDSENSFDAFNRNLYSDAVNTGKLRFIWRSTCSFDFDDPEQELGYPLELTKREGLRNAIWKWDTPYDMPEQFSKVGYEMYEPKVEELGDLDLRVSSLIAKTYKENKDFKKTFKLIKGISNNFPLIIKDLLKLKINNKIMESNEKFQKSGVDYNMLGLFINGQSMRYSALDDYSLLNAITKEYKRISSFQNDLKHFKLKHFKKASKSLLNKFSSISLSNLQEMQPNKIDLHRHPAFANSIIYFNDIEKDKQYKGLSKKIERFFEKSKFGEVPELRKNWNEVIFVIDFNDLENSVTQEALAGLLRALTIIEQGYPQRIGLLPLNTGLDKNIINSIYELKESNLQNLIEFLTQLEANKEGERTDEEFLFSDFDDVPNVAELLNELQIFGTSIIINGEIYPFKSNTWHYLLTKVIKKDVNLLKRELTKYKGQKKVDVRGILHLKSATGRHFKYTPDYFSDATYTSMNSFELDSLDVGIIDFIPIEEYNVLHTISLVDDFENEISLERLHNILKVGFSGIRIRLINTNTNIKSKTWKSLQLILKTSNDDIESKLVSLIKQVRKSNKNKVTKSENKLNIELLSKWLPDISNRILKSSDAFFTINGRFVHLESSELPSTTDFKNIIQREAKRTIDAVMVLEDEYPGFTEERIDPNLIEMVSSHLTKLFYHGSQIYDNGIDYKTESTLPRMNLSGFFKNNGYTVFERSSKKSQPIELTLVIDPLEERTQKIMTLVDKIMDLDFISIQIVLLPTNELKVVPNQRIYIDDSSEYHSEIHSLKKTFNIDIDNPYQITIKNHENIGYKSVVLDVNAFNEKDPISENNIDGISGACLQLIGENGEVIDKTFTMGTFGYGQFQISKLSSKLKIQSCDNNFEVVSISMDGKPDYIEDETIELLNFDPHKVYVKLRKLESKPSNDAEDKTAINIFNIINDETENEEEQYKKFITTISTHNVDNKKINFWLLNEPYLSNNLLTFIQRFNNEHNSMSIELLNYQWPTWLRPQRFRSREMKISKILFNDVLFPREVKQVIYMDLTEEEPVAVDPFVIAKRLNQQRDQDYSFRMVKMEGTGYWDEGYWLKYKTENENNKLAFNFYSSRPIIVINIKKLREQKSEFYSDKSIGDLIRIHYQRVSNDFNSLQNIDQDLLNDLQNQVTIREIAKYLLKPLEANSSGSSDANLHDEL

SEQ ID NO: 3985 - protein, 1543 aa, Cryptococcus neoformans
MRANTVALALAASALAASASPPVRVSLETSWAAPPLVLEILETVYDEYPSSYFPLLHLLSSLPADSTDESILSSTLDLIQAYSLLPSPSSLSTFHLALSLHSTAPRIEAEYNWYNSAANRNQKPLSLPFDHTSPSVSSTSSSPRAIFYYAPFASTSNELLGYLDHHASQYPEFTYTVRYQPPLSDEAKKPLSLSGWGAEMALKKMDYLVVDDRATGETTFRDESDEVARNESNIFAHVFGDDPWGDQATHLTAAEIRDIGLKAATLIMSSDDPISALIHLSQDFPKYSAALARQVEVPEDIQSKGRTIAVRGNAKEAIYINGKPFDRDLNPYTLLKALRDERQLTVSLTSLGLTPKQSIDILGDPVVGQGQIEDDMGEGLVDASDRIEGGDVIVYWNDIEKDKRYQNWPIHPQGYMRPLYHGQFHTVRRNTFNLIFALDLSRISSLELIVHSISAMIQRGLPIRFGIVPVFEPEQQDDISFQMAKVFWYSVKTFGRSSTRDFLAAIIDATPRQLNNPAPQVNDDVLRKGYEALSATSKKASLAFDDVLTSEDWDRHVEKTGNYLKRLLITKKDAENGGMFMNGRFTPNAPAWPNIVTQEMQSQLAFIQGQASKVMLDAIPEDISTMFYDLPSTSKRRSSLVIPVGDNKLKVFNLVDLFKNEGIEGKLSGEFVYPDGERGTPISMWIIGDLDSPEGLETVKNGLQHLQTSQCASRLGFIHVPPARSHSSCPAGQYCFSTVLYQILSQNALSLTKPSDLLELISDVQHSIKTNLEKAGEIEVGNQGVDDCGTTFTLSPEDQQKYFEAKPLHGMTFGGWAAGDIAAASEFWKAGTQISGKLGITDGVHLLANGRLVGPITPVTFPLDDFEALEVYEHRKRVKPIIDILKTMYDDIAAFDRPTLANLISKVSSVVTSAYKPLDGEGIFAPTQLTRTRYYERLDDGSMSFKLGDEDMSLLKVAIVVNPLSEQAQKWSPLIQTLSEMEHVFVSVYLEPEALMEEVKLKRFYRTSVPSRLTFDVDGAAIAPGLTFNSLPSNPIYTLGLDTPPSWIVSPRTSPYDLDNLLLSSISSPVSVTFQLKQLLIEGHAREAGNIPPRGLQLQLKTLGGDIAADTQVMANLGYLQFRATPGYYTLSIRPGRGEEVFNLESIGAEGWDSPSVEEVGEGVDLGSFDGQTIYPRFARKEGMEKADVLQESVAAPEGLAKQVYSKMKSIVGLSTKATPAKTEHADINIFTVASGLLYERFASIMILSVMKHTNSSVKFWFIENFLSPTFIAFIPKLAEEYGFQYEFVTYKWPHWLRAQTEKQRIIWAYKILFLDVLFPMSLDKVIFVDADQIVRTDMKELMDVDLHGRVYGYAPMGNSRKEMEGFRFWKSGYWKEALRGRPYHISALYVVDLKKFRQLATGDRLRGQYHALSADPNSLANLDQDLPNSMQDQIPIWTLDQDWLWCQTWCSDESLATAKTIDLCQNPLTKEPKLVRARQIPEWDVYDQEIAAFGARVSEEGEESGALAISVDDLASEGYVSGVEGKEEETEREAEGRIGDEL

SEQ ID NO: 3986 - protein, 1747 aa, Micractinium conductrix
MGARLPWTAAAAVLLVAAWVGAAAAAPLPKGKAARITLQAKWEGTPLLHEAAEFLSVEDPALFWKFVEGWQGGADGLPPDATPARCWAGIRAAAAEHLSAPMARLFDASLTARQYSARLEMFRQLAAEGGNAGAGADAADSPAAGARRPCCFALLRGTAYSEPAALKAALEAALASGDGDGTEGGAGAVYPFDHVYASPAAAGAPPLNATASHGTLPVELFAPIGSPCAAQLHDVLSKAAEASDAAAAAAAARGARAAPPRRLAYAWRPLLEAGACGAQAHPCTRLGTGERLVLPGYGVELALKNMEYNAQDDSKQAGSDKAGEEEGDEEAAEEAGAAAGEQEGGGGEGPLQIKLKNLGLQAAQRVLNAANASAGLGDPLAAVQELAQDFPRLAQHLSQHKYGKSLRTATEALQRYVPAGAQFLALNGLLLEAKDLSLYDLLDAVRREIRLHDALAAAGLPPAQLREAQLLRGAAAGSDEPPRLRLAPEDDDAIAWVNDLEQDEKYMHWPPDLNSLLMPMYPGRLPSIRRNVLQAVYLFDPASPAALDICALVFQIELQSWPLRMGLVPVVPSRVARARGDAGAMRAGDAPSLSERMGRLLALIQHTFTVSEVTQFLFELRAAVPPEQDGQPGFPDRLWEEAARVLEEQWEGFGADSDTLTAEQALALAAAPGDGAGAEGADPAALKHLDSAARLALSSGLAGMARGGVLVLNGLVHTNDAGSGWQGLTMGALQPALQAVQEDVYMQRLRDSAADVQEEILRLHGSVSRYNPRIMPLDSGAPGFLRISGESEEYAARQLVLTGPLLGPAATARHAGTPDGAGLWVRYYGPEASLLDDEDASAARMASVTHWVVADVTQKQGLALVAAALQHRSAAGRVAVVVNAAGAGVPEEDPSSGRLRPIERLVVAAASGLFETDPIDLTEQLDAVLQLPQAPGELSLAQIEGAIGFGGHLAQALDSLAGKLPAAAASHARFVRSALGLPPGASAVVTNGRLVELPLPAEGSRANADFEPRDFELLELYAQRQQYSSAVAELVRGAHEAGALQAADLSAVAAAVSSALAAAKPEEADPRSGRVVELIAKHAEQRNFVRLPADAPAGGDAGEGAQAPLLIHAILNPLSKPAQRLAPLLRFVRAAVGAEVQLLLNPERDLDSMPLKTFYRYALPTLPSADAAPGGAAAAFTGLPGGKVLTLGMDEPEAWLVEPVRAQHDLDNLRLDELTAPPGGTAAGEPVMEATFELEALLLTGMCLDLASLQARMRDQIHPRGVQLQLLPASAPEGAPPLVDTLVMSNLGYFQLKSRPGLWKLKLAPGRSQELYTVASSTGASSSGQRAEAAVAGADAHSVPVALASFSGKHMHLFLRKHADRLHEDVLEAVNATTTEEEGGDVGAGLLGKVASLVGGGKGGPALAAQREGAEDDRVHVFTVASGHMYERLQKIMILSAIKRTSARLKFWFIKNYMSPQMKAFVPYMAKKYNFDYEFVTYKWPSWLHKQTEKQRIIWAYKILFLDVLFPLNLKKVIFCDSDQVVRADLTELWRMDLQGAPYGYTPFCDNNAEMEGFRFWKQGFWKDHLQGKPYHISALYVIDLERFRQMAAGDRLRVIYEGLSKDPNSLANLDQDLPNYAQHGVPIFSLPQQWLWCETWCGTQTRAEAKTIDLCNNPLTKEPKLQSARRIIAEWPFLNREAEEFTAAVERVQRGELSEAQLLSDESAFHVRLAPMVEGVVWASEEGELAGKLSESGGAAHDASEL

SEQ ID NO: 3987 - protein, 1153 aa, Erinaceus europaeus
DLRSRFDFHPGEAYLFINGLRFEMDTFDPFSILDVLKLEGKLMTGLHNLGISEENVDKFLKLNLHVWEDNYVIDIRHPSIKWINDLETDEMYLSWPASYQELLKPAFSGVIPSIRRNFHNLVLFVDPAQEHALEFIKLAELFYDNKVPVRIGFVFVVSTDDEVDGTDDAGVALWRAFSYITEQLDVSQAFTSIVQMYEKVKKQSVLTVENVKDVLQHKFPQADIWDILGIDSKYDDGRKEDASFYKMTGLGPLPQVLYNGELCDNEELSIEERESAILQRILDTTVYLQREVFVGIINDRTSAIDYLMEKNNVVPRINPLILNSEREYINLISTSVTADIEDSSTFFFLDSQDKSAVVAENMHYLTPEDGSMISAVSIWIVADFDKPSGRKLLLNALEHMKTSIHSRLGVISNPASKINEENTVISRGILAAFLTQKNSLLRDFLWKLAREETAAALYSGDQMKALVTEGMDKNAFEKKYNTIGVNIFQTHQLFCQNVLNLRPGEMGVVSNGRFIGPLHEDFYPEDFHLLEKITFTNSLQKIKDIVENMGINSKNMSDLTMKVDGLISSLPKRGSRHDITLLKENHSVIKVNPLENDMFFNIIAIVDPLTREAQKMAQLLIVLGKIINMKMRLFLNCKGMLSEAPLTSFYRFVLEPELMPGTHDFLGPVAKFLDIPESPLFTLNMITPEGWLVEIVQSNCDLDNIYLKDVERTVEAEYELEYLLLEGHCFDEVTEQPPWGLQFTLGTQNKPVLVDTIVMANLGYFQLKANPGAWVLKLREGKSEDIYQIVGHKGADSDPDLTHLEDVIVLLDSFKSKILEIQVQKKPGKMKDDILSDKVEKKKGVWDSIKSLTGRLHKEKEKTETDVLNIFSVASGHLYERFLRIMMLSVLRNTKTPVKFWFLKNYLSPTFKEVIPHMAKQYGFQYELVQYKWPRWLHQQTEKQRIIWGYKILFLDVLFPLAVDKIIFVDADQIVRHDLKELRDFDLGGAPYGYTPFCDSRSDMDGYRFWKTGYWASHLLRRKYHISALYVVDLKKFRKIAAGDRLRGQYQTLSQDPNSLSNLDQDLPNNMIYQVAIKSLPQDWLWCETWCDDESKQRAKTIDLCNNPKTKEPKLKAAARIIPEWVEYDTEIRQLLDQLKDKKKTSILIHDEL

SEQ ID NO: 3988 - protein, 1565 aa, Fopius arisanus
MWRIGIICLLLGFSSTASPDKKLSKYVTTLINANWRDTPIILEAAEYLNDKNANYFWKFVDTISQDDKSNFDTHEATDKETYDRLINITSNFLTSAENALLKLSLSLRTYSARIEMFSQMGENRKTESVGDCTNFVDVNGELTCDSNNVEKLLKSLESRIDEEEDDDEERTIYSLDHQYPVPLSGQSESKKKSIVNSNYVILYGQIGSVGFSDFHLKLKSLADAKEISYILRHYVKDRPKHHLRLAGYGVELQMKSTEYKATDDSDIKDNSGKEEYENEGVEEINGINFGVLRSLYPDKRGELDEFEKHLLETSDEIGALKVWQFQELSHQAAERIMKSPSLEAIKVLTDIAQNFPTQAKSLIRTKVTNEMKKEIKRNQELFFGKLHIQPTDTALFINGLFFDLDAIDILGLLETLRAELTVMETLHKIGVSNSKMEKLLALDLAGSETSDNSQDFAIDIRDSAIIWVNDLESDSRYNRWSPSLTSLLRPTFPGMLRNIRRNLYNLILVVDPLSPLSRPLITTAETLYAHSAPIRVGFVFNTNFDTSLTGQNDPSIAVNNAFHYLLESKGPKEAVYFLSVLLKDVEKRKSSDGNDKNNENDLQVADVVKALRSRDPSANVYYILGEESEYDVGRHLANDFIRRTGFKNFPQALLNGVPLEGVSSIVEAESLEEIVLSMIYSQTSMLQKAVYKGEVTEGDDIVDFMMNQPNIMPRLNERILKNDKTQWLNLVGEVPSTQDVSTWSPEDTSAWIIKNSNYLYMPRRKKSQHLYTYWIVTNLEHPDGRLLLREALEYLQSNADVRLGVIINSNSHQYDDKIGMNQIVLSALNTDYPTENHDKIIHYIQEILKEENGVLIEKGEFDRNAYREQIGVDFDENPLNYEFSLKVHKHFANIALRMDESSTTQRAVICNGKVIGPLDDDETFSSQDFALLERFSHSTYGEKLITNLEKIHAIDDEEEKEISDDVIMEIASLLVPRPQTRSRHDVIASGEDHSVVKIPARNSDQVAFNLIAIVDPVSRGAQKLGAILNTLQQAVNCNIKIFLNCVDKNSDMPLKNFYRFVFEPELQFNTEGQLVGASAKFNKLPTSSLLTQNIHAPDNWMVQVVKSVYDLDNIKLDNVAMGVHSEFQLEYLLLEGHCFEATMGNPPRGLQITLGTDTHAMVDTIVMANLGYFQLKANPGEWILRLRHGRSAEIYNITSVDGHDVIQHGNAVRVLINSLKSHVLKLKVTKKSDKLDMDLLAEDDEKKSGIWSSISRTLGSEDPEDGEEKINIFSLASGHLYERFLKIMMLSVLKHTKSPVKFWFLKNYLSPTLKDFLPHMAKEYGFEYELIQYKWPRWLHQQTEKQRTIWGYKILFLDVLFPLDVKKIIFVDADQVVRADLKELVNLDLEGAPYAYTPFCDSRKEMEGFRFWKQGYWKTHLQGRSYHISALYVVDLKRFRRIAAGDRLRGQYQALSPDPNSLSNLDQDLPNNMIHQVAIKTLPQEWLWCETWCNDASKKYAKTIDLCNNPMTKEAKLQAAMRILPEWTGYDEEIKTLQQTIENENKQTDKEDKVDADDGTKHEEL

SEQ ID NO: 3989 - protein, 1602 aa, Dendrothele bispora
MLWILPVSLALLTVKAASPPLKVSLRSSWPAPPFLVELIETVALENPNAFFPFVDRVTDPEALLVSQNLAPEALHQSALQIAVSRGLLPEPGALASVEMNLGLHAATPKIEAFYHHYTQVIEDHAPDCGSWVMWYGMRICDVETLVQLAGTDTIDSSDKKADSEHIYIRPKILPFDHIYPPPERRSETPPRTAILYASFDSPNFRSLHSYLLYLASQEVPHVEYVLRHIPPSTIDVSRKNHLSGYSVSLDLKKMDYLAVDDRQTNGRGSNGDALADDPKSAPKIDLVSSLIENYPEITTAPDASTPLTEDELVEIGLKASQLISESSEPLLTLLQLSQNFPKYATSLSRRVVVNEAFADELHSNQLRVQGGINLLWLNGVPVPEKEVNPFGLLRILKKERNLMLSLERLGLERAEAMDLLISPIVAEAQSDNGLLDGVVDASDRLEEGDVVVWWNDLEKDSRYAQWPSSIHGLLRPLYPGQFHNVRLNLFNIILALDLSKTTSLNFVAGPVSNIVERGFPFRFGVAPLVETEDGKKMARLFYYLVRNHGRKKTMGFLKKIAQLQIHPSVQTPSVQWDIVRSEFKAFIAAATEAGEMEGKETDLDAIFSGRNLEEGNENPVKKAEAYTERLGATLSSSPTGHAFVNGKHFEMNENFLRLMQIEIGKQLQHYQEQIYEGKLTDANNETISTYFYDLPTSSHRRNKYIIPAQGDLQIFNLPEIFERTDFRDHASAFVYPPETEIITLTIYVVTDLNKKEGLELMREALVSIEPNSSARFAFIHNPAVVDESPSRTSVSSLFSHLVSNHLLSKVSPNRLLLALGLTDPVTPKTDGSSSEQTPLQTQADHLREILGGVKPSEFNASTHTRFVDMGRRLLKEMGIAPGEKAILVNGRTVGPIQTGEFRAADFKALQAYELRKRVQPVLSALEDIRSSVTSLDRASLAQLVSLASSVISSIQIPDPSEVGLFDTPYRPRNRNYRLLDTNHTSFLFGDNNTALYQVGVLIDPLTETAQKWSSLLEWLLNVPDIHVQVHLNPARHGEMPLKKFFRYNLRPYLTFDEAGQEEASMTIFEGLPIEPIYTLAMDVPSSWLVRPREALYDLDNIQLGSLSPEDSSLDANFELDYLVIEGHARESKTSSPPRGLQLELVSSSTPFDDTQVVANLGYFQFKATPGVFHLQIREGRGKEIFTMESVGNEGWNSPTVETIGNEITLTSFEGLTLYPRLRRRPGMEMEDVLDDIDDEEPGLFDAVVSSIKGIFGFNEAVDDVAEKQADINIFTVASGLLYERFASIMILSVLRNTKSSVKFWFIENFLSPSFLEFIPHFAEAYNFQYELVTYKWPSWLRAQKEKQRIIWAYKILFLDVLFPMDLKKVIFVDADQIVRADLQELVDLDLHGAPYGYTPMGDDNTDMEGFRFWKTGYWKDFLKGLPYHISALYVVDLVRFRQMAAGDILRGHYQQLSADPNSLANLDQDLPNNLQREVPIFSLDEDWLWCETWCSKDRFHRAKTIDLCQNPLTKEPKLARARQIPEWEEYDTEIARFARKLAAEGKVHSRIAASDVNVLANVGSVDKSSKPGSAESEIKAENVAIEEPVSSESIGGQTRDEL

SEQ ID NO: 3990 - protein, 2012 aa, Cuculus canorus
MPGGLYGGTRSSCTNLKYKKEAYRRWKQEQVAWKQYKEIVQAARDQVKKANGPTEQNLTKDVKNNKKSFYRCIGDIRKTRENVALLLKETGHLVTWDMEKAEVLNNFSASVFIGKGSSHTAQVTEGNGRNWENEEPLTVGKDWVQDHLRNMKKHKSIRPHEMQPQVLRELADKVAKSLFIIFEKLEQFCKLQTDWKRGNRAADNSGRTARERHPLPGSLPTASGTVVSAFERVETKSNRGDLGAREPSHRAGKGGIRLGADGNQVPKARPSTTRVALRDSPRQPCSPHRTAGDFTVGRTRFQKAFPPRWEKWNQTSSGWKPSPTCEPSSTRGQRPPGFSRASSAARTDPRMRLPAREALPGAFPPRWEKWDQTSSRWKPSPTGETFNDAWDTALRDAPPPALQPALTRRCAGSASSKPSHRTGKSGIGLGTGGNQAPQGRLSSTRDQRSAGFPPACPAAHTDPQVRGTYFRAGKSGIRLGRGGNQAPQATPYRPRAKLSQVRAPASPSPPPPRRQVSEMDGHNMMGFLSNSSISRYFCGVFEFIAEDGNEKFWQFLETVRELTIYKRGDSEHSYYNLILKKAGQFLSNLQINLLKFALSVRAYSPTVQMFQQIAADEPPPEGCSAFVVIHEKHTCKTNEIKKLLKKATKRPRPYLFKGDHKFPTLKEDGPVVILYAEMGTKDFAKFHKILSEKAQKEEIVYILRHYVQKPSSRKMYLSGYGVELAIKSTEYKAVDDTQVKGANDTKEEEDGEEESDVQGFLFGKLKQLHPDLKNNLKEFKKHLIETTNNMEPLKVWELQDLSFQAAAQIMAAPVYDALKVMKDIAQNFPIKARSLTRVAVDKKMRSEIEANQKHFHETLGIQPGEARLFLNSLHIDLDFHDPFSILETLKLEGKAMHGLHELGIKEEILSRFMRLHVHPTDDSYALDIRHSSIIWINNIEQDPSYSTWPASYQELLKPSFPGVIQQIRRNLYNLVLFVDPVREDTGDYMKLAELFYHHNVPLRIGFVFILNTKEEVDGNEDAGVALWRTFNYIAEESDTFQAFTSIINLYHEVREGDVLTVNEVKDALRSEYPHADVESILGVHSEYDEGRKAGATFYKKTGLGPLPQALFNGVPFNREEMDAAELETVILQRIIDATGFFQRAVFMGVLNDHINAMDFLMDQHNVVSRMNPTILGAERRYIPFRSTNVPFDVEDFSTFSFLDSQDKSAVISDNMKYLTKKGEDALYAVTIWIIADFDKPAGRRLLSNALKHLKTSSHTRVGILNNPSSKIKEDNTVIARAILAAFLTQNNSNLKSFLSKLTKEETAKSLAAGTKITKFLVPGMDDNTFEKKYNTLGLDVIKTHQMFCQEVLKLLPGQMAVTSNGRVLGPLDENEFYAEDFNLLEKITYSTSAEKIKAIVKEMGNSSKSGSDLIMKIDALLSSLPKTEIRQDVELLKEQHSVVKVSPQQNEPFYDVVAIVDPLTREAQKMAHLLIVLKDIVNLKLRLFLNCRSKLSEVPLKSFYRFVLEPELNYGINKHLPSDPVVKFLELPESPLLTLNMITPESWLVEAVNSSCDLDNIHLQDIKGTVIAEYELEYILLEGHCFDVTTGQPPRGLQFTLGTKKNPVMVDTIVMANLGYFQLKANPGAWTLRLREGRSKEIYQVFSHEGTDSIADQADVTVVLSNFRSKIIKVQVQKKPDKINEELLTDGKTGKKGNRASVKRLSEESPTEEKEKKSDILNIFSVASGHLYERFLRIMMLSVLRHTETPVKFWFLKNYLSPTFKDVIPHMAKKYGFQYELVQYKWPRWLYQQTEKQRIIWGYKILFLDVLFPLAVDKIIFVDADQIVRSDLKELRDLDLDGAPYGYTPFCDSRKEMDGYRFWKSGYWASHLGKRKYHISALYVVDLKKFRKIAAGDRLRGQYQALSQDPNSLSNLDQDLPNNMIHQVAIKSLPQEWLWCETWCDDESKKKAKTIDLCNNPQTKEPKLKAAARIVPEWVDYDSEIQKLIQQIQKEKKNLTSAFQKGLKHDEL

SEQ ID NO: 3991 - protein, 1521 aa, Mizuhopecten yessoensis
MATSIKMLPAVGLVVVCLLTVVEGQSKPITVTLNAKWNSTPLLLEASEYIAKESPESFWRYVEEIAKLDPKATALETDHGYYHMILKFASKVISPLQLKLLQLSLSLRIYSPAVETFQQLAEGAPDGCFAFVNIHGQTTCNPAEVKSLIEKAADLPKSSIFKFDHIYPGSAGNDTVVVLYAEVGREGFPEFHQTLLDMAKQKQIKYVLRHFVRDQAKEKTRLSGYGVELAIKSTEYKAQDDTKVESGGSADTEEDAVDEVQGFIFSKLRELHPESKEDLAAFKNHLVATSTDLAALKVWQLQDLSLQAGQILMTTPASEVLSVLTDISQNFPQRARTLVKTVLTEEFKKEVKQNQQYFETNHGLSAGDSAMYLNGLPVDMEAYDVYSLLELMRTETNLMEGLYSLGFKGPEVNQILKLDLSGDSEDFALDIRHIAISYLNDLESDRKYKNWPSSVQDILRPTFPGMLRHVAKNLFHMVFIVDPTEKESRELLKMAEAFLVHSAPVRIGIVLVVDSDKEVTGYDDTGVAFSRAFDYLIREESADRAISFITDVYEKAQSEELTADIVVKEFHRLYGDAEEGTVFGEDDDYNTLRKASNDFVSKSGLKDFPQVLMNGVPMDKKYLTEEAFEEGVVSTILAHTPAIQKAVYQGTLHDFVNVQEWLMERDNVLPRLNSRVLTPAKKSLDFTLRLEANVYGDVDQFSVLNTKAMTSIMTQNMKYLTRKDEDMLRPVTMWVVCDLETAEGRDLLYSALKQLKHTHDLRVGVVFNSQLGKTESAFTISRAVYAALTTLEPGIAKSFITKLVKEENVKDILAHSKQLSDFEVHGMDTMSYMLAAEVQTTDFLKVHRAFVDKALGWDESARGVLANGQILGPLDKDERFIPEDVDLFQKYVFQNSAKKIKGLLSVLGHKDDKGSDLVMKVAALLSQSGSTKERKEVQYAGDQHSVIKLPADSGTPAYQVEVIINPASPDAQKMSAILMILEEVANVDIKIFMNCKDKLSELPVITFYRYVLEPTITFKVDGSYSEGPIAKFTDMPTKSLLTLGMNPSESWLVEAVSAPYDLDNILLEETKTGIHADFDLEYLLLEGHCSDSTTGQPPRGLQFTLGRNRTEAAVDTIVMANLGYFQLKANPGTWFLKLREGRSHELYDIASHEFTDTPDGSDDVVVVMNSFKSKIIRLKVAKKPEKSGEQLLVDDAERGIWESISSTLTGDKAEDDGDKTLNIFSLASGHMYERLMRIMMMSVLKNTKSKVKFWFLKNYLSPSFKDFIPKMAQEYEFEFELIQYKWPRWLNQQKEKQRIMWGYKILFLDVLFPLDVKKIIFVDADQIVRTDLQELNDLDLGGAPYGYTPFCSSRTEMDGFRFWKSGYWASHLAGRRYHISALYVVDLKKFRRIAAGDRLRGQYQGLSQDPNSLSNLDQDLPNNMIHQVAIKSLPQEWLWCETWCSNESKAKAKTIDLCNNPQTKEPKLKAALRIVPEWKNYDYEIKILWDKVYKTNTRSQIEYDPPDIETSTIGSKIKDEL

SEQ ID NO: 3992 - protein, 385 aa, Octodon degus
VLGKIINMKLTLFMNCKSKLSEAPLQRHEETDSPSDIEDVIVVLNSFKSKILEMEVQRKPHKINKDVLTDKDEEKGMWDYIKSFTGKLHEDDEPKEKDILNIFSVASGHLYERFLRIMMLSVLRNTKTQVKFWFLKNYLSPSFKEIIPHMAKQYGFQYELVQYKWPHWLHQQTEKQRIIWGYKILFLDVLFPLAVNKIIFVDADQVVRHDLKELRDFDLGGAPYGYTPFCDSRANMEGYRFWKTGYWASHLLGRKYHISALYVVDFKIFRRIEAGDKLRGRYQALSQDPNSLSNLDQDLPNDMIYQVAIKSLPQDWLWCEAWCDDESKQRAKTIDLCNNPKTKEPKLEAAARIIPEWVEYDAEIQQLLDHLENKKKSTISAHDEL

SEQ ID NO: 3993 - protein, 2132 aa, Mucor circinelloides
MNMVLQYTHLPLELWMNILDKVDSLVQLGECRLVSRKWDDLAEAIMFSRNIYISGEGNIVKLYNHLVRKPSRAHFIRSLEVYVPPHERLYAYNLLEISFTPTMRNLTILAGSAMDTEFFGLLYGIVKGSPEGHYNLETMPLTLDPTDDNYTNAVLAFKHTLRYLQTSYKCSALNTRYGKLTEFKKLETLELEAEPFEDIFKLDAILKNCKRLKSLELFHRNGDRHAEQNASRIANWARHTVDKVNSLTHLRISYVYPDLIQYLTFKYPNIEELHCTMANTYHDDDFQSVMDAINTLPQFQIQFLFEDQELLDSAITTICQKTQSAGLVFQIEYSELLREDLLAELYLAIHNTLSKDVFLTVCIADTASHQAHQGIINSLQDSIGSTQIHHLSIDLLGFRRWPPRNHPEEPITFYDIVDNLPGLEKLYFTTDRIEYEPIVASSEPIERRLQALTISYAIIDTKVFPQISQLYPTLDLLRFESCTTLDEQQRDNMIKIDMPFTKVLQLDLENGEPYLGSTGDFEDHIGSMLYWKLNASSQPLPLTANEYGFGQEQGSGTCISITCASLHNLTIYLSDLQVHLRIFKAILGLVTVGLCSLKQVSASAGTDASPTVDLTMIAPWSAPNLLVEVAETVATYNESAYLNFIHDFVALEQQSTSWTPHQAYKEAVEVISSLGVDETNFFKLSLAIHEAAPRIEAYNQFYRESVVPGISAYNDACDVWAQFQDQQYCDITQFVDALTSQSATSTKSIELLPFDHIVSKSQADPIVALYTDRFSASFAQFHDVLNQHDISHVIRYRPDTTNVPVPLYLSGYGVEMALKKTDYLVIDDRSSQKTSNIKDKITNMGKKLGQSLFHATQKETIEPVTPGEIHRLSFKAAQYISKSSNPLATLNQLVQDFPKYAKSVSELDVDIELEEEILDNQLNFLRNGMSAVWLNGKGLEFSQMDPFFLIRALRKERQLIASFEQLGFKPKEAIEVISNPAFTVASQAGNSVNDEIFDMRDTPEEPFVVWWNDLEKDKRYDEWTSSMEDYVKPQYPGQLLPVKKNVFNLIMVEDLGQQGSIARVVNELHMMIKRLVPVRFGIISIIKEEDSVSTKMAQSLSYLIEQHGKGAGMNFLATVLETLRAEGKSEPTLEIISNSFAKTVSSSGKPKSGNKISFEQALETQDSYTQASSQFLKRMGITELGAQDGIMFINGKLLEFNEERPWIQVLMPALHEITRSIQKMVYMGDFLDEKFDYYQHVMTQPNVATHRNSFIVPSNAHPLVIQGFATARKSEELKYFQVDQQDAAINLWVSADFNSAHGLKLASEALLYAESNPKVRVALIHNPAGASTEDGPEISIPVVEDQNYKPTFSDLLGSIIFTNKDTHFEQLAKLVQNAVEQLDGESVEKVVPEAIIPGSPIIEMEAKAQSTNWRNLVHALEQDGLDTSFQGIVVNGRVVGPLPASTVFSKENFATLVDLEYNKRIAPIEQAIAQVKYTMPANEDLADVLTKISVLIETDKAVTSKSLVEENEPVYRHRVYENIPKTKHTRLVIGDIDNAFLQIGFIIDPLSETAQKWVPLINTLASIDGVSIIMYLNPVNGLQELPLKRFYRYVFDKEPHFDPATGVREIPTAYFDDLPTDPLYTLGVETTNAWHVTVREANMDLDNIVLKSLSEEESGVSAVYELENILLEGHCLDSNNKSPPRGLEFEIATPSNHSRKDTLVMANLGYFQLKALPGVWNLGLREGRSSAIYSIEDIGTEGKWNWDASKRNSKTEQGSGVLALTSFEGITVMPLVHKNPGMESEDVLETAEDRKHSDGSGLWSSFSSKLFGSSKKNQDVATTAKQADINIFSVASGKLYERFLSIMIASVMEHTQSTVKFWFIENFLSPEFKDFVPHMAKEYGFDYEMVTYKWPAWLRAQREKQRTIWGYKILFLDVLFPLDLDKVIFVDADQIVRTDLKELVDMDLQGAPYGYTPFCSDRTEMDGFRFWSEGYWKTHLRGKPYHISALYVVDLVRFRQLAAGDRLRAQYQQLSADPNSLANLDQDLPNNMQHIVPIFSLPQEWLWCETWCSDESLKTAKTIDLCNNPLTKEPKLDRARRQIPEWESYDNEIDQLRKRVSLGHPYVVADEHGEQIVISAANEKKEHLKDEL

SEQ ID NO: 3994 - protein, 1540 aa, Astyanax mexicanus
MAVRGAESGAGGGMKMWLLCVSLVILHFVASADGSSKAVTTTLTTKWPSAPLLLEASEFLSEESQDKFWDFVEANQDIENEHDGSDLSYYELIIKRAGQLLSPVQLKLLKFALSLRSYSSTIHSFQQIASNEPPPPGCRAFFSVHGEKSCDPESLKTMIDTASERPKPFLFKGDHRFTSSNPGAPVVILYAELGTKEFASFHQQMLSRVNKGLINYVLRHYLPNPSKSKVFLSGYGVELAIKNQEYKAKDDTQVQGADVNATVIGGNDPVDEVQGFLFGKLKTIYPELKEQLKELRKHLVESTNDMAPLKVWQLQDLSFQTAARILAAPPVDALNVMRDLSQNFPTKARSITKTVVNSEIRKEIEENQKYFKGSLGLQPGDSALFINGLHIDLDVQDIFSVFDVLRNEARVMEGLRSLLIDSPYIHDILKLNVQPADSDYAVDFRSPSIYWVNNLETDGRYASWPSNVQELLRPTFPGVIRQIRKNFHNLVMIIDPTHENTAELLSVAEMFYSNNIPLRIGLVFVVNDADDIDGMQDAGVAMLRAFNYIADEVDNQMAFDAVLSMLNRVPSGGKLKVEHVVGVLEKRYPYVEVRSILGADSAYDSNRKEGKAYYQQTGVGPLPVVLYNGMPLQREQLDPDELETTVMHKILETTSFFQRAVYLGELASDHDVLDFIMNQPNVVPRINSRILTTTRTYLDLSSTNNHFIDEYARFLFLDTKEKNTAVANSMNYMTKKDDGIIRPVTFWVVGDFDDPSGRQLLYDAIRHMKTSNNVRLGMINNPSENPSNSTTLIARAIWAAMQTQTANNAKNFITKMAKEETAQAVYSGTNIVDFAVGGMDVPLFQSAFESPKVDFLLAHSAYCRDVLKLRKGQRAVISNGRIIGPLDEGEIFNQNDFLLLESLILKTSGERIKSKIQQLNVEEDRASDLVMKVDALLSSQPKGEARVEYGFAADRYSAVKIRPKEEEVYFDVVAVVDPVTRDAQKLAPLLLVLKQLVNVNLRVFMNCQSRLSDMPLKSFYRYVLDPEVTFMTDNSFSPGPMAKFLDMPQSPLFTLNLNTPESWMVESVHTRYDLDNIYLEEVDTGVAAEYELEYLLLEGHCFDVSTGQPPRGLQFTLGTAADPVIVDTIVMANLGYFQLKANPGAWILRLRKGRSDDIYKIYSHDGTDSPAEAEDLIVVLNNFKSKIIKVKVQKKPDKMNEELLSDGTNENDSGFWQSLTRGFTGGSKVEETKPDKDDVINIFSVASGHLYERFLRIMMLSVLKHTKTPVKFWFLKNYLSPTFKEWIPYMAKEYGFQYELVQYKWPRWLHQQTEKQRIIWGYKILFLDVLFPLAVDKILFVDADQIVRTDLKELRDFDLEGAPYGYTPFCESRREMDGYRFWKSGYWASHLAGRKYHISALYVVDLKKFRKIAAGDRLRGQYQGLSQDPNSLSNLDQDLPNNMIHQVPIKSLPQEWLWCETWCDDSSKKNAKTIDLCNNPQTKEPKLQAAVRIVSEWTDYDQEVKRIYNKFLEERERGGPSGSSQTQGRTQRGDEKHTEL

SEQ ID NO: 3995 - protein, 1458 aa, Operophtera brumata
MEHFGLSHILLEPDKYNPDTLDLISDEEAREYWLNTCEKLVEKYVNFALANSSDDPTVEIRALKFKTCYVEALKELRINPLAHGQLTIRLLLDINETCLRSQGFFDLWKQRNMFDWGAQAVTAILDSGLYEALEKIQQRPWLYDGLEKWLEKLQNTVHHCAAIFVDNSGVDIVLGILPFVRALLLRGTAVILCANEWPALNDVTNVELEEILQRVSHICPVIAAALTTGDLVVRSSGQRGPCLDLRTISVGLCTEMKVRGVDLIILEGMGRSLHTNLNARLAVDSLKLAVVKNAWLAQRLGGPLFSVIFIYEDKPTLNSEPSNQYERKSKSVTSFVSSKWETTPIVLELAEYLAGESADLFWSYVDGINSLKSSLDSLKTDKEVYDSCIGVASTLLAPAQLRMAKLSLSMHTMSPAVRMFDQVATQNNAKDVQCDTFVAIGSRQVCDDDALRDVLKNYNEIKVDEHLLATYLLDHSYPSSDNKSLAAILYGELGTKDFANKHKILAGYADKGAINYVVRWNVKGMEWNCNSRARSTRVKMTPCPKNLKEMQPLLQRRRMRMTLRTKNLFPALRTPLERFRRHLSETNEELAPLKVWQMQALSMQAAAAVVDAHDAGGDEALKEYGLDIRDTSITWFNDLESDERYRRWPSSYMELLRPTYPGMLRNLKRNIYNYDIWSSALGLRAAEPLLLVSGAQYDAEEKLINTLMSLELGESFTWEEYGLDIRDTSITWFNDLESDERYRRWPSSYMELLRPTYPGMLRNLKRNIYNYLLNPPEGEELSIEYVKKQLKKYSSPSANLDEIVAEDSEYNFGRQLAEEFIAKIGNNKYPQSSQYLDLTGVPSSADLFTEDKVHRLLHLTVLKYFTKAGKAEKITQTIWVAGDLNQKASRELLRDAITFMKESGGTRVAFLPNVDGASTDDQSLNKVVLAALTALEPAKATKFSHQVYGDKISEFTADGALTGGAIARFSRLPHAPLLSMEIRTPPNWLVECVNEFELEYLLLEGHAWDTTLGTPPRGLQLVLGTLEKPELMDTIVMANLGSFGGGDEPESQDETINVFSVASGHLYERFLRIMMMSVLKNTKSPVKFWFLKNYLSPSLKEILPYMAQEYGFEYELVQYQWPRWLQKQRDRQRTIWGYKILFLDVLFPLQVKKIIFVDADQIVRADLKELVELDLGGAPYGYTPFCDSRREMEGFRFWKLGYWRNHLQGRSYHISALYVVDLKRFRRIAAGDRLRGQYQALSQDPNSLSNLDQDLPNNMIHQVAIKSLPQEWLWCETWCDEPSKKFAKTIDLEYDAEIKGLQARVRRGLYQAADHEQEAKLSAAMRIVPKWKEYDAEIKGLQARVRRGLYQAADHEQEAKLSAAMRIVPEWKEYDAEIKGLQARVRRGLYQAADHEQEAKLSAAMRIVPEWKEYDAEIKGLQAREIEMNVEEPTVSTTAAPKTDSTAREEHKAERVEL

SEQ ID NO: 3996 - protein, 1664 aa, Phascolarctos cinereus
MKPPAGAPKLINRVNVPGSKMAAERRSGNVGPRAVTRWPEVFRTCGSGSIGALRPGLFAGVSGQPPRRAGASGRGRVGRARTGAERSVAAAHWSGSCSSSRPPRAPSLSRAERESGSGMSRREGGGGCAAVARRVTGVNCKMEVLIALCLFISLVKADSKAVTTSLTTKWFSTPLLIEASEFLAEDSQEKFWNFVEASENIGSTDHDGTDYSYYHELLKIAFHYLSPLQQNLLKFSLSLHSYSATVQAFQQIAADEPPPKGCHSFFSVHGEKTCDFDTLGALLQTASKRPKPNLFKGDHRYPSLNPGSPVVIFYSEIGSKEFYNFHHQLVAKSSSGKINYVLRHYISNPSKERVYLSGYGVELAIKSTEYKAKDDTQVKGTDTNATVIGENDPIDEVQGFLFGRLRELHPDMKDQLKELRKHLVESTNEMAPLKVWQLQDLSFQTAARVLAAPLEVALVVLKDLSQNFPTKARAITKTAVNQELRTEVEENQKYFKGTLGLQPGESALFINGLHIDLDTQDIFSLFDVLRNEARVMEGLHRLGIEDLSLHNILKLNIQPSDADYAVDIRSPAISWINNLEVDSRYSSWPSSLQELLRPTFPGVIRQIRKNFHNFIIIVDPAHETAVELMNVAEMFLSNHIPLRIGLIFVVNDSEDVDGMQDTGVAVLRTYNYVAQDVDDYHAFQTLISIYNKVKTGEKVKVEHVVSVLQKKYPYVEINSILGIDSAFDQNRKEGRAYYEQTGVGPLPVVLFNGMPYEKDQLDADELETITMHKILETTSIFQRAVYLGELSHDQDVVEYVMNQPNVVPRINSRILTSERQYLDLTATNNFFVDDYARFSLLDSQDKTAAVANSMTYLTKKDNSFIRPVTFWIVGDFDSPSGRQLLYDAIKHQKSSNNIRISMINNPREEPRFENTRISRALWAALQTQTSNNAKNFITKMVKEETAEALAAGVDITEFAVGGMDVGLFKDAFESSKADFILSHALYCMEVLKLKRGERAVISNGRIIGPLKDGELFNQDDFHLLENIILKTSGQKIKSHIQLLGVEEDVASDLVMKVDALLSAQPKGEARIDYQFFEERHSAVKLKPKKKETYFDIVAIVDPVTRDAQRLAPLLMVLTQLINMNLRVFMNCQSKLSDMPLKSFYRYVLEPQISFTADNSFAKGPIAKFLDMPQSPLFTLNLNTPESWMVESVRTPYDLDNIYLEEVDSVVAAEYELEYLLLEGHCYDITTGQPPRGLQFTLGTSANPVIVDTIVMANLGYFQLKANPGAWILRLRKGRSEDIYKIYSHDGTDSPPDADEVVVVLNNFKSKIIKVKVQKKADMMNEDLLSDGNHENESGFWESLKWGFTGGQKTEEVKPDKDDVINIFSVASGHLYERFLRIMMLSVLKHTKTPVKFWFLKNYLSPTFKEFIPYMAKEYNFQYELVQYKWPRWLHQQTEKQRIIWGYKILFLDVLFPLVVDKFLFVDADQIVRTDLKELRDFNLDGAPYGYTPFCDSRKEMNGYRFWKSGYWASHLSGRKYHISALYVVDLKKFRKIAAGDRLRGQYQGLSQDPNSLSNLDQDLPNNMIHQVPIKSLPQEWLWCETWCDDASKKKAKTIDLCNNPMTKEPKLQAAVRIVPEWQDYDLEIKQLQGRFQKEKEMGIKHPENETKEPSTEGLPAHVEL

SEQ ID NO: 3997 - protein, 1483 aa, Trichoderma virens
MTRHRCWPWNLTVGLMLALQAHSTPSVNVGMNAAFPAGPYLLELLETAAAENSSSYFPLLDRIAAGSFASASTDAALYSEVLDVLQKDGSISGSEALSTFKLALSLRSAAPRIEAHYQYYTTAVAPTVDDPECVNWVLLEGKQYCTPELDKVNRDGLLSLQAKHLPFDRTLGTGKEAILYADPTSNTFGAFHKALAEAARQGSLSYRIRYRRTETTHAAALPMSGYGVELALKKTDYIVIDDRLHGEEAHHESPSSSTNLDDSEDVADIKPLAASDLSSLGMKAASFILQSDEPLETLVKLSQDLPKFLTSIVAHNVSAQFEEEFQSNGVKGVPDGVNILLVNGVQVSERQIEPFALIERLRQERKLIDGFRTLGLSGKQAVSILGHQAVSIAKDSTEPLRYDWTDRLEDGRVLIWLNDLESDDAYKDYPKTLASLLRGAYPGQLPPIAKNIFTLVAPVDFSSSEDISFITQLLSFISRGIAIRFGLVPLMSTPEATAKAKIVYHIFENYGIQGLASYLGRLQDYATALTNEELFAEITRDQTLLEDSEKMELVDVLERETYEQQLKLAQQWINRLKAETPIRPIFFNGLLIPRDDNWIQGLGMQIGDDLQTVQKGVFHGILSDDDWAPSVFLSNAITRRNSYISPEDEKKSLRVLNINKLYNEHADLFESVPVLDALAGLQKEDWAVMTVIADLTTTSGKALVLSALEFKRNNPGARIDFVHNPVAAAGAASVNAALRANQGSLSDVQDADKLTSLMETQSEDLNDDYFAALEQFLGTAKILSGAQMIMLNGRLIGPISEDSQFDVDDFQQFLEVERTKRILPVYAAIEELGLGDTLATPIDAAKLTSITALSTISNLPEGIFESTSSARTTLYNTWDSTYTTIEKGDQETASIYIVGLVNPVSEQGQRWAPILKVLSELQGVHLKLFVNPTAKIEELPVKRFFRYVLESQPSFDEEGGVKRLEATFNGLPSEALLTTAVDVPPAWLVAPLVSIHDLDNIKLSAVKTDVHATYVLKHILIEGHSREGKGSAPRGTQLVLATEKDPLVTDTIVMSNLGFFQFKANPGVYTIQLKEGRNAEIYEIESIGAQGWSPVPGDNGTELALIDFQGVTLYPRLNRRSGMEAEDVLQEKDAQENNLVAKGFKLAEGLFGGKSKKKSLSEQEHAEINIFSVASGHLYERMLNIMMVSVMRHTKHTVKFWFIEQFLSPSFKEFIPQMAKEYGFKYEMVSYKWPHWLRQQKEKQREIWGYKILFLDVLFPLSLDKVIFVDADQIVRTDMMNLMNLDLEGAPYGFTPMCDSRTEMEGFRFWKTGYWANYLRGRPYHISALYVVDLRRFRELAAGDRLRQQYHSLSADPNSLANLDQDLPNHMQFQIPIHSLPQEWLWCETWCSDESLGEARTIDLCNNPLTKEPKLDRARRQVPEWVTYDEEIAALSQLSKGEAGITNKEKLSNNGDSDAAESQGKNTKSRNLESEKTHTMDEL

SEQ ID NO: 3998 - protein, 487 aa, Phalacrocorax carbo
VLKDIINVKLRLFMNCRSKLSEVPLKSFYRFVLEPELTYGINKHLPSEPMAKFLELPESPLLTLNMITPESWLVEAVNSSCDLDNIHLQDIKGTVIAEYELEYILLEGHCFDVTTGQPPRGLQFTLGTKTNPVMVDTIVMANLGYFQLKANPGAWTLRLRKGRSEEIYQVFSYRKSLIKRVKISLLMEQQEEKEIRNQLQVASGHLYERFLRIMMLSVLRHTKTPVKFWFLKNYLSPTFKDVIPHMAKKYGFKYELVQYKWPRWLYQQTEKQRIIWGYKILFLDVLFPLAVDKIIFVDADQIVRSDLKELQDLDLNGAPYGYTPFCDSRKEMDGYRFWKSGYWASHLGKRKYHISALYVVDLKKFRKIAAGDRLRGQYQALSQDPNSLSNLDQDLPNNMIHQVAIKSLPQEWLWCETWCDDESKKKAKTIDLCNNPQTKEPKLKAAARIVPEWVDYDSEIRNLIQQIEKEKKNLTSFFQKGLKHDEL

SEQ ID NO: 3999 - protein, 1642 aa, Trypanosoma grayi
MADYLIPQSGGGHRRGVTFLMLLLVVTVTPLCGMRVAYGKGIHVTVVAPWNETSFLQEGCEWEAAHNALQDGFYTCLQNVWSHITTDNSSGGALALTQKSQYDMLLSVMEGARRPPSQVALLKMNLAARVYSPAVEAHWQLARRSVSLIGGCSAEGRPFVLVAGVAICDEQLLQNMLEASLTNVKNDDDKGETAALFPKLDHIHPQSRGQRTVILYGIVGEERTMQLLRVVERHLDRVCLAFRHLPLWGAMWKNALSVQGYGVTVDLKNIEYKAMDEKKGDAGTERDEVNVREVGDSTEPVGGFDVQLLKQRYPELKANLSSFAEFVAEIIDRDEVKVDFHIWEIQNMGSAAVQHVMSADNDEQLGVLLNLLMNFPLHASRLSKMGSAANAKMDNAMRNTMAEIASVVHPGQVLVFFNGRRVQTPQYSLFSLLQMMEEEEQMLEGLTRVLTSHRIPSENDHGFASVSAGVMNKVLNWVTRTVRQQTPEKGSEEDEPSRRIWIPKQNIFWLNDMEGDSAYDHLPDSLEAILSVGFNGMPTFPQKNLFHVVCIADPTTAMGLQTINMMLQLESRKQPLRLGIVLADTHWSPEIKVTAEGAEMITETVVSGATAAITATVWELLSDGEGLPVIMGFFAQLARLLEIHDVINEESVQIVATDALLAAGKRTLNDLMVDPKFVVFYQETQEQLFMMHLKDLPVTLLNGKMFPEGIVWALRNGLSRELHYVRQLVHKNKLQDTDKNLYDSIMQHGGALQRYSAALYEDETYVDWTSKSVLDFLHYRRFLLPYSHAGEVPLVSGVVVLRAAVTPRNLNAILKATWQLMQCEEGAHDCSRVRLTYAVCGVVQRAGRRTVWGDLERLLLTEDGSGEKRQLRLVYDFLATVAKKSAQRLDDPAVYESFVADMNFSPELHSILDSPAASTATQQQQQHALVEGFCTQMDRQLSAANGHTAEEAAEQTEKKKEEAVYYYANGRRFVYDDKFVDDDFADASLLEMSYAKIVQSVLAKVKFEKMSTELQQAGLDNSFYASKITALAALMKRDAAHGGHGEEKRLLPPAPGPLSFVVGPAKGTVPRHKLTIVVDPIGRQSQLLVSLCDYIARSPIGAVCAVYLNPSQRVDKPMRNFYQFVGDAHVHFDAAGRVVPPAAVFGRLPSQHLLTLGVEEPESWTLFPMEAKYDLDNIVLAKLPTASYYLYATYRLNSILITGTAKETGMSSPPRGLPLMLRSSRDAAPAAAAGVTRDTLVMANLGYFQLQSAPGVWYLTVQPGDIATAFYISRINKAQVSNAANGPNNGEFNYTSGQSIPIVVTSFNGEYMTLEVAKTPGHKTTLIQDLVAASDTRAEWPPRGPRAKRPERPTLNIFSVASGHLYERFLRMMIRSVMLTSSDVHGANTTRIKFWLIENFLSPQFKELVPLLAEHYGFDVGFVTYRWPWWLNKQTEKQRTIWAYKILFLDVLFPLDVERIIFVDADQTVQSDLHELYNMDIGNAPVAYTPFCRRHPNKATTNFRFWDRGFWVDHLRGKPYHISAIYLVDVRQLRAIAGGDQYRMVYSQLSRDPNSLANLDQDLPNYMQEQVPIFSLPEEWLWCETWCGEESKARAKTIDLCNNPLTKIPKLENAKRIIDGWEDIDAELEALSEKLRKQHSKK

SEQ ID NO: 4000 - protein, 1495 aa, Polytolypa hystricis
MARLKNYFAPWRLGLLFTAILIPTVVAAGPSVNVAVSAAFNAGPYLLELLETAAEENSTSYFPLLDRIAEGVFVDALTEKDLYEQFLQVLQDDGHVRDAETLSLFKFALSIRSTAPRIQAHYQYYNTSVEAEMMVAQDAVCPVWAYYEGHQYCSPSLERAQQSVSGDNHLRTLPFDRSLGDSESSLILYADIKSPMFNEFHPELSKRARAGEFSYRVRYRPSKSDAQRPLFVHGYGVELALKRTDYIVIDDREADQNVLKPKDDVKPTLAAVDDLKEESPADLKPLSASEVSRLGLSAASFVMSSENPFGTLLKLSQDFPRHSAAIAARNATPEFLTEFRESREMLPPGTNVIWINGVQMDPRTIDAFSLLGHLRHERKLINGLRGVGLSAKEAVTLLSDPIVAKSQVSEDVIRYDYRDDIEGGGVIIWLNDFEKDQRYEEWPTSIQALLQPTYPGQLPPVRRDVHNVVIPVNFADPRDVHLVVESIQVFVKRKIAVRFGLVPTLQDSGSVDQAKVTHYLFNNYGLVTALTYLEDSLSAKKVSSPHKGTFQAIVAERKPREGATLLSFEEVLKSDKYDSMISATKSYLKRLAADRKDAPFFANGAALLRDENWIQLLIARVSKDLEAIQRAIFAEDLEEESWVPQYYLADAITRRNALILPEDPDSIKILDLNELYQKYKAAFDTLLRIPAASESSLEEWATLLLVADFDTEDGRRQLAQIPEFKNKHPEAEVLLLHNGRRADASTAFSATLYGLRNGRDIDSAALRSLLKKWETPVEESSDSELAFAYWQGAQLLGEELRIKEGDTSVLLNGRMIGPIPSSFILEAEDLQQLLSYERKSRIDPVARATLHHDLATRFKEPLDFAILTSLVALSTESDVPEGIYDSGPHVRSNRFENWDTTYSAITVSKSDDPSIQIVAAVDPTTEVAQRWVPILKVLSELNGVNLKLYLNPRELLQELPIKRFYRHILAAEPGFGEDGSLVKPQASFQGVPAEALLNLGMDVPSSWLVAPKESIHDLDNIKLSSLKEGTDVDAIYELEHILIEGHSRDTSTGMPPKGVQLLLGTEKTPHFDDTIIMANLGYFQFKAQPGIWKITLKPGRSENIFNLDSVGGQGYKPKAGDNNNDVALLSFQGKTLFPRLSRKPGHEEDDVLDIGAARPGSARDYISKGLNFASGILSGVKGTPKERQADINIFSVASGHLYERMLNIMMVSVMRHTKHTVKFWFIEQFLSPSFKSLLPHLAKEYNFSYEMVTYKWPHWLRAQREKQREIWGYKILFLDVLFPLSLDKVIFVDADQIVRTDMYDLVSLDLEGAPYGFTPMGDSRTTMEGFRFWKQGYWKSYLRGKPYHISALYVVDLKRFRQLAAGDRLRGQYHTLSADPNSLSNLDQDLPNHMQHVIPIKSLPQEWLWCETWCADEELPAARTIDLCNNPMTKEPKLDRARRQIPEWTVYDDEIAAFERRVAEEQRGAAGEEEEEDEGDDDFEGGEKTGWKDEL

SEQ ID NO: 4001 - protein, 1349 aa, Zygosaccharomyces mellis
MKLLATVVALLSVLECTICLSISLQSAGISEKLKIWTIAQHLFRGDKKDILSKIYPLVMQLDEKFENIPVGSLCEAVSNCLSELGEPDLASLMPLYCQGYPMGFPPTSNYNHSNSNSYFVLNKKRYDNSDDVFYLKSSELKKQAQVPDQTMIAVNDVVIGYNLEAPIIYFYGCPNEDEGIFEEFSRNLYSEATKNGKLRFIWRSTCYVGHDVKVGPFPVELSLRDGKSDIDVLPIDHLDIPHQFDKSKYGLISPTDNQMSNLDLKVAHLIAQKYNSSKNFNSTLGFARGIINNFPLLVPELITVKNDTEAIMKSNTNLTESGVDHKLLGLYINGQNWRLSSLDQYTLLNALESEYRRLKQLVSGLIKIYSKSSLITAKDLITRFSQISIPNLQQSQPIKIDMHRIRGFSESVIYFNDIEIDDQYRDLSTDINAFFEKSKFGEIPEYRHNWNELIFIIDFSRLEDQDTQLALEGLKRAIGVVTQGYPQRIGLLPLNTGNSDNIVRKIYELKDRDLLELEDFLSDMLVGGSKITSDYVDIPDVSKLLRNLQIYETSIIINGEIYPFRKNTWHYLIAKTIKKDVRYLKRELKRHLRREGDKVQPIIDVRGVLHLKSSEARHMKYTPDYFADSTYTTLDNTAMQAWDERILEYFKGEEYNILHTVTLVDDFNTLQALKRLHNLVGIKFVGVKFRIIHSGVLGATWNTLKKISSKPSFLEEIKLLIRNSSRGVPNNQLNSTILRNWLLDLKPEFLSATSFMLVNGRFIHFEENEIPQIRLFEVTIKREAQRTIDVLEALETMFPGFTNSKIDPEFIETISATLAKMFYQGTELYGNGPAFTTESSLSRFDMTGILPINNFTIFESDSNQDKPIDLVLVIDPLEERSQKLLSLITDVQHLPFLNVKIVLYPTTDLNFMPIDRIYVPDFPDELSNKLNDIESKFDVKVEVPQNFVLNGHKNVYGYLVEIHAFDKRQPVSEGIIDGLGDVCLELVDGNGKSVDKTITMKTFGYGQFIVPKLSSNFSIGSCDPRYRVVSFSSDARADYMPAKSVSVTSFNPVVIYVKLEKIDDAVQITAEDNVINIFTVPRNEPLFEQEYRNMVLYVLHSPQTSYMGVKFWLLDQPFISLSFRKFINAINLDSKLNGNIELLKYEWPPWLRPQRFLERRMDAYKVLFLDVLFPKSVSRVIYMDPLISQLPDPFKFNERVKTKLPFAMYRMLGHGYWETRYWSQRLGDRNLKFHSVQPTFVVNLRNLRAYDGGNKLRIHYQRLSADVLSLTKIDQDLINDAQEDVPIRTLSSSTIVFLDTRNQDLVDAWLRDFKNLVAEDDIITATAASTTPQITENIREVQDFTHDEL

SEQ ID NO: 4002 - protein, 2133 aa, Umbilicaria pustulata
MDSSSSSSSQEGSMFPWILEHLLAYPGTYEIPLRTMYTLNSAPRAQPLPQATTIPNTPALSDGSSADSSPLSPAFPPEQKQAFATQAATEHFKSCLMKQVSKLPSQPFSLPPSFVTAFVRRCFTEELCLVDFTQALTAMDYLKDLETRRKRELRAALRRLGVDPKTFGTEGDDVSKKYPGVATWISGMQEKEKKVEALYTQVYIGLRRWTLINEMRLEPFNKANSIAMLNTLYPPTTNHPPTPQLTSTILASQRNGFFRYIQGVEKNGKGILSNLEQQGKRPNDENGWTVVRETVDKYLRTTNGVLEECAEVTGLDTFDPESNEYRHGGRRADSGISFVSADRPSTTTSNYSDKERASNKHIHNKPLPPEPVTKQLPPLVPGTKKGGSTLERIAREIKKIRSRSDVQEVSKKEEKDRMRGLKKMKSFGDIGKSKHTRTASGGDQTFDAEEMNRKRMIWEAQREKEADQMDSNTMASTHIVVHELFMGMSMLQQSADYSDLVITCGEEVSNVHRAIDAMTGKVELKEEDAVLVQHLVDHLYTLDYDYGLGAIRRLPDGEKVSAFWLEHYACKLAIDMHELADKYGVQGLSELATVKLEEIMLNLEFGPWKADDFVAIVDQVYEKTCLVDRMREVIVAQAVRDLDKLIGPSFHELIAKEPGFSMDVHTSCSRLVKPYRELKSQIREARYPPGNYGQYRLRRNGAAYQGETAAEENSTSYFPLLDRIAEGYFADDATEQDLYTGFLKLLKDDGHITDPDALSSFQFALSIHSAAPRIEAHYQYYTTSVEQSLMVGQDAACPVWVHFNGKQYCSPSLERAQQDFKGSKDPQDLPFDRVLGESAQAPSSIIYADITSPLFGQFHQIISRTARKGQSSYRLRYRPSPAASPKPLMLSGYGVELALKRTDYIVIDDRNAEKGEEAEETISSEAEDVSLEAGEVADLKPLSSAELLGLGLKAASFILESEAPFDTLIKVSQDFPRHSSAITKGNANVEFVTEHRSNRELFLPAGYNVIFMNGMQIDARQMDAFALLEQLRKERKLIGGLGDLGLTGSESVQLLSHPAIAQSKIEDVSQRYDYRDTLEGGNIIIWLNNIEKDKRYEGWPTHANALLQRTYPGQLPTVRRDIHNLIMVLDLSDLQDTEMLVDSLYNFVQRKVGIRFGVVPSLKSAAAIDQAKIAYHLLDTYGLSAVITYLQSSVQGRKAVGPSKGNFETTVKDRKLRKDRAASGLQAVLEADESLDRLENVRRYLSRLAADGASPPIFVNGLAIPRNEGWLQAMSSRVELDLRTIQRAVFEEAIGEDAWLAGQFLEGAATHRNALIIPEDESSIVIVDMGTLIKEHEHIYRGLPHLMPKEDTLKQFWAHLIVMADFDTPEGSKLVAEAVEYAKQQGEVEIVLFHNPSTSENTLRPISSAVFDLLLKGLELDSDELLLALKGSHKLDDSDNPMGVPGMDISGMAAAYWEAMQALSRSIGLEAGEQGLVLNGRFIGPIPRSAGFSSADYRQLLEYERSKRLAPANTALAALGLEERIDSPLSAAILSSLIALSTVSDVPEGIFETGPTLRMNRHAQWNASHSAITTGDAATASIEVVASIDPTSEIAQRWIPILKVLSELSGVHMKLFLNPKERMQELPVKRFYRHVLDAKPSFDEEGSLKEPRATFEGLPKEALLNLALDVPPAWLVAPKESIHDLDNIKLSALKEDSNIDAIYELEHILIEGHSKDVTLGPPPRGVQLLLGTEKDPHAADTIIMANLGYFQFKANPGYWKIQLQEGRSQQIFNIDSVGAEGYNPKPGDERTDIALMSFQGKTLYPRLSRKPNQEMEDVLEEGSKAGSTMDFVSKGFKFAETMLSNVGLTKQSQQADINIFSVASGHLYERMLNIMMVSVMRHTKHTVKFWFIDQFLSPSFKSFLPHLAAHYHFDYETVTYKWPHWLRGQKEKQREIWGYKILFLDVLFPLSLDKVIFVDADQIVRTDMHDLVTLDLHGAPYGFTPMCDSRREMEGFRFWKQGYWKSFLRGLPYHISALYVVDLRRFRQMAAGDRLRQQYHQLSADENSLSNLDQDLPNHMQMVLPIFSLPQDWLWCETWCSDESLREARTIDLCNNPLTHEPKLDRARRQVPEWTVYDEEIAGVARRSFFTMY

SEQ ID NO: 4003 - protein, 1435 aa, Thecamonas trahens
MRYLLAVVAACLLAAVVVEAQVRVAMRPRWAPTSVLQEASEFARTWGEPGLAFVDAVANHCPKCAHVVTDVQVVEALSASEAYGLAGRADLLRMALNVGAHAPAVEAARQVAALLADEACSSVSDGLILVAGEKVFCSEAAIDTGLADGSLVAAAGAGGLEELPMIRDALAAELLAVAAGTAPKAIMFGVLGTRTVSRVWLELRLALGDELAFGHGVASGGQEPSRLAGYGVELAIKSTEYKVVDDSSDEENDEGETVDADAPLPSLPGLDVTKLVERMPDEEAALRAAGVAFGNAAEIKPLKKWQLRDLGFKAAQAVVDASDPLAELARISQNLPSLASWLARKKNSAAGLHREVRETAAVAGAGSTALVVNGRVVDVSSTSIFQLYTLVGEELVLADKLRSLGLAPEHVAAVASAASPNQGASGDSVRVAVTEVKHIAYLNNLARDEQYASWPASIAVITQPTYGFHRVRRNVVTLLYVMDPSSPASLGVVFQLMQFHSGDAPLRFGLVLRPGPSDLSSRLVRGLLHVRGEGGSALMWQVLGGVAMRARGGVPLEEHFDAALSAVANWDGPITLADILASEAGDELADELAELAAYHASINIPANTFVINSRVVPNEGALQSVVASALRDELTRLAALVVAGKVNDKVNVFKYVNTEPDVLSSYSRLAVPSADAPLRVVALDPSKVGLAIGAWHGAEAAPVSILVVARDDGSAQCVVDKLAAYAVSELAHSGKFRYARLGVEAWASAAGDGDDAELVVVVNGRVIAMAASTACDELALGDLELMVKLEMESRVGLLLEGEAELASAGLRGRNKADVLMYASSLVFASARAADEARPVGAIRSLERAAGGVVVGPEAGATIRAIAVVNPLSEAAQELAPVLALLRESVGARVVVRLNPDPALSELPLKRFYRAALAPALVFDGQGARQQAQAVFSGLPTQFLLTLGVSTPDAWLVQPVAAKHDLDNLQLGALRRGDEVAAEFELSELLVEGRAYQVAPVGPPTGLELVLGTPREAVVEDTLVMANLGYFQLKAQPGVWQLQLKPERPSSEMYSMLNTTDYGLLKERSKAEFDELVDEARLADGTGRVVAVTSFDGASVTMLVAKKPGYEEKSLLAAHAEVADSGLSSVWSSLTGSRGGSKSDVINVFSVASGHLYERFLAVMMRSVMSSTQSKVKFWILRQFLSPSFKEALPKLAADLGFDYQLIAYQWPRWLLGQSEKQRLIWGYKILFLDVLFPLEVDRLVFVDADQTVRADLLELHTMDLEGKPYGFTPMCESNPDTQGFMFWKQGYWSSHMKGKPYVISALFVVDLTRFRAMSAGDTLRATYQSLARDPNSLSNLDQDLPNYLAPGQLPMHYLPQEWLYCEAWCEDGTGKLLDAAKSIDLCNSPLTKEPKLDMAGRVVAEWHDFDDANRALLRSPPSPSPGDSDVRHDEL

SEQ ID NO: 4004 - protein, 833 aa, Zancudomyces culisetae
MLELRGRELVQDKSSLIIADDDEREFKMVQTEKLDEGWMKDIKYITNANSSVVNSNTVTIWMRADLDDVKSKKAVAGVLETMVNKVKKIDIRLGLFLEGTKQIKYTGKGGLIELYYLYKSINNESQTVDAQEIVELAKKTSKVNLKVEDVQAYIEKLSKAQDNQKNKAEELNLVLDKSQTEPGTVLVIGGKIYPTINKKVNVNTKIIRAIIEKEFEDNHEGIEMGDTLKQDNADKFIKCNVVYLETMRQHKSQGLFQNSWKHTRSNIELLIKNPEKFTKITKGKNDYFVEFKAIIDPVSEEAITWAPLLRILSAMTGVKVTVFIEPSADKMQDDGEGTIKKFSRIVMNHKPVFYKGERQEPIGEFENLPRQTLLTLDLKVPSSWMVSASKSEYDLDNIVITDNNDHIAAEYRLNKILLEGHAATTDGVSPAGIQLNLSQLRTKNSTVVSDTAIMANLGYFQLQSEFGAYFLNINKQQTVDDVYRIENIKHDDFNAASSDSNIIVIDSFNGKTIFPVFSKEDSGNLGRRTAQKAVKYLMDYIPRFGGGLTKSKKSLNIFAVASGHLYERLMSIMITSVMKQTQSHVTFWLIDNFMSPKFKNVFLPILSAKLGFEYRLISYKWPYWLNKETVKQRTIWGYKILFLDVLFPMDLERVIFVDADQIVRTDLQQLYDMNINGAPYAYVPFCNDRPEIEGFRFWNHGYWKDHLRGKPYHISALYLVDLTVFRKLLAGDKLRAQYQQLSVDKNSLSNLDQDLPNNMQHLVPIFSLPPEWLWCETWCSSKTFKNAKTIDLCNNPMTKEKKLDVARRLLPEWTQYDNYIHSVLNKAPVKDEL

SEQ ID NO: 4005 - protein, 1091 aa, Strigomonas culicis
MAFEPMFMQANVLPRRNLMTSVYVVDPMDEESMYETVRAYQAIESGLFLRIGVVFFDPTWTETVDGDNVHGSPKDTEKLSVARLLSALLYAMDNKKDTSHKLYVIQTLYQDMKQSEQAKEPESVFQFVLGAMEKYTRTTLEQVLSSADFATWYHAQQQALRERRLAAQLPAVYLNGLHAREVEVKSLYKVYVDEVSTIRKLIQTAVLQDKDKNLYDTILKHFNARAKKRIHFTRPRNHLPLDTVDMFHFVSSRPYVYAEAYDGVVSPVTLALVVPCEAPLAHALTSLEIALSYTKAAAELRVRLTVAVCPARPATLASQIERVWRAAETLPEERRVGFLLDFVAHAKRAVEQLALDPLTNVSSVPALQLDDPSLTETLLRYEQHATAEASRRLDYLQQKFFENVRLRGPWYDPQLPWLFANGVTQALEADFTTADVRDIVEDCGALTKTVMRQIEEVPFAGPGTSFAPEALDSAFYATKIALVASITTPLAKRVSGRRAVTPIHEFIRATYGKTAFKMKPEGPVRHHMCVVLDPVLRESQLVMALSDHFLRSPLGVHLTVLMNPSTNVRIPIRNLYTFAADWDVHFDATGRVVPPSSIFRGLPTQALLTLGVEGPYAWTVFPSETDHDLDNILLSRLPADETLLRATYRIQSLVFVGSAYLNERPAQGLPLQVTPLLTREKPIDTLVMMNRGYYQLLVKPGVWHLSISPGPVASAFYIDTIDEQKLSAVRNGELLPSKERAQQIPVLMDSFEGKQLDLDIVAMDPERSVSLKELIQVSYTAKRDAWPPAKGTQATERPARPTLNIFSVASGHLYERFLRMMMRSVFRASSDLHGANTTRIKFWVIENFLSPQFKLYIPGIAAKYGFEVQFVTYQWPYWLHPQTEKQRRIWAYKILFLDVLFPLDVDRIIFVDADQTAHADLHDLYNMDIGDAAIAMTPFCEAHKNQATAQFRFWESNYWKKQLNGRPYHISAIFLVDLQKFRSSGSADIYRFIYQEYTTDPSSLANLDQDLPNVIQHLVPMYSLPEEWLWCETWCDQESKKKAKTIDLCNNPLTKIPKLQNAKTIVPQWEDWDRELEALAEEVLANLEAKS

SEQ ID NO: 4006 - protein, 1521 aa, Limulus polyphemus
MEVTGLKVCIFLIVFSCVRAKSQKSITVQLDAKWLDTPLFLEASEYLAEDSPDYFWKYVESIVRLGPGALQQKTAKQQYEVVVDIASKLLSPPKLAFLKFSLALRVYSPTIEMFHQIAKSSHFPSDCDSVAQVGGEFICDPEELRTLLASESKKSHTDTYQVDHHYPSSTSAPVTVILYGEIGTPSFIELHQYLKSKAEKKEVDYVLRHYIRRRSNKKVKLSGYGVELAIKSTEYKAQDDTQVKDEKQRDEDEEEQDKPDEIEGFIFTKLLDLYPEKKIELENFKSFVLDSTKEIATLKVWELQELSLQAAQKIISSPVEESLKVMQDIAQNFPTQARSLVHISVKPEIKKEIDANQQMFMQHHNLAPSDSALFINGMYFDMEITDVFSLVQVLKQETKLLEGLHNIGIPEAVVSKLLKLDMTEDKVDYAVDIRDSAIMYVNDIESDKQYRNWPSSIQDLLRPSYPGMLRNVRKNIYHLVIVADPSQSDVRDIYRLAESFYVHKAPVRIGLVFAVNSNASVDGYSDPGVALLNSYNFIAQDKTAYEGLSFITDVYVAMGDKDITVEDVTSLFKSRYPSEDMDIVFGIDSDYDTGRKLAWDFIERTGIGSPPQVLINGIPLKNKYLNGDMFEEAVLSEIMKQTPFIQKSVYKGDLSDHEEVIDFLMAQKNVMPRLNQKILSSDGTYIDLTGRVVEDLTIEDFNSLNVADMATTFSAHLKHITKRVEGIYFHPLTIWIAGDYDLPEGRALLASALAHLKSSQEVRLGVIFNPTVPLSPGVISKAIHSALSSLEQNTAKLFINKLLKEANIKAIEAGNKTLLNFAVSNMNTERFLEVFENDVTEIFARHSSFSKNVLGLPSGSRAVVANGRVYGPFDEEEKFSEDDFSLLEKYSMNMYGTKLSKELKSSPEMGKQDSELLMKAASLLLANPPNRVRHDVKFYSDKHSVITIPAADATEPAHEVLAVVDPVSRGAQKLAPLLMVLQRVINAKFRIFMNCVEKHSNMPLKSFFRLVLEPEPVFSPAEELGEGPVAIFSKMPTSPLLTLAMATPENWLVEVIGSPYDLDNIHLEQVESQVYAEFELEHLLLEGHCFEQSSGNPPRGLQFTLGTNSTPVMVDTIVMANLGYFQLKAEPGAWLLRLRQGRSSDIYEIVSHDGTDSPPSSKDVVVIISNFRSHVIKVRVNKKSGKLHQELLNDDDDNDDGSIWNSITSKFSGEKKDKDEEEEDKLNIFSLASGHLYERLLRIMMLSVIKNTKTPVKFWFLKNYLSPNIKDFLPYMSKKYGFEYELVEYKWPRWLNQQTEKQRIIWGYKILFLDVLFPLDVKKIIFVDADQVVRADLKELRDLDLGRSPYGYTPFCDSRKDMDGYRFWKSGYWASHLGNRKYHISALYVVDLKKFRRIAAGDRLRGQYQGLSQDPNSLSNLDQDLPNNMIHQVNIKSLPQEWLWCETWCDDESKQYAKTIDLCNNPKTKESKLVSARRIIPEWSDYDDEIKQLFETYQEEKQLNETKLLHKTETSHSHVEL

SEQ ID NO: 4007 - protein, 1585 aa, Dichomitus squalens
MIGALFPLLAWPILRTSAQAGKPPVNVELRTSWPATPILLESLEAVAIEDPSSFFPVLDAVTDPSVFPLPADKSSPEHAHKHVFDVALALDHLAAPGAYVAAEMHLALHSASPKLEAFYQYYNDHHAPRKETSGKNDDECGSWVDWYGEVVCDSKTLARLVETETLEPAEGSENVTSSAPPSSPKLLPFDHVLPDPTRLLDHQPQTAILYAALDSPNFRELHTYLYAAAQSPYPHITYVFRPIPPVHRSASKRTYLSGYGVALDLKKMDYLAVDDRLQSGGTQDDDSGTAVQDEEVDPIVTLLQQYPIDDGVDVTLPLTEAELLEIDIQAAQLVYDAPLADKLTTLKHLSQNFPRYAGALARRVPIQEDLLEEIAANQPRARGGLNAVWLNGVPLEEKDLNPWGLLRLMRRERKVVGELMSLGLSSEESIELLTHAKIAKAQTEGGALDGLFDASDRAEGGGVIGWFNDFEKDERYARWGGSLKILLRQMYPGQFPALKFNMFNIVLAVDLSRLSSVDFLATTVQALINRGLPFRWGVAPIVETEDGARMARLFYYLRENFGPQETFGFFYNIAQRDQAFETLRPSVDWPNVRSVFKALLARQEELPEGLETDLDTILEGTEGDLDKQRAYATRLSTKLSEAPQGHVFFNGKHFDLDDDFLRYLQTEASEHLQHLQLKVYRGELTDEDDAESISTYFYDLPTTAKRRNMYVHPSTAAGGLRIFSLPELIESNGLESKPGAFVYPEQSEQVPLTTYIVADFDSEESRGLIKEALLSITPGSLSRLSFIHNPATVSPFAKSDKFASPSRFLAELVTRGLLSKVTPERLLNALGLGDPEVSVDHEKQEPYFFNELTGSKVFSGEEYSKYLNACRLAARQLELQPGEQAVIVNGRVVGPIKPGEFVAGDFETLAAYENHKRVQPVYEALLDVHKSLENATKEDLAEFVSIVSSIVSSIQQPDPSEVGLFNAPQRPRLRSYQMLGGIYTSFSVGDNSTAIYHFGVLVDPISSAAQKWTSLFEWLQEIPGVYIEFHVNPTRFHELPLKRFYRYNLSPRLTFDEYGNEVHAKTQFTQLPVEPIYTLAMDTPQSWLIRPKEARYDLDNIQLSKLSAQDRVSGLKAVFDLDYLVVEGHARESATNAPPRGLQMQLVTSNSTPIADTLVMANLGYVQFKTKPGVYKLEIRPGRGREIFLMESAGNEGWTSPIVDEAGDEVTVTSFEGVTLYPRLARLPGKEREDVLQATSSQTKEQGVVENLMAKVSSLFGSKHKEEAAVAPVDDGQADINIFTVASGHLYEAGSFPSRRFASIMILSVLRHTKSSVKFWFIENFLSPDFLEFLPHFAAEYGFQYELITYKWPSWLRAQTEKQRIIWAYKILFLDVLFPMDLKKVIFVDADQIVRADLKELVDLDLHGAPYGYTPMGDDNPDTEGFRFWKTGYWKDFLRGLPYHISALYVVDLVRFREVSSILDILRGHYQQLSADPNSLANLDQDLPNNLQREVPIYSLPEDWLWCETWCNKDRLHRAKTIDLCQNPLTKEPKLDRARQIPEWEVYDNEIGAFARRLRSGQADSEDTQDTLIEDTPKHVKHEEL

SEQ ID NO: 4008 - protein, 1299 aa, Glycine soja
MAFRDYLLSSTVSDTLDVWELKDLGYQTVQRIVRASDPLQSMQEINQNFPSIVSSLSRTKLDDSIRDEIMANQRMVPPGKSLMALNGALVNVEDVDLYLLIDLIHQDLLLADQFSKLKIPQGTLKKLLSTSPPLESSIFRVDFHSSHVHYLNNLEEDAKYKQWRNNLDESIDMIISLYENNFPVRFGIVLYSSKFVMQLENHATKEHSDEDISTTIICLFSYINENYGAEMAYRFLSNVNKLRIESDGNADDALELHHVEGVFVETILSKVKSPPQEILLKLYKNQKLKELSQESSKFVFKLGLSKLQCSLLMNGLVIDPTKGPAWGCVGGVELVVHVDGVAVGVMHRSLAEERRKGHQKKGSEQKGPPRTEALINALNDETPRIQEQVYFGQIMSDTDVLAKFLSEAGIQRYNPKIISDSKPRFISLSMFTFGEESVLNDIVYLHSPGTMDDTKAVTHLLAVDITSRNGMKLLQQGIHYLIEGSKNARVGLLFNANRSPNLFSLLFVKVFEITASLYSHKTNVLDFLNQLCSLYEKNSILSPPMEAESTQAFVDMVCELGEANGLPSKGYRSALLEFPAGEVRKHLTKVQNSLYRVLGLESGANAVFTNGRVTYPIDESTFLSADLHLLESIEFKQRTKHIVEIIEEVEWHDVDPDTLTSKFISDIVMALSSSMAMRERNSESARFEILNDQHSVIILNNVNSSIHIDAVLDPLSPTSQRLSGILRVLWKYIQPSMRIVLNPVSSLADLPLKSYYRYVVPTMDDFSNTDSAINGPQALFANMPLSKTFTMNLDVPESWLVEPVIAFHDLDNILLENLGDTSTLQAVFELEALVLTGHCSEKDHDPPRGLQLILGTKTAPHLVDTLVMANLGYWQMKVSPGVWYLQLAPGRSSELYILKEDGEGSYDKQSSKLITINDLRGKLFHMEVLKKKGKEHEELLLPDDNAQDEKKGSGLNSNFLEWASGFIGGNKLSKKAEKSSQEKGRGGRHGKTINMVSIASGHLYERFMKIMILSVLKNTHRPVKFWFIKNYLSPPFKDLIPHMALQYGFEYELVTYKWPTWLHKQKEKQRIIWAYKILFLDVIFPLSLEKVIFVDADQVVRADMGVLYDMDIRGKPLAYTPFCDNNKEMDGYRFWRQGFWNDHLQGKPYHISALYVVDLKKFRETAAGDNLRVIYETLSRGPNSLANLDQDLPNYAQHTVPIFSLPQEWLWCESWCGNATKYKAKTIDLCNNPMTKEPKLQGARRIVSEWPDLDFEARRFTARILGDDQESESILPPNQSKNLNSEDSSNEDMESRAEL

SEQ ID NO: 4009 - protein, 1537 aa, Pleurotus ostreatus
MTPSRGFRRVAVLLVLPCLVHSTSPPVRVSLRSSWPAPPPIVEILETVALQTPSSFFPLLDALTDPDTLANFPSLSPEALYQASIEVASENGLITDAGAFAAVEMNLALHAATPKIEAFYHHYSNMQSKGTLKPDYTRPKVLPFDHINPSPQQTLDRPHRTAVLYASLESPNFRELHSYLFSLSNRGDPHVEYILRYVPPAGREVAQRNYLSGYGVALDLKKTDYLVVDDRQASQSRDGSQGEQRDGEDAVDLVMNLLETFEDKKGDAPNVASALSEEEIAELGFQATQLIATSDDPLGALTQLSQNFPKYAPSLSRRVVVNDSVRRELGNNQVQVQGGINMMWLNGATVQDKDVTPFALLRLLQRERQIVDSLTSLGLSNGQAVELLTHPTIAEAQSSSAALDGMFDASDRIEGGDVIVYWNDIEKDKRCALPMMHPTYPGMFHNIKLNIYNVILVVDLSQPTALNFITGPVSNIIERNFPFRFGIVPILETENGTKMAKVFKYLVKTVGRKATMEFFRALTQSPTFDIAHVSVAYEAFRASLDSEDISLKPLAEILSPEAESDESLMKAKHYAQRLGTTLTSSEGGHAFINGKHFNLDDVRVSLCSFDLLYTGELKEEAAETISTYFYDLPSTNERRNRYIYPSSDANSLRIYSLPEVLADTGYHPIFIAPEDTEDVPMSTYVIADFDNSSGVQLAIEALKSMLQLPQTGGSQTRLTFVHNPASVPSSDRSSVSWLLSHLVASDRLSKVTPGQLLRALNNDVTISGDAAQAPLSQVKELVGVDAAEFDATAYAAYVRAGRLISRKVNLQPGQQGLVVNGRVVGPLPGGEFLAPDFLALMKYEHKKRFGVVAAVLREVLSLAPEPESTSFSNIATMVTSVISSIQLPDPSESGLFDTPHRPRRRAYQALESNLTAFSFGDNTTAIYQLAVLVDPLSETGQKWASILNWISKVPGIFIEVYLNPARYREMPLKRFYRYNLISSLTFDMDGNEIPSRVVFEGLPIEPIYTLAMDVPSSWLVRPQEALYDLDNIQLGRLSSEDTTIDAVFGLDYLVIEGHARDSVSNAPPRGVQLELIDGDDNAIDDTLVVANLGYVQFKAKPGVFQLQIRKGRGRDIFEMESVGNEGWDSPTVKAVGSEITLTSFEGLTLYPRLRRKEGMDDVDVLTDTDEEDAPGMFGGLASKVMSIFSPKEGTKDVATTIPQADINIFTVASGLLYERFASIMILSVLRNTKSTVKFWFIENFLSPSFLEFIPHFAEEYGFQYELVTYKWPSWLRQQKEKQRVIWAYKILFLDVLFPMDLKKVLFVDADQIVRADLKELVDLDIQGAPYAYTPMGDDNYDMEGFRFWKTGYWKEFLQGRPYHISALYVVDLVRFRQIAAGDMLRGQYQQLSADPNSLANLDQDLPNNLQREVPIFSLHEDWLWCETWCSKDRLHKAKTIDLCQNPLTKEPKLSRARQIPEWEEYDAEISRFAQKLAKEGSLHSRIAAADTRVLADAGTASSGKSDETSAEAGGGDPASNEAAREKEESPKDIRDEL

SEQ ID NO: 4010 - protein, 1415 aa, Meyerozyma guilliermondii
MHYVSWTLVWLVTWLGFVCGDLGSLEFEVRAAWKNTPFLANLIESVAAYNETWYESAVAAYAGFGDDDDVQDSSEVSDEAIYQRIMAQLPAELKDFINFDSVYKIHSPRIATHYHQFEEEYGGNNLSKLEKACSTDSFGAKVPFINGHPHSFLVFNDKIYCSPDDIYALQTQDASDYTPLEIDRVIGSHTKAPVVVLYGVPGSPSTLAFLRHLMADSQAGKLRFVWRYLPATNIGDFMVGYGVQLELSNRTLPKHNVDELCMSVLAEKSANELYYHLRDILRSPFSKLNTAAEKLRQAFYDAKDKNARLGLTKASNGIYINGAIIPKAELSVYSLVAKIKSELSRMKNLKSLGFTTTQARALLEKFALLSAVKDAQYRKGNTIMGGNDNRFRVYQDDGVIFFNDIESDKNYVEYTTDAHVAYLEQSKSLRVGQIPALRQNVHDLIFAVNPSDRRQLEVFFTLAKLILDRGIPQQIGLLPLITSKTDEAVARAVHFLFKKGSPQEALGFLYKCLQAEKGNEEIAELAGTIPVPPEYRAPLFTESTFRYSIEKPSVVVNGVIYELQSPGWQTAMVNQLSQDVMVLKRHLETNSQTNMKQILYENASKFRNLRISPQDPSSIIYKEITADLVLHATTLKMKAESSTELPGTIWLIGDYTTSRVLEQLHVLLKFIKREKRFQINMIHTGTNEDFLEEMLSGTKDTQNLDTKGHKILLENIMKLIPTASSHSTVCSTAQHLLERNNLPLAYPYILFNSRFFRLDTKFDLKEISLLASYDSKQRMSILKDLVGAYKDIFDMKSLMEFAPNEHKEDWFDLLSSLVTTLYYNSEYITSGDVNRFDFSGLAYDNSVVLQNDEDEVEIVVIVDPMDSYSRKLIETVHAVKEFKSVSIKILMHTTEEDTETTDCVYSSIIPSASPQFSQTGLYISENSIHIRGPKNVSTSFTIDAPYSWHVVPQLSSKDLDIQKFNLSEEKWAIYELKSLVTDGYAKDILTGFSPSGAVLQMEQTNFKQDTAVFGILGYFQFRTPPGIFHLKTKCLADAENCYDLLSAGNAFNASREIVNLVKIPVFSLNGLQITPRLQISEKKQEKTQGSKLNFWSSKGVENTGEDINIFTIASGELYEHLLSIMLASATSHTKRLVKLWLLEGFLSPKFRLNLPALASKYGFSYEFISYKWPIWLRSQQPVLRTVWGYKILFLDALFPQDLKRVIFIDADQVLRADLMELMETDLQGAPYGFVPMCESKEEMKGYQFWKQGYWAQMLQDDLKYHISALFVVDLVEFRKRRVGDRLRAHYQKLSSDPKSLLNLDQDLPNNLQRIVPIHSLPPEWLWCDTWCAKEELGRAKAIDLCNDPTSTEDKIVRAKRVTSEWDDYNEEISRLLSESSMEYCQKPGDLKDLQLTLKDDGSVEADDSDYFHDEL

SEQ ID NO: 4011 - protein, 1418 aa, Brassica oleracea
MGTNLRSVIYVFLLLFVVVFTVNAQNRRPKNVQVAVKAKWQGTPLLLEAGELISKESKQLFWEFNEAWLGSDGDSDCKSARDCLLKISTQASALLAKPVASLFQFSLTLRSASPRVVLYRQLADESLSSFPHGDDPSASHCCWVDTGSSLFYDVADLLPWLASPPTAGGDAAQGPELFDFDHVHFDSKAGTPVAVLYGAVGTDCFREFHLSLAQAAKEGKVTYVVRPVLPSGCESKTRPCGAIGARDNVSLAGYGVELALKNMEYKAMDDSAIKKGITLEDPRTEDLSQDVRGFIFSKILDRKPELRSEVMAFRDYLLSSTVSDTLDVWELKDLGHQTAQRIVHASDPLQSMQEINQNFPSVVSSLSRMKLNESIKEEILSNQRMVPPGKALLALNGALLNIEDMDLYMLMDLAHQELSLANQFSKLKIPDGAIRKLLLTTPLPEPDSYRVDFRSEHVNYLNNLEEDDMYKRWRSNLNEEETLLNAMNDELPKIQEQVYYGQIESRTNVLDKLLSESGLSRYNPQIIGGGKNKPRYVSLASSTKSGESMLDDVNYLHSSETSDDVKYVTHLLAVDVTTKKGMKLLHEGVRYLIGGSKSARLGVLFSSSPNVDPYSLLFIKFFEITASSFSHKEKALHFLDKLCSFYEREYLFKTSVESGSSQMPIDKVLELAEEYGLPSKAYQSRLVESLDEELRKRMIKVAQFLSWELGLESDANAIISNGRVIFPVDERTFMGHDLHLLESMEINQRVKPVQEIIEGIEWQGVDPDLLTSKYFSDVFMLVSSAMATRDRSSESARFEVLSSEYSAVLLGDENATIHIDALIDPLSPTGQKLASLLQVLQKHVQTSMRIVLNPMSSLVDIPLKNYYRYVLPNTDDYSSTNFDVDGPKAFFANMPLSKTLTMNLDVPEPWLVEPVIAIHDLDNILLENLGDTTTLQAVFEVESLVLTGHCSEKDHEAPRGLQLILGTKNRPHLVDTLVMANLGYWQMKVSPGVWYLQLAPGRSSELYVLKGGNDGSQDQSSLKRITIDDLRGKVVHLEVVKKRGKEHEKLLVPTDGDDGVQQNNERGSWNSNFLKWASGFVGGRQQSVKEVAKKENEKGGRHGKTINIFSIASGHLYERFLKIMILSVLKNTNRPVKFWFIKNYLSPQFKDVIPHMAHEYNFEYELITYKWPSWLHKQKEKQRIIWAYKILFLDVIFPLSLEKVIFVDADQIIRTDMGELYDMNIKGRPLAYTPFCDNNKEMDGYRFWRQGFWREHLRGRPYHISALYVVDLVKFRETAAGDNLRVFYETLSKDPNSLSNLDQDLPNYAQHTVPIFSLPQEWLWCESWCGNATKSKARTIDLCNNPMTKEPKLQGARRIVTEWPDLDLEARKFTAKILGEDMELNEPVAAAATDKPNPPPSSDISVDSEQDLESKDEL

SEQ ID NO: 4012 - protein, 1535 aa, Sarcoptes scabiei
MSSNIEKKFSFKILLILLFFINLYPIFSKDISRTKSVRISLQSKWPQNPIYLEVAEFLSDENSDYYWRFIENLGTHLSSSKRKNLSDLSLKEQYELSLTLASQLLRSEAKLSILKFSLSVRSYSPKVIVFQNIIQDLLSFNQNSLVNCVDHFVELSLLSNKSSPLDRYVCGAEAIEKSINEYIELIQKNFDQKIDHPATYSIDHIYPSKFSCLQHSKPILTVILYTNIGSENFYRIHKLIRDKITSDSPLRYIVRHNPLISNEPTKVALSGYGVELAIKSTEYKAQDDTRVRGEILSVQKEKALTVLKEMSQNFPIVARSLVKINVDNELRREIVRNQQIFYQTLNLATSDSALFVNGLYHDVDSIDIFSLLETVKSEFYTVSKLHWLLNGDQSRIKQLDSILNQQQKHEIQLDIRDAAVLYINDLEKDDLYRNWPYSLNEMLRPTYPGILRNLRRNLYHLVLVMNPSHKESFDMLRMAESFYVHKAPVRIGLVFDVNDADSVTGYTDASVACLEAFNYVAQTKNAFEALSFLTDVIAFVTSSEKVRNLESVDIIGQLKSKFKLETDDLDDIFGSESSFDTGRKLSADFLKRTGLYHGPKALLNGIMLKESHLNADYFEDAVLGEIMRQTSQLQKAIYKNELTDNDDVLEWLMSKKTVMPRINRLIFDLIDNYQQKSSSSKVIDLMSEKIIKQHSSSLDPTRLFESNVNDLLAELTSSLRYINSKKDCNPVTVWLVSDFHQEESRNILLSCLKHLRETSRAMRLSLIYADHNPITRLFESAFSVINSSSQSLNFLIKSIEHNDWNDMETIYEFASQEYRQSLRERYSLLNDSNHSPFPLHQVLASKLFSISSHSNEMILVLNSRIIRLPLKREKNSSQVINEDDFALMERFVKNFFTDKILSLLEESVKTMGTRKCSDLILRLCSVLSGKTSTSKQRYDISSNIYEEHSVLTLEPKSLEDPFIEMIAILDPLTRGAQKISPILENFYQVFNCKIRIYFNAMDKHSDMPLKSFYRFVLDRELKFDSSGRIISPSALFKSMPTTPLFTLGMSVPENWMVEAIEAIHDLDNIHLAKVSSNIVAAVFELEHLLVEGHCFEQSSGNPPRGLQFTLGTKTDPTKYDTIVMANLGYFQLKASPGIWTLKLRHGRSDDIYTIVSDEDSEQGPNGTEVFPIISSFRSLVLKIRVNKKPGKQHEELLYDSDDLSKENEGWFASWTSDLNKSMSHSSKSIDSEDDEDSKRINIFSLASGHLYERLLRIMMLSVLKNTKTAVKFWFLKNYLSPHFKQVLPKMAIKYNFQYELVQYKWPRWLHQQTEKQRIIWGYKILFLDVLFPLNVKKIIFVDADQVVRADLKELRDFDLEGAPYGYTPFCDSRKDMDGFRFWKSGYWATHLHGRKYHISALYVIDLQKFRRIAAGDRLRGQYQGLSQDPNSLSNLDQDLPNNMIHQVSIKSLPQEWLWCETWCDDESKSKAKTIDLCNNPKTKEPKLTSARRIVDEWETYDKELRSFLESLKSEEEKADQYSASVVHPIDHHQEL

SEQ ID NO: 4013 - protein, 1614 aa, Heliocybe sulcata
MKPASALWTVAACLTSVLAVLSPPVKVSLRTSWSAPSILLEIIETVSLENPNAFFPLLDVLTNAKISSLPSDATPQATYEYVLSTAISEGLLLDPSSKAIVQMNTALHAATPKIEAAYQYYLDRHGKEKADTDNDGCRSWVDWHSQKVYDVETLAHLAGHETIDSSHPMNETTAPLARPKLLPFDHVHPARSQLRDLPPHTAIFYASPITDNFRELHEYLLSLARKPNAANVEYVFRHMPPCESRQAKEMSYLSGYGVAMDLKKMDYLALDDRRATAHSQNEVSDIEREKEGAIADAIAADPIITLLQHHPENTTADANAPLNEDELLEIGVKATQLIMSSPNPLATLQHLSQNFPKYATALARRVVVNESLLEEVGNNQYKAQPGISAVWLNGNPVSEVDLNPFGLLKLVRKERTLVASLTSLGLTPPQVVDLLTHRAIAAAQGGGDILDGMVDASDRSEGGDVVVWFNDLEKDARYARWSPVLRTLLRPIYPGSYHNLKLNLFNVVLVLDLSRTSSLHFLTSTISQIIQRSFPFRFGVVPIVEGDDGMRMAKLVYWCAKTYGRAGTMKFLKNVVQLQTAPIVDWRTVRTAFESFVANEEPPTEEFSAPDLDAMVGSESGSELEMNVKGVAQYAKRLGATLAASPSGHAFVNGKHYDLDDEFLRNMQVEISAQLQHIQEKVYMGEIRDEDADKVSTYFYDLPSTAKRRHPLIVPSSSGSLQIRSLPEVFSRVGRGLGVEGYLLPPGDRHLPLTTYAVADFDTPEGLWLVKELLETMDEESLSRITFSHNPIIPSTPSWTESPVSTLFAHLVQNGLLDKATPERLLRILGFGAAAAQNGHPQIVISNEDDLLSELIGGVDAEVTAQTYDEYLGFGQLFAKELGLKPGEQALVVNGRIIGPMKNAQFLAGDLRELYTYEMRKRVEPVFQALQEIVPDMATFDRGTFADVVSLSSSVVSAMQIPDPSEAGLFNAAYKPRTRNYRLMEGNFTRFEVGELGSALHQFGVILDPLSEAAQKWSSLFEWLSNAGNVYFEIYLHPAGYREIPLKRFYRYNLLPKLSFDADGKELQSTTVFQNLPLEPIYTLGMDAPPAWLVRPREAQHDLDNIQLGIITAKEWLLGVEAVFDLDFLVIEGHARDTMTNAPPRGLQLQLTSGTGNATIPVADTLVVANLGYSQFRAKPGVFQLEIRDSRGREIFETESVGNEGWDSPSVKEVGNEVALTSFEGLTLYPRFARKPGMERADVLEELDDSSSISSVAEEVLHKAWSMVTSFFAPKAEAPKSQELQTRQAEINIFTVASGLLYERFLSIMVLSVLRNTNSTVKFWFIENFLSPSFLEFIPHFAQAYNFQYELVTYKWPTWLRAQKEKQRIIWAYKILFLDVLFPMDLKKVIFVDADQIVRADLKELVDLDLHGAPYGYTPMGDDNVDMEGFRFWKTGYWKEFLQGRPYHISALYVVDLVRFRQMAAGDILRGHYQQLSADPGSLANLDQDLPNNLQTQVPIFSLDEDWLWCETWCSKDRLPRAKTIDLCQNPLTKEPKLARARQIPEWEEYDSEISRFARKLAEDGLIHSEITAAGADVLASVAAGAAAPAVGTADIPEERLDAESEGSRVHEEL

SEQ ID NO: 4014 - protein, 1502 aa, Pochonia chlamydosporia
MITDTPLEILPGFQEKALALVPVEGARTERNFNVTHGVTGTTCRGAPRGVLLRTTSTPIHAHGGGFLAFLQETAAGENESSYFPLLDRIGNGYFATATSDSELFRRFLEVLHHDGHITNPDALSTFKLALSLRSAAPRIESHYQHYTTAIEPLEGLQECDMWVLVNGKQYCTPDLDEAVANQLLSAAVKSLPFDRALGRGTTAVLYADPTSEGFPDYHRTLSKAARVSTLTYHLRYRRSKSHIGRPLPISGYGVELALKKTDYIVIDDRRSSQSIEQKSLEQEEILDGKENMSDLTALSKSELASIGMKAASFIQKSNEPFDTLMKFTQDFPKFASSISSHNVSHTFTEEYKHNQAQMVRGGINFLWMNGAQLIERQIQPFTLVNMLRRERRLVDGIRGLGFDGNQAVRLLGHEAVSAANENSEPLRYDWTDRLEAGQVILWLNDLENDDRYSSYPKTLSSLLQRTFPGQIPPIGRNIFNLIIPADLSNIEDLKFIAEVQSILDRGIPIRFGLVPLQSSHEAKIQAKIAYFLAKSYGLECVSSYVTGLTKAQPNGANPETLLSAVTANYSLLPEGEDMTLSTILETNEFTEKLSMAKRWSNRLKADTAVRPLFINGAAVHRDQNWMQSISLTVGADLQTVQKGVYHGALDDHTWIPGIFIDGAATRRNIYISGKDEKTLRMLNIAKIYDESAAQLDALPVIESSTESTKESWAVVTVLTDTSSNAGLGFFLSALEFRRNNPGVRLDFVNTQSNVRLSSQINAALKANQAKLKDIKTIQELKKLMQEATNYTASDDYEEFLSKVLAVSKTGIGSQGLIMNGRVIGPIAPTTPFDSEDFEQLLVYEQNRRIFPVYAAVADLGLSEKLSTAMTAAKLTSIIALSTISDLPEGIFESAPAIRSNIYDSWNANHTVIQTGNPKTANIHIVGLLDPVSEKAQRWAHILKMAAELDGVYIRLFLNPREHVEELPVKRFFRYIVESTPKFDETGSVKAPTAAFEGLPSDVLMTVGMDLPPAWLVAPKLSVHDLDNIQLSSVESDVEATYELQHILIEGHSRENEGSAPRGAQLVLGTENNPALTDTIVMANLGFFQFKANPGVYNIHLKPGRSADIYTIESIGANGWDAVPGDEGSELALMDFQGTTLYPRLKRRPNMENQDVLLDTSSQTEGSIVSKGLKLAEGLFGGGRNKPTISPRHAEINIFSVASGHLYERMLNIMMVSVMRNTKHTVKFWFIEQFLSPSFKEFIPHLAKEYGFEYEMVTYKWPHWLRQQKEKQREIWGYKILFLDVLFPLSLDKVIFVDADQIVRTDMMDLVNLDLNGAPYGFTPMCDSRTEMDGFRFWKQGYWANYLRGKPYHISALYVVDLRRFREMAAGDRLRQQYHALSADPASLSNLDQDLPNHMQFQIPIHSLPQDWLWCETWCSDDDFAKARTIDLCNNPQTKEPKLDRAKRQVPEWMVYDEEIAALDLRRKHREFGQSKEQKVEKETERTNSGDDVAESGHSRDEL

SEQ ID NO: 4015 - protein, 1451 aa, Candida tropicalis
MMSMKCISTFLAFCLLSTTVNAFLNNNLSIQLDAPWQKIDFLPSLIETVASYNSSLYYTTIETIFGLDDSDNDFDEDSSDKNIYEQICKNLDKYTKSFVDFDLINKKHGARVVSHYDHYQQVLSRMGDRLQKECEYDSFGNEVKKKNGQLQTWLLYNDKIYCSANDLFALRTDTSKEKTLLFDRVFGDNEEAPLLVLYGNPVEESTKEFFKVLYPDAMAGKIRFVWRYIPTFRKRQDTLPGYGVSLNMKNYDYGNGEKTSNFDLNKDLHKINDSGILIPVPEKNRDELGIKFTSFILSNRYKIHKYELLSTLLNDFPKFIPYIAKLSKSFNYEKVKTKVTANQDIGMSDESYGIYINGSPIHGLELDIYKLGNKIREELETIQNLVKLGFDSIQAKLLLTKFALLSAVKQTQFRNGNTLMGNNENRFKVYQSEFEKGNPGKGGVLFFNNIEVDVTFSEYTTNREEAYLGVSSYKLKPNQIPPLKENIHDLIFALNLANKSQLRVFFTIAKVILDSGIPQQIGLIPVIGDDPLDKEIARKFYYIAENSNTPEALALLYKYFDSANSDEAAAILNQVKVSKNFDVDYNYVLDKFSITEASVIFNGVIYDLRSPNWQIAMSKQISQDVSLIKSFLRQGPVEGKLKDKLYSNAKEKRNLRVIPLEPSEIIYKSVDTELLNESIAFKKIDKEDGVSGTFWLVSDFTKVEMFNQLIDLLSFLKKKPIQVRVVNTGDSKVFKSLHKNYKLTTLTNSQIEEIIEVLEDAELSKYDNPEVKRLLERKHLPSHHSFMLFNSRYFRLDIPLEPTELEELLEYEFTQRLNLFNDILYAYPDEFESKKLNEFNSLVSGLDSMDWFDLVSSIVTKSFHVDEKMFISDVNRFDFSSLDLSNSIDVSVNKEENPIDILVIMNPMEEYSQKLLSIVNSIKTFPFVNIRILLQPKVVSNEEIRVHRFYRGVYPSSDIQFDENTGIVVENNIAEFHNLPVDTRLSTELDVPTKWIVVSKSSSTDLDNVAFNKVVKSVNGKFLLKHILIEGFARDIHTGRTPDGLSFKLVHNNITTDTQVMSSLDYFQLKAIPGISLLSSNPEYNLLSASENKYDFNHDSLDEVEVPVFSLDGVTLYPRISKGDGITKYSNRHADINIFTIAGGSLYEKLASIMIASVRKNNPESIIKFWILENYITPEFRQLMQLISKKYTVQYEFINYKWPKFLRNQKSKERTIWGYKILFLDVLFPQDLDNVIFIDADQTCRSDLTELVNMDLQGAPYGFTPMCDSRKEMEGFRFWKQGYWSDVLKDDLQYHISALYVVDLKQFRSIKAGDRLRAHYQKLSSDPNSLSNLDQDLPNNMQRQIKIFSLPQNWLWCETWCSDESFRDAKMIDLCNNPLSKENKLDMAKRLLPEWVEYEKEIDELVSNLKEISSSVEDDENEEMEDDSILFEDTGFDEEEEEEEEDYHDEL

SEQ ID NO: 4016 - protein, 1558 aa, Frankliniella occidentalis
MTVKLWAVVAIAALMPHVLYCASPGKKTKSVTTLINSKWEATPFTLEIAEYLAEENKDSLWNFIDEVSALSPPLVDLGTDQQIYEKALAVGSRFISSSQSQLLKLALSLHIYAPKIEMYSQMAKEHGVVDKGCPCAVLLNGRLICHPSQLEESIANELSTNKVPSESFRVDHHYPGSENRSLVAVLYGEIGTYEFAQFHKVLKTQASEGKLGYILRHYVKERPNRKLRLSGYGVELQMKSTEYKAQDDTEVKGGAEGDGSQEEKEDEEIEGFNFNVLKSLYPDKIENLDKFRQGLIESSNEMAPLKAWQFQELSLQAAERIMSSSKDEALHVLTHIAQNFPLQARTLVRTVVNPELKKEMKQNQDLFSTSLNLQPQDTAIFVNGMFFDLDVVDVISLLEIIRQEQRLMQGLHTIGVSDKKMNALMSLDLSSGLGGNTEYGIDIRDSAVFWVNDIENDKAYKRWPSPLRDLLRPTFPGMLRSIRRNLFNLVIIADPSKLNSFSILKLAESFIHHQSPLHIGIVLATSPDSKQTGLTDASVALLNGYNYAVENGSPSDGLSFLTDVYAAIKTENRDVKVEDVHKKLKSKYKGVDLEDVFGADSDYNTGRKLAREFVERSGFRNLPQALMNGIPLSDKMLTADEFEEAVLSEIMSQTPIYQKAVYKGELRDSDNVIDFIMERPNIMPRLNERILNSENNRQIDLMRTVTSVEESISPPVFSLLGSSDQSALMVSTMRYFSPRKQSKTYFLTNWIVADLTSSCAKGRNLLQSALKQMKSSGAVRVGLIVNPIEGKSNDLLNRIALAALKVLSPDEATTFMLKLLDSKEVIQQLLAGEKKLSALGLTGINVAAVETAADTKPIKDNIKRHIMYVERTLGLNSGDTAVVSNGRVLGPLETTETFTVDDFSLLERHSFSTHIEKIKSALQPSPSASFFDEDDIEDTTELTSDVALRIVSLLVSHPQTRSRFEIPTFTTDHSVINIPASRPKEPAIRIDVIVDPVSRGAQRIGPILTTFQTALNCHIRVFLNSVEKNSDMPLKSFYRFVLEPELQFTPEGQLTAGPIARFTNLPEAPLLTQNLQVPENWLVESVASPYDLDNIRLEDVVGNVHSEYELEYLLLEGHCFEAMTGNPPRGLQITLGTEKEPVKVDTIVMANLGYFQLKANPGAWVLRLRQGRSADLFDIVSHDGSDTPPNSTDIKVVISSFRSHVLKLRVQKKPDKMNIDLLSEDDDANNPGIWNSITSTFGSNPKQGEEEPEEKLNIFSVASGHLYERFLRIMMLSVLKQTKTPVKFWFLKNYLSPTFKDFLPHMAREFGFEYELVQYKWPRWLHQQTEKQRIIWGYKILFLDVLFPLDVKKFIFVDADQVVRADLKELHDLDLGGAPYGYTPFCESRKEMDGFRFWKQGYWRSHLQGRRYHISALYVVDLKRFRRIAAGDRLRGQYQALSQDPNSLSNLDQDLPNNMIHQVSIKSLPQEWLWCETWCDDASKQNAKTIDLCNNPLTKEAKLTAAMRILPEWKGYDEQIKKLQQKVESEALDAHSEFHHSQPSKLSNNGHLEKHTEL

SEQ ID NO: 4017 - protein, 1673 aa, Schistosoma mansoni
MITFWAFLVLCSTSLDTYLSDNRVSVTLVPKWKNTPLLSEASEYVARESNSAFWRFLDLISKDLDFIRTNLIPPVDDYLLLSKNRLLEKRVKELAIQAISATSLNNSSLEIRNRLFTLSVSSRMFSPTVEMSHQLALTDASYLLNCSRETVLAELKRRTSGVAWVLAGSDAVFSIDKLKESIEKVVDPNSQPTLFPLEKVYSSPKDTSNNIPTVILYGDLSHHEFYSWHRSLKALSDDGLCNYAFRHYFQNRDLSGTSLNGYGVELALKSTEYKAMDDTKSEESDNVSLKETDKIVDVPIVAGFNFTQLRNIHPELTKELNEFHSHLLTTDDELRPLKAWQFRDLSLQACQIVMDGFLSNMKHEGFIGSYINLGLWSLRDISQNLPARASRLVNVNVNSSLRTESSKNQHVLTGTYGIQPGQSLLLLNGILLSPSVDIFALLDVIRQESKMMTQLHDLGIPGSNISQLIIEYGSSSGSVTNKNDPNLPGSRHSISNQFVLDLSNAPISYMNNLETDPAYAYWPSSLHTLFNFDFSGGLRRIRKNLYNVILIIDPVSFESREMLKLTESFLLHMTPVRFGIIWAVNPKLNSTSLILTRIFSYISSTIMNSHESPFPVQINGLGSPGPMAALSFLTEIYANAEKSNSELSIDLIKRKFEKLFPTADSDDIFTPESGNSDYDKEVTSHHEFLIRSGLQSIKKIPLILFNGIILDNDGIKKIGGFEDTVVTLSMEELMHVQSAVFQGQLSNSQAIFDLYQKTATIVPRFNVRLLNKKKDNSNQGSLNSPKYINFNGYSIPMGIFTMWIVIGDLDQIFDSNLPEEHRLQLQMDCNLALNALTFLRSAHSTKGLRIGFVYNPLKIIKEEKKSTDHWLTRVLYLVGNPINITLPLSNQLNNEIIAKRKYAEQMSGRNFAIRLIKEILESIKTSKPMKSLEELLVSGMDSKQIHDAIQLFDRNSFMQMHSTIACQIIGLKPGERAVVVNGKIVGPFEPFEEFLSDDFRLAERLALDNGAKELGDKLEKILGTTAGAPDIISELTWQLSSVLQSDGISDKSQNGHRILLHGVSYNHSGFIIHGNKNEPNFELVAIIDPASRDAQRLSHILIVLQHSLPCTVKVLFNPSPSLSELPVKSFYRFVWEPSLFPENESILNPSVIVPRAYFTHLPGQSLLTLGMDEPHGWMVAAIKAVQDLDNLRLVDYHSTQHLVEAVFELEYLLLEGHCMEEGSMKPPRGLQFTLGPTPTTTEYDTIVMANLGYFQLKANPGAWHLNIRAGKSQKLYEISGQEHTDTSVNSKEIITLISNFRSKIIEVSVNKRAEFASESMLDDSSEESNNCLKHSIASHLPWHKCASNQETINIFSVASGHLYERLLRIMMLTVIRHTNSPVKFWFLKNYLSPTFKDFIPYMATEYGFEYEFVQYKWPRWLHAQTEKQRIIWGYKILFLDVLFPLNVTKIIFVDADQIVRADLKELADLDLDGAPYGYTPFCDSRKEMDGFRFWKQGYWANHLAGRPYHISALYVVDLTRFRRLAAGDRLRGQYHGLSQDPNSLSNLDQDLPNNMIHQVPIKSLPQEWLWCETWCSDESLAKAKTIDLCNNPRTKEPKLTAAMRIAPEWVDYDREIKKLWKRVYVSPESSSSSSSAASASEFSTVSTTAEPTHLKESPVEGSKIDDDTVKTEL

SEQ ID NO: 4018 - protein, 1526 aa, Lingula anatina
MAGLVLLVILVLHACSEVDAKSKFVSVSLDAKWESTPLMLETSEFLAKESNAMFWAFVDTVAEANTADMQDKEPKEVYEMILSIAEKLIPSKLQLGLLKFSLSLRSYSPAVEMHNQVAKDNNPPRDCDTFVDVQGKVTCDSKEMKRLINSATQRAMPELYPFDHHFLTTKKSGPVVILYTELGTSSFNLFHGELKKLAKRGMVDYVLRHFVKEPSEEKVRLAGYGVELAIKSTEYKAKDDTKMQAGEDEEDDLEDDEGKDVQGIVFSSLRMKHPDLKEKLKEFKKHLMMSSNELSPLKVWQLQDLSFQTAEKVLSSADEDMLETLQDLSQNFPSRAMSLAKVSVKDDMRKEVKQNQKYFEQYLNILPGESALFFNGLQYDLDISDVFTLLDTLRADAKIMEGLYSMGIKGESLSSLLKLDLKETGTSYAVDIRNGPIQYINDLEKDRRYQQWPSSVQDMLRPTFPGMLRHVAKNFFTMVFMVDPSQPDARDLLKMAESFYVHNAPIRLGLLFVVNNEKEVDGEQDAGVALYRAFNFVKTANTVSAALSFLTDVFDKVQAGDLTADQVVAEFRSQYQDEDVNMVFSSDSDYDDGRISSAEYFSRIGLTSLPQVLLNGVPLKKETLNQDSFEEGVVMEIMKQTPDFQKAVYKGELTDRDNVLDWIMEKENVLPRLNDQILDTKDKRYLQFGHDAGLIDVNKAGTYTDMTDKELTASLAASMVYMKRQEEADKHPITMWVVADLSSPAGRAHLYSAVRHLKHSHTLRVGIVHNPRSLSTKLYEGSQIPLAIHTALGTQVPHIARSFVTKLLKEDNIHAILEGTKSLSDLEVHGMVMEVYLKALDVQTVAFLQFHSAFCTHVLGFEPGARGVIVNGRIIGPLKDQETFIEDDYNLLEKYTLKSSAEKIVQMLTGFTEDTKRVSDMVMQVGSLLMSNQQASIASRTDVQFAGDQHSVLKIPAKPEEPAYDVTFIVDPVSREAQKVTPLLRALLKVANLKIQIFMNCREKLSEMPLKNYYRYVIGSELEFSSRESLGAVATFHGLPQKSLLTLNMNPPEGWLVEAVRTQYDLDNIMLDEVDKGINAEFELEYLLLEGHCHDQNSGQPPRGLQFVLGTRSQQAVVDTIVMANLGYFQLKAKPGAWMLQLRHGRSEEIYKIASHERTDSPPDSPNITVVMNSFLSKIIKVKVSKKPGRESDDLLGGEEDKRGGLWDSLSSSLSGPSEEGNRETKVNIFSVASGHLYERFLRIMMLSVVKNTKSKIKFWFLKNYLSPTFKEFIPYYAREYGFEYELVQYKWPRWLHQQTEKQRIIWGYKILFLDVLFPLDVEKIIFVDADQVVRADIQELYDLDLGGAPYGYTPFCDSRKEMDGFRFWKSGYWASHLAGRKYHISALYVVDLKRFRKIAAGDRLRGQYQGLSQDPNSLSNLDQDLPNNMIHQVNIKSLPQEWLWCETWCSDDEKSKAKTIDLCNNPQTKEPKLNAAKRIVAEWEEYDNEARRIFENFTSNKPTLGSLSAGHIEAQETSTQPRDEL

SEQ ID NO: 4019 - protein, 1788 aa, Trypanosoma cruzi
MSTARFVFKIPCVCVCVYVCVRSFFHYSTQLQLYSRRATLVMTIPLIIPAPIFMFVLFSLSRRRAHLLPHNFSFCLFVCVCVCVSLLFFFLLVYCFFFIPVFYLLFSSSHTFPMDMGPQDCSRSMNQLHHRPRNLACRTDWRRSRGRFAATLTLLLLWSVSWIVLETSTAEGKGVHVTLLAPWTETPLLQEGCEMLAARGAPFVGFYQCLQEVWKCVKAMKSSGGAAKLTQKSQYDILLDMLEKANWPPAQVKLAKMKLAARLYSPAVEAHWQLARKAKQLTGGCSIEGNPFVLTAGKVICREDLLEETLSSPAPVNETEDSHEDEAFSLFAELDRIHPNSKGSRVVILYGIVGEEQTMQLLQVVERHLHTVRLAFRHLPISGRMWEHPLHVQGYAVTVDLKNVEYKVIDEKDKNDAGTDAKDTNPIEETENMGSVGGFNLALLTQRYPQLKPKLTAFAAHLADMIDRDEVKVDFQMWETQYMGIAAAQYVMDAENEKRLNVLMNLLTKFPLHASKLSKIGTTVKAKMDKKMHEELMEFASVVHSGTSPVFLNGRRLAAEKLNLFSLLEKLDEEEQLLEDVQRVFTSYRLPSVNDDGFLSVKTDALHQAMKSVRESVHGYIASNGLEDRESMPRIWMPQRSILWLNNIQRDVNYIYMPAALESILHVNFNGVPIIPRKNLVHAVCVVDPTTVAGLQNIFTMLKLEESKQPVRLGIVFADKNWSPELSVFTKGNHFMTDTSISVVTAIIAATVWELLKGEEHPQDVLEFLSEVVQSRSTRGTLEENDIKMISTNSLTLAGKRTVDNILADVSFMEYYQDTQMKLREMRLDAAPVMLLNGKIFQGNMLHALRQNFMEELHYVRGLVQSDALTERDDSDFYESILRLSGARERYNEAFYSKKVYADWTSKPVLDFLLHRPFLLPTVRSKKTPLVSSVLTIQSPMGEAALNALVKTIRNILQCEDETQKCVNVRFTYVVCDVAKESKRRTMAGDLERLILRRKEGDGGKEQVQWVYDFLQKITAQNNTRKLMDPDLYEGLVAEVNFSPEVKELLDASDEGLDAQLQLQRGIVNGFCAQLKADALSTSSSSSANGAAAAAAAAAGGEKGKEEGAVYYYVNGRRFVYDDNFLEDDFRAAEEMEMILAEAVSEALSKVDFKTIGSELEPSDLDSRFFASKVAALSELLRRDAARGSPMQEKNQLPSTTGLTSFVVNPANGDTVPRHTLTVVIDPVAQQSQFLISLCDYVTRSPLGVSCTVHMGAAEHASKLMRNFYQFVSEMELRFDAVGGVVPPAAVFHRLPSKHLLTLGIEEPESWTVFSLDAKYDLDNILLDKLPSSSEYLHAVYRINSILLTGSARDAEQPNPSRGLPLLIRSTKTNPDAGVTRDTLVMTIMGYFQLQSTPGVWYLTVQPGDIATIFYISQVDGIPVNDGANKNHHGKFNYTAGQNIPVVVSSFTGTFLMLGVSKTPGHEEVSIEDVNEASASHVDWPQKGPLKSKPDRPTLNIFSVASGHLYERFLRMMIHSVMRTSFDVHGANTTRIKFWLIENFLSPQFKTLVPLLAKHYGFDVGFVTYRWPWWLHKQTEKQRTIWAYKVLFLDVLFPLDVDRVIFVDADQTVLADLHELYNMDIGNAPTAYTPFCRKNPNPATKNFRFWDHGYWLEHLHGKPYHISAIYLVDLRRLRAIAGGDKYRLVYSRLSSDPNSLANLDQDLPNFIQDQVPIYSLPEEWLWCETWCGAESKARAKTIDLCNNPLTKMPKLDNARLIIPGWEETDTELEALSEKLLQQQKQQMS

SEQ ID NO: 4020 - protein, 1578 aa, Candida boidinii
MKHLGILQFYLLFQAIGLAVCLIAGNATDHSIDLSLVGTWKKVPFYLNVIETFSNESPDLFGSLVAKLLGLSVSTESEEDEYDEDTTIESNKISYYSVQNEENVQLDEKSFYEYAVELFESQSDQNKFKRSLLDIKLANKFYTPRIESHYQYYQNEVVPEFESKLKSDNLKSSWLYDGSKYFYTNPENTFALKTVNSALEDSKILLPFDRVIGKSGNIFILYGHFEDPKFKQFFTNLYQLALNGDLRIVWRYAPDFVHESDASEYETLGGYGIDLTLKRTDYIVVDDRGFTKEQQEKLVFDSPAEEIQNIGNTNSVEDITLELLNEYSKNIHLVEKENLSELGVKLVKIILDLKEKGRSPDELLLILKSLILEFPKHSYKISKFYNEKKSKSGSESESESESESESESGSESESGSESESESGSESDLLELKKNLSDSKLHQLPNGFYFNGAPISENNLNLYEILKVLERELNYINSLKENLGIKSTDKLKQLMLNFSQYINQLESKNLTKKRYNIDSFKNSVIYFNNIETDRMYSGLRTPKIAYKTKPTFGQVPQARSNIHDLVFAIHFSSQAQLYYLLQTFTVIMSYKIPQRVGVIPLIDNEIDERITKYFLSTVSSKGPIEGIKFLIAMYEEVYASQLDQVEIFNYLKTLEIPDEFDLDKFYKPTKDLIENLSITEPSIISNGVFIKFTDNWQKSLSEQLDFDCNLLFEATKGNKIKKGESYRSHLMKGSLKRKVPVLIPDDFSKSYEMYKQINDIPKLLSIFKNYSVIFDKSSNSDEPDDHEFNNRASTLTAIGSFYDKNFISQIITALNHLKTENSNDISRLRILDTSDNAEILKELKDVKNIEIAVHFFENISSKFTTSGGSVKQSLASELSELFEIDLSSITLSSTFIFISGRFIDTTGLKIKEEDFENLMEFEIVTRLGIINTELIGLIKSGELVILNSNDDLIQVSEIVSMILTSSYFYDDGRLLIDESIKRLNFGVLKPNEIAHLILPASSNENDSLIDIDLIIDPTTEFAQKLISMVSLFENMSFIKLRIHFVLDVSEKAPFSTIKRLYKGVYSSKVEFNENNHYSDSLLKALFINVPETALFTLDVDVPQSWIVTIKEAETDLDNIKLDISGSISGIYELENILIEGHAREGSSNATPRGLSIEISNKKGYSDTNVMANLGYFQLKANPGLWDLQIREGTKSFEIYSLVEIYDKFILFPSEMNFAKEKKSVKLAVLDLSGREVYPIFLKKKGRENEVLVDLDPTQGQINRSSNFWKSWSAKLSSLIKPKNLRKHADINIFTVASGRLYERFLGIMMASVMKHTEHTVKFWLIENYMSPLLKKDLPKLSEYYGFEYEFITYKWPSWLRGQREKQRTIWGYKILFLDVLFPQDLDKVIFVDSDQIVRTDMKELVDLDLHGAPYGYTPMCDSRKEMEGFRFWKQGYWAKLLGDDMKYHISALYVIDLQKFRSIGAGDRLRQHYHALSADPNSLSNLDQDLPNDLQDRIKIYSLPQEWLWCETWCDDDSLKKAKTIDLCNNPLTKEPKLDRARRQIPEWVQYDTEIANLLSDKPVDGTTDDSTLDEHDEL

SEQ ID NO: 4021 - protein, 1452 aa, Scleropages formosus
SVRSYYNLIIKKAAQFVSDLQVSLLKFALSLRSYSPTVHAFQQIASNEPPPEGCSAFVVIHGHHACSTKDVKKLLKTALDRPRPYLYKSDHKYPGANSTDVPVAILYAEIGTKKFNTLHKVLSEKADEGKLTYVLRHFVKETKPEKLRLSGYAVELAIKSTEYKAVDDTRVKDAKPTVTAEEDDDDEVQGFLFGKLKKSYPELQDHLTDLQKHLLESSNDMAPLKVWEMQDLSFQAASRIMSASKFDSLKLMRDVSQNFPIKARSLTRVVVNHEMRKEIEGNQKVLSETLGIHPGEAGLFINGLHIDLDIHTPFSILDTIRGEGKILEGLHNLGIKGEEQAKFLRLPETRRTLQSNAAALQQCLELFTAVSGGLQYRSLWLLSPHIQWVNDIEMDHMYRSWPSSSQELLRTTFPGVIRQIRRNFFNLVLFLDPCHEDSGELVKLAELFYSHTIPLRIGFVFVVNMDDRVDGTIDAGVGFVRVLNYVTEEYDFAQAFASMIYKKVEEGQVLSAGDVASYLKKKFPKASVAKILGPDSIYDDKRKAGRAFYRKTGLGSLPVALFNGVPLSSEEMDPEELETVLLQRIMDSTSFFQRAVFMGQLTDDMDVVEFLMEQANVVPRINPLVLSPLRRYLDFTSSPVVDDWKDPNTFSYLDSRDQSAVIATRVKYISKSDEDTIYGVTIWVVADFDSAPGRRLLQAALKHMKSSPNVRVGVISNAGAKLTEDNTVITRAIWASLHTQRSKETFSFLQKILKEENTKQLDQGAKMRDFLVQGMNSDTFEKKYNTIGVEFLHSQRLFCQNVLKLTSGQQAVVINGRILGPFEEEFELEDFHLLEKITLSASAEKIKGMVKSMGLMAKHVLHLSPRPDEVFYDVVAVVDPLTREAQKMSSLLIVLSQVINMKLQVFMNCRAKLSEMPLKSFYRFVLESDVMFLANDTVSPGPLARFTEMPESPLLTLNMITPESWMVEAVRSSYDLDNIHLQEVSSVVMAEYELEYLLLEGHCFDQSTGQPPRGLQFTLGMTRDPLMQDTIVMANLGYFQLKANPGAWILKLRKGRSEEIYQILAHDGTDSPADADAGDVIVVLNSFHSKIIKVRVQKKPDKTDEELLSDGKETKGLWESMRSITGQPTSEEAEKKEDVLNIFSVASGHLYERFLRIMMLSVLRHTKTPVKFWFLKNYLSPSFKESIPHLAEAYGFQYELVQYKWPRWLHQQTEKQRIIWGYKILFLDVLFPLAVDKIIFVDADQIVRADLKDLRDLDLQGAPYGYTPFCDSRKEMEGYRFWKSGYWASHLGNRKYHISALYVVDLKKFRKIAAGDRLRGQYQALSQDPNSLSNLDQDLPNNMIHQVAIKSLPQEWLWCETWCDDASKAAAKTIDLCNNPKTKEPKLAAAVRIVPEWAEYDHKIKELLKKNSGKPQSRTEAPQGRGGQDNLGNAPCRIALGLIGFGWINGID

SEQ ID NO: 4022 - protein, 1539 aa, Quercus suber
MRASTRSWLGAGLLNLIIHVDAVPGVDVALRTSFGAPPYLVELLETAAEENATAYFPLLDRIADGYFDASTTDYELYTAFRGLLQEEGHISRAEDLSSFDFALAIRSTAPRIESHYQYYNTSAPLSKDEECDTWLYVPFNGQKFCSPDLNEANAHAVEKVSSAKLRLLPFDRVLGDASSEWPSVLYSDITSTSFRAFYKTLSKTADVGKTSLIVRYKPSKDGITRPFTVSGYGVELALKRTDYIVIDDRQAEQEAREIPVSEETTLSEDEMSDLRPLSSSELRGLGMKAASFVQSSDSPFDTLYRLLQDFPKHSAVVAGVNISDDIVQEHLANREVLLPSGNNMLWINGVQVMPRDVDAYSLLEFLRKERRTIRGIRELGLSAPEAVDLLAHEAITTSQTGQEAQRYDWRDDNEGGNVILWLNDIEKDKRYAEWPASVTALLQRTYPGQLPAVRRDLHNLLMPIDLADAADVELLVDGIQNYVKRLVPIRFGLVPTAPSAASADQAKIVYYLVDRYGLGAVLSYLELSVVGAGRKYGAPQEKYFTKVIEERQLRKNRAILSFEEILTGVDGASRLSSSADYLHRLGHKPTSPSIFINGVPIAKTDEWLQAMSQRIGQDIRVLQEAVYRGTVTDNDYLPDLFLMKASLRRNALISPEEDNQIRHLDLGILSEIADLPSLPFSEDTIERELIHVTIIDDFDTLKGFSHLMEALIFKRQHDNVELAVLHARSDAIELRRKIQDYETMQSTEVMQTLLYKYDSSANMVLEAAGVTAPDELSVVHRQSIIQTIFDSFPENNAESSNTWPAFSEVINSAGPKAVLINGRVVGPIPLGAELVLDDFESLLSYERRKRLLPAALVIEGMKLTAMAATPSAFARVSNLIALSRVNDIPEGIFETPSTARTSKFKSWTAEYTAIKLGDAGSANIQIFASIDPASETAQRWLPIISTFSKLDGVYVCLFLNPKERLDELPIKRFYRHVLKPKPTFTSDGALEALSAKFSGLPADALLNMGMDLPPSWQVAPSDSVHDLDNIKLSAPKSGHDIEAVYELEHILIEGHSRDASSGPPPRGAQLVLGTQLDPHFAATIVMANLGYFQFKANPGIYNLGLKSGRSEEIFKIDSAGSKDNTQTDDGTSEIALMSFRGVTLYPRLSRKPGMEEEDVLEASKSGLESLAEGADRLLAQAGIHNVEASKLINQAAKFGSSLFSSSVAKLVTTSHHADINIFSVASGHLYERMLNIMMLSVMKHTKHTVKFWFIEQFLSPSFKDFLPAMAEEYGFRYEMVAYKWPHWLRGQKEKQREIWGYKILFLDVLFPLDLDKVIFVDADQIVRTDMYELVEHDLKGAPYGFTPMCDSRTEMEGFRFWKQGYWKNFLRGLPYHISALYVVDLKKFRQIAAGDRLRQQYHQLSADPASLSNLDQDLPNHMQMALPIHSLPQEWLWCETWCSDEALKNAKTIDLCNNPQTKEPKLDRARRQVPEWTVYDDEIAAVANRHKLNSSSGKPIAGDAGDAGLQGQEEESIQEKLQREDAEKEKKKKQVRDEL

SEQ ID NO: 4023 - protein, 645 aa, Eumeta japonica
MHSLTPRIQAHFQIASEALSLGNCADSSIFAQVGNELACTLDELRQKIKLEKAIGGDVKYITRHYLPDKQKSQKRVRLSGYGVELHLKSTEYKSQDDALKPVEDSNEERIEDVDADMEVKVSILSSGSKEFAIDIRDTAILWVNDIENDPQYRRWPSSVMDLLRPTFPDEDSDFDYGRQLALEFVDRLGFADSPQALLNGVPMPQNILASDSDFEEAIFAEIIQQTTALQKAVYKGDLTDSNDLLDYLMNQTHVMPRLNQQILGNNENAKFIDLSGEPHKDINNVQALAKLSNRDMTATLLYNIKYFEGKNSFETIGATKLHFLTIWVLGNVETDEGKELLKNALMYVKAGSSVRIAFIPNTEGANLSKKNNLNRLVWAAQQILNPQQATDLVLKWLKQSSDKWEYQNNQNFYRYVIESEIQFSPNGEFAEGPIAKFTGVPANSLLTQNVQVPENCEFELEYLLLEGHCFDAATGAPPRGLQMTLGTQNDPTMVDTIVMANLGYFQLKANPGVWTLRLREGKSSDIYDITYAGDLILCIKKHADLLGDEDNNHNGGIWNSIASSFGGGSSNDEKAETINIFSLASGHLYERALRIMMLLLPYMAEEYGFQYELVQYKWPRWLHQQTEKQRTIWGYKILFLDVLFP

SEQ ID NO: 4024 - protein, 1600 aa, Xanthophyllomyces dendrorhous
MRLSLALLMTCTVVVAAQKHVNLQLETVWQDHPFLFSILEQTSLNSPEAYLPILTHLSQRPDFPILAANSTALYHAAHALLPNYLHPSQIPAWDLGLAAGESAPAVEALLSVHQMLVDPEMNDCGAWVEWNGKRGCGPDGAVEVLGLGKGKEGINWDESINSTIRSYPFDHLLCLNIDSTLPPLTLYFAPSSTLFPPLLHLLQSFPELPLLVRYRMDPPLVSDLEGSSQATFVPVKKQKGVPVQGWGVEMVLKKMEYSSVDDRQDNVFNEEQIKEKRIIPEEDPILTEALGNDPWRENATPLNEVELTQLPFATASLILSHPSPLVALELLSQSFPLFTNALSRLPFDPKEPDNRALIKEGSFNRKQWEQLGGAGVGWQGSRREVEGRVWIDGKEIQAGKEGIFDLLPVVRRSISHSLALTELGLTPSQASSLLTLPQREPPIFDGLVDASDRMEMEAEGLVLEDQDLGEKTEKSGGVEGVVLWWNNLETDSRYKKWRSDLKMLLRQQPGQVPQLKRNLLNVIVSVDLSTTFGMEVLIGPVNQFINRGLGIRFGMVEVLDGEAGVATRMARLTRHLVKTYGRASTMQFLSHVVQSSPTPDISLTLVEKIYARFIQYVEPLGFEGDRQNAPRLLSFVEVISEAHEKRERATYKWIERLDLKGPDGGRLTFVNGKAVERTETQAWIRALQVELSKDLVFLTERIEAGHLADTVGIPVEVANYFYDLPQTSNRRTGAIFEGKGADESRLKVANMNDVLRKVNENSDIGQRWIYPDGSSKTPLSIWIAGDLDSEQGLGLVWEALVAMQSTPFRLSFLHKPKRLLERSSRTLLSTLLFETMHDPILGSATPSTLLEIIDKAEIAPVHESSTQPSGEDEAAKVYWEGGRHALGPRGLDVADGEVILVVNGRIIKSDANRIFDSHDYEVLLRHELHVRAEPIVDALEEFYDNTSVFDRTTYSNLVAFTSSTVSQAVAEDVVPGMFGVASASTRSQAYELFRSDKTSFEIGHKATALLRIVAIMDPATEFAQKWSTTLRVLSEMNFVYVKVILLPSGVLNETPLKRFYRLNLQSKVTFEDDEQTRSRVSFQNLPQEPIFTLGVETPPSWLVTPKESVHDLDNLKLIDLTSDVEPVFELRTLVVEGHARETKTGSPPRGLQIELTDSNGQPMADTSVMANLGYFQLKANPGVLSLRIREGRGREIYELASVGTSGWQSPPTNETGPEVPIYSFSTGLTIYPQMSRKMGKELDDVLEIIDVKPSFLNSLKSRISSLFGSKTDEIAPIKKNADINIFTVASGLLYERFAYIMAISVMRHTNSTVKFWFIENFLSPSFLEFIPHLAKEYGFEYELVTYKWPSWLTGQKEKQRLIWGYKILFLDVLFPMDLNKVIFVDADQIVRTDLKELVDEDLHGAPYAYAPMGDDREEVEGFRFWKTGYWKEALRGRPYHISALYAVDLDRFRQIAAGDRLRGQYQGLSQDPNSLANLDQDLPNSMQDQLRIHTLDKSWLWCATWCSAESLKDAKTIDLCQDPQTKEPKLARARRIPEWEVYDSEVASLAARLSKESVIRSGPVEIDKLDRDGKKSEMVEEYEQSDHAHQGEADQKRDEL

SEQ ID NO: 4025 - protein, 1974 aa, Cafeteria roenbergensis
MFDVLQQASEFIADEDAMRGDESGSLFWGFVDGVHSLLDAGAKVDTAEDAAALAVTAASRVMQPLSVRVMRVSVAARAHAAAVEMHREQAVASAGRCPDSPDAWAVVLPQNRVACSAAELRRLIGAHATSGSSPDPPLTRLASQDHVLRSADASAAAATAAAASAAAGPATVVYGLLGTRGLQDLHEVAASAARRGATTYALRHWVPAGGAGNTRLSGWSAGLDVKNTEYRATDDRAGGPSEPSGREAAALRSVSPADAHGTPLADVVLEAAPLGALWGSDGKATLASDGTPGAGSAPGPTPDGPAGAGSSAGVLAALLEAHKGWRAADPSLPDASTMHVRDVNATGIGVKTTAYLLQASGRFDEGVAFAAQRDAAVSQASAKRHQDAVERKRARMQRLAKRTGKSMPDHVQLSRNELVLLAREPLPGIEPAAVAQARFDKRWASNQTAPEALSPAADPLALLSHLTGNFPAAAAALSTAPVDPALLSALRSSAYSVPHGQNIVLVNGRQIDATASSFNFFSVLRTLQDEASVLSQFASLPIAEQEVLALRALAAGTKGAEADGDDGAASADPVSEAEGGSPTLRVDYRSGADDCVVWLSDVEKDAQFRRMRASVRALLTQTWQLHQVRRNLYTAVLLGDASSPGGLRAILTALYFVQNALPIKFGFVPVASPADAPTEDLEAAAARFRTGAASKPDAPGGARAELAADDPVNSLDVALLALAAERNLGRAASSAFLANLAQAWQESVQARAAKLRAQAKSQQELQQLLQGMDINVAVSAEQAIDAFVEASASASGGTSLFGNGKHLNAARAALADATGEGRAHVLRIRKWAASHGLPSPGFLVNGRPGSGLAVQEEVVPQIQADLRTLQNLVRLGHLDDDSKSDALAVLLSSAGAVPVYHRAALDTSTSPFVPLASAAAAPLLWGVRYFHAPGTADVAKTVTVTLLDDLNSRMGVESALAALQAAAVPSTGAAARVGVVHSGPSPASSPGTVAAVLTAAAWAIGDDDAAGTVKVNDRLPAFTAVVSAAKQALAAGGPSPAQATVSALLSAGKGEASSLSSVISGRAFKRIASVVKAASSPSGKVARKAAKAAAEARGAARSAASVAGAVEESGAPSTGSALVGAWSRAEAARGVAAAVVPRVPAPAGAPAGAVPKPGPDGTVRAILTNGRVVALRREETVSPEVVSAAVGAEDRARGTRVQSTLSAASILSVLPDEDDAAAKPSSAHLSGPWAVKADDATAEFTSALIAAASSAVGAYGAGGVRHRLPHEALDTPLTSFLTFPAPVLAGTAEPSGVEVEALLDPVSEAAQRAAPLLQLLRDAMGARVRVYLHPSTSMRGTGEDSDRKLPLSSFYRFAGPGMGPGAADSASFDGLPPFLLTAKVYPPEPWVVQTDASAMDTDNIQLARGERLSVRYGLRSLLVAGQCDELGASAPPNGLQLQLGPAPGLPATAAAGAPAVLPSSPEFLRPMADTLVMQNLGYFQLKAQPGVRALALAPGRATQLYDIVIPEGAGRDGRLPGEARSGVLRNVGQHQQRLIGEEADDDEPEMESVASLEVTVRDFVGDVTQLRVRRRPGFESAKLLVEEEEEAAEVALQASQETSRGFWGSVRSFFGGKASAGSTAVAGKDDRIHVFSLASGHLYERFLKIMMLSVTKRSSRPVTFWLVENFLSPQFKETVPALAESAGFEVKMVTYKWPNWLRGQTEKQRIIWGYKVLFLDVLFPLDLDKVIYVDADQVVRADLAELWDLDLEGAPYGYTPFCTSREETLGFQFWRQGYWKDHLRGKPYHISALYVVDLKRFRRQAVGDKLRAVYDQLSRDPNSLSNLDQDLPNYAQGMVPIKSLPQEWLWCESWCSDSTKGAAKTIDLCNNPLHKEPKLDMARRVISGELFNESWVELDAEAARSEGRAPPAAPAAAPAATAEPQPAATPASDSAETGASPGKAKKGKRPGKASKKPRKGGKRKASKAAAKDEL

SEQ ID NO: 4026 - protein, 1775 aa, Monosiga brevicollis
MPNWAHLILRHVAFLCRFEPIGVPPDVCMCANKNVWHISRHAWHQRLVKLQQDGRILYILRHYRRDHEQDGPIRLSGWGVELAVKKTEYIATDDSAVEEDVTEALADEAVEDEDQVAGFDFAQLRALHPDQQEHLARLQRQLLETPIEIHPLKAWELQDIDLQAAQRVLEAADPVQTLQAITSNFPTIQHVLAQNKPNETIKQEIAMNQQSLQYVGLSAGTTLMTLNDVILDTTTVDIFYLLKILAQHSDTMSELQEAGIPAKHVPEFQGISLQTNPPAEVLNLKSSAVQYLNNLEKDSAYSRWPSTLTALLQPLSPGTKYRVSRNIFTILLTGRVLDPVFAAQLLEAHGQLVKKQEMVRVGILAATTVGQRQLRQRTVEFTSTGHAKTGKETDVLALAQSEEERLEVLLVRAYSVVQKRKKSTRRALDWLCSFYQRYPDVTEKAIQEHALTVITSTDWQTTVLNYAKDVDTIRSRMDAHFEASGLPLRQVTVLFNGRPVSLEDNKNSVKQIFTQNSRQQFGMLQRQIYYRQISDAGSVYDAIMKLNKATKRMTAPELMKHTNVVLCGRPQNITSAAELQGATSGQVLSWLDQSLKYYVKPESSATVKLSSTRVRVAFLNSASGEQADVHHLINAIGRHFASDVALMKIGHVLAHSINHPDANLDDLIKVLKSKDQAAVRTLVRTERDNALKARLHEVAVKQALQLENGALALVTNGRVYGPFGPDVSFSGSDLAFLENFHNNEGQAKQVANRVGRLLPGLRQRDRETIVRNLLALLTNSAEKAGTSGRPQQRLDRRHLSNVAQKYSAVTVAPRDSTDNALVHRCFVVLDPLSAQAQRVAPLLAMLHANVNVEITLLMNPVLKVSEVPLKRYYRMVLPSVEFDAQGRLTPGPRAVFRQLPRAPLLTLGMETSASLMVEAEQSAHDLDNIHLQSADGDVYALFRLRYLTVEGGSLAADTRAPTAGVQLQLGTPLAGALYDTLVMANLGYFQLKSQPGAYELQLLPGKSTDIFTIEEAGGSDSHSQDQRPLVLVRDFTGTHVSLRLKRRPGQEKARLLDDMPSAHSAGDGAADKAEETDPGASSGGGLWDSLSSLMGTGEKGSATAVGAHSGRVERAGETINIFSLASGHLYERFLKIMMLSVLKNTRNPVKFWFLESCMSPQMKAFLPHMAAEYGFEFQLVSYNWPRWLNKPAEKMRLIWAYKILFLDVLFPMDVKKIIFVDADQVVRADMRELVELDLKGAPYGYTPFCDSYQGLSQDPNSLSNLDQDLPNNMVHNVPIRSLPQEWLWCESWCDDRSKGRAKTIDLCNNPKTKEPKLQAAVRIIPEWTALDQEARNLTNRVVNAGPAPGSGHKILLISLSLSLSLSLSLSLSLSLSLYCVTIQAGCHPESFAGLKHDDHSLVFEPSDCDDRPEPASVESSAATSQDNSASASDGTWEPDTLTETELSLAHHNPRASHQTRPHPGHSSVQKLAHVALAFAPTKDCVTQFNALLVHGITTRAALCHALNFHVTRHAGYRALCGASDTQGVESVLQDLLSLAIRLRHTALVKYLLEQHACLRVKNPQPGKRSPMMLACATGHLPVVEALIQHQKFILRDFRAMDMEALVTAVAHNRRAVVTALLKRYNFNLRDARARNNVLLKVCARNGWQQMLELLLEKFAYTAADVQRDDYEAPCLAYEHGHTTVFWFLVDRFGLAKPELLEARHFSVLRWAVDRQDGAMLGALGRKLGSAQATACLRRMWRATGASLRPATTEVATEPAMAVPKERLRARPRPAA

SEQ ID NO: 4027 - protein, 1619 aa, Zostera marina
MSRVLVFFLLFFVGISISAAGESISRTKNVQTALRARWPGTPILLEAGELLSGEWKDFYWDFIDVWLQDDDSGCSTARSCVEKIVKYGQSLLSEKLGSIFEFSLMLRSASPRLVLYRQLAENSLSSLSSVKGSNGTLSVPEGSCCWVDTGSKLLFSELDFFLWVDSLSESSEVDILSKLELFDFDHLYPGSSIKSHTTILYGALGTKCFRDFHRFLTEAAKKGKIKYVVRPVLSFGCGGINNYCGSVGSLDALNFGGYGVELALKNMEYKAIDDSVVKKGVTLEDPHTEDLTQDVRGFIFSKLLDRKAELSSEIMSFRDHLLSSTVSDTLEVWELKDVGHQTVQRIVHASDPLQAMLEINQNFPSIVSLLSRTKLNDSIKDEIVANQQMVPNGRSLMAINGALLNIEDIDLYMLMDLVHEELSLADQFLMLKIPHSTVLKLLSTPPLSESHVIRVDFRSCPVHYLNNLEEDSMYKRWRSNMNELLMPVFPGQLRYIKKNIYHAVYVLDPGTHCGAKAIDVILSLYENNIPMRFGILLYSSKIIKIIEANGGELPVSSTDEVLNEKMDDISTLLIRLFMYIKESNGAQLAFQFLSNVNSLSNISEDLPDELIEVHHVEQAFVETMTSKTKSLPQDILLKLEKDSKFMVATEQSSLSVFKLGLSSLKCCLLMNGLVHEASEDASMSAMNDELPRLQEKLYYGQIHSHTDILEHFLSENSFKRYNPQIIVEGKDKKKFISLSTLVVGKESLLGDISYLYSPGTADELKPLTHLLVINATSMTGMRLLHEGIHYLMEGTKKGRVGVLFNLNNDVLSPAIFFARIFNITASSFSHKAKVLEFLDQLCSSYQTTFLSMSSLDEENFMLFTEKVFELADDYGLPSEYYKETLSKLSADIIKSHLDKVSHFLYGQLGLDCGANAVVTNGRIILPRDNIFSKEDFVLLEMIEYEHRIKNIMEIIDKVEWVGIDPDDLTSKYISDAVLLVSSSLSIRERSSERARFEILNSKYSAVVLNNENATIHIDAVIDPLSPSGQKISPLLHILWKRIRPSMRIVLNPMSSLVDLPLKNYYRYVTPTMDDFSTTDYSVNGPKALFLNMPLSKTLTMNLDVPESWLVDPVVAIHDLDNILLENLGDERTLKAVFELEALVLTGHCSEKDHDHPSGLQLILKTKNSPHLIDTLVMSNLGYWQMKVSPGVWYLQLAPGRSADLYELNEIDDEGIKHPLSKRIVINDLRGKPIQLEVSKRKGMEHEELLVASAHDNQQTDKNKDSPSSWNKNLFKWASDFIGGNVKSRRKETNTTVVNKVVREGKTINIFSIASGHLYERFLKIMMLSVLKNTQRPVKFWFIKNYLSPQFKDVIPHIAQEYGFEYELITYKWPTWLHKQKEKQRIIWAYKILFLDVIFPLSLEKVIFVDADQVVRTDMGELYDMDIKGRPLAYTPFCDNNKEMDGYRFWRQGFWRDHLRGRPYHISALYVVDLVKFRQTAAGDNLRVVYETLSKDPNSLSNLDQDLPNYSQHQVPIFSLPQEWLWCESWCGNATKFKAKTIDLCNNPMTKEPKLQGARRIISEWEDLDQEARHVTTKMSSEGQETEDAIKQPVTFQVEDRSFTKKNTVSTDVDVDHSEL

SEQ ID NO: 4028 - protein, 784 aa, Tropilaelaps mercedesae
MKQTPKIQRAIYKGELADDDAVIDYLMSQLTTLVQSTLCSMGQMESRQFLTKVLRNWDKLKSGEMAATDLLPRGANLQLLSDAEISNTVALHKAFVGSLNIKPGSRGIIADGRLLGPLQEGEEFTAEDFNLLERLSMAVYGEKVAELLGSSSSDLLMKASSVLQRFAQVKMRHELKFATDQHGVIKVASKNANEAAHDITVIVDPASRGAQKVSQILLLLQQVVNANIRVFFNCNHGHKELPLKTYYRFVASNEPQFGGNGELSAPRAAFIGLPTKPILTLAMATPENWLIGAVRSVYDLDNIRMADVESRVVAEFELEHLLVEGHCFEQSSGSPPRGLEFTLGSPANPVMYDTIVMANLGYFQLKANPGTWFLRIREGRSTELYEIASTENTEKSGEDVAVLVTNFRSKVLKVRVAKRPGKESEELLVDDDSQNDGLWNSITNSLSGSKTRESADRENDSEDNVINIFSVATGHLYERLLRIMMMSVLKNTNTKVKFWFLKNYLSPSMKDILPYYARRYGFEYQLVEYKWPRWLNQQTEKQRIIWGYKILFLDVLFPLSVKKIIFVDADQIVRADIKELRDLDLGGAPYGYTPFCDSREDMEGFRFWKRGYWSQHLGHRKYHISALYVVDLKKFRRIAAGDRLRGQYQGLSQDPNSLSNLDQDLPNNMIHQVAIKSLPQEWLWCETWCSDESKPHAKTIDLCNNPKTKEPKLTAAARIVPEWTSYDEELKKMIEDFQKEKEGGFIDDASQEDKIPPPKTGPQQQRVDMHGQPSVIDSQHRTEL

SEQ ID NO: 4029 - protein, 1491 aa, Tolypocladium ophioglossoides
  MOD_RES (1441)..(1441): Any amino acid
MIRLSNLPWGMALALTAALQATAASSVNVGMKAAFSAGPYLLELLETAAGENSTAYFPLLDRIATGHFASASSDAALYNTFLDVLREDGHISNPEALSTFNLALSLRSAAPRIEAHYQYYSTAVEPALADFDCQDWVLFEGKQYCTPALDIVVKDGLFASEVSTLPFDRTLGAGREAVLYTDPTSDTFGEYHKVISKAARALALKYRVRYRRRNAKTTQALPVSGYGVELALKRTDYIVIDDREATQDSAQKPLASGAILNGEDEEVADLRPLSTSELASLGMKTASFIQGSDNPFETLVKLTQDFARFSASIAAHNVSKDFVTEYGQNKVQMGRGGINLLWMNGIQLIERQIEPFALVEMLRRERRLISGVRDLGLSGKHAVSLLGHSAISAAKGDVGPVRYDWTDRLEDGRVIIWLNDLEEDSRYEKYPKTLTSLLQRAYPGQMPPIGRNIFNLLVPADLSNAEDLAFVSQVVSIMNRGIPIRFGLVPLTSTAESTAQAKLLYYLAEKHGPEALIAYVQGLSEKTQTVADEKLFTNVIAARELPSDSQDMSFQEVLEAEFYKEQTKLARRWVERLKADTLIRPLFINGIVIPRDKNWMKTMSMRIDEDLQVIQKGIFHGILDEETWIPGTFLEGAAARRNVYIALDDDKALRMLDVGKIYNDHADLFRQIPLLESYSDSTKENWAVMTVLADMTTDDGLQLVLSALEFQRNNPGVHLEFVHNPEDSTAASQVNAAFKADMETLGSIETKDKLSKIAEAAKDFLDDEDYAAALTSLLTMANINSGTKMVILNGRVVGPIPGNASFTADDFQQFFEFEQNRRILPVYAAMGDLGLGDKLSSAIAAAKATSITALSTISDLPEGIFESAPAIRSTLYDSWNSSHTAIEIGDPETASIHIAGLLDPVSERGQRWAPILKVLSELDGVYVKLILNPLEKIEELPVKRFFRYVIESKPSFDESGQIRELKAAFKGLPSEALLTAGMDVPPAWLVAPKESTHDLDNIKLSSTKSDVDATYELEHILIEGHSREGQGAPRGAQLVLATEKDPLLTDTIVMSNLGFFQFKANPGFYNIQLKEGRTADIYAIESIGAQGWEAVPGDEGTGLALMNFQGTTLYPRLKRRSGMEKEDVLEKADGSSGDSLVTKGLKFAGLFGGSKTKSVSAQEHAEINIFSVASGHLYERMLNIMMVSVMRNTKHSVKFWFIEQFLSPSFKEFIPHMAEEYGFKYEMVTYKWPHWLRQQKEKQREIWGYKILFLDVLFPLSLDKVIFVDADQVVRTDMMDLANLDLEGAPYGFTPMCDSRTEMEGFRFWKQGYWAGYLRGLPYHISALYVVDLRRFRELAAGDRLRQHYHSLSADPASLSNLDQDLPNHMQFQIPIHSLPQEWLWCETWCSDESLASARTIDLCNNPQTKEPKLDRARRQVPEWTAYDDEIAALDRKRRQXQQNTGGDTESAGSPAGGEQKAMEEAKQREVNTKSRRWDEGGGNVHTMDEL

SEQ ID NO: 4030 - protein, 1535 aa, Hortaea werneckii
MILTNQRLVLAAGLSCLISHAHAVPPVDVALRASFGAPPYLVELLETAAEENATSYFPLLDRIADGHFDSATTDQELYTRFRSLLREDGHLSQSEELSSFDLALSLHAAAPRIEAQYQYYNTSPDMTEASAQKVDSVTGRVHELPFDRVLGDLDNVKPSVLYADITSDSFKKFHKTISKTAREGKTSYRVRYVPPKVATPVPLTVSGYGVELALKRTDYIVIDDRQAEEEQKDGTVPATEATLTEEEVADLRPLSSSELLRLGLKAASFVLSSDTPFDTLLRLSQDFPKHSGSIAATNVSKDFLQEHRENRETLLPPGFNVLWINGVQIMGRDVDAYSLLKHLRRERKMIGGVRELGLSGPEAIDLLSHEAITASSADQEVQRYDWRDENEGGNVIMWLNDIEKDKRYAEWPGTVNALLVRTYPGQLPSCRRNIHHVVLPVDFSDYKDVAVVVEQVQNFVRRKIPIKFGLIPLFHTQEGEQQAKLVYYLLDRYGLTVALDYLGKSIIGSGRKFGAPQEKFFEAAIADRTLRSNKEQLPFNDVVTSDEFGARLKGAESYMSRLGAGSTKPPILLNGAPIEHTDDWLQVMSQRVSIDLRIVQQAIFEETMGEDDYLPEIFLAKAVLRRNPIIVPEDDKDIRHLDLGELPFASLHSLSADPDAIERELVHLTVAADFNQPEGFEQLMEALIFKQQHDNVELAVLPTGGSGKVTARLGLDQDGQVSTDKLASLLAVYDMLSSNAKASGADGAESEASKQDTQLNLAARRSVYRQMLNAANEDTTAGGGQRAASLSSAYKTIAAAAGLEANQEALILNGRLVGPFSSNASVEMEDLEALLEYERKKRLLPTALAIDDLQIRDKASSPLAFARISNLIALSQVSDIPEGFFEAAPTLRTDVFKKFNSSHTAIKTGDMSSASVQIVSAIDPASELAQRWVPIIKALSELDGVATILFLNPKDRLEELPVKRFYRYVLDSKPTFSTDGSLESSIARFSGLPAEALLNIGMDLPPSWLVAPKESIHDLDNIKLSAVKPGSDIEAVYELQHVLIEGHSRDTTLGIPPRGTQLVLGTDADSHFADTIVMANLGYFQFKANPGVYRLALQKGRSEEIFQIDSAGTNGYKPRPGDNFTEMALMSFRGATLYPRLSRKPGMEEEDVLEAAKSTLDHFADGADQLLAQVGINGLKASKYMSKAAKLGSSLFAGSDSKQSAGTVEPHADINIFSVASGHLYERMLNIMMVSVMKHTQHTVKFWFIEQFLSPSFKDFLPVLAKEYGFKYEMVTYKWPHWLRGQKEKQREIWGYKILYLDVLFPLDLDKVIFVDADQIVRTDMYELVQHDLQGAPYGFTPMCDSRTEMEGFRFWKQGYWKNFLRGLPYHISALYVVDLKRFRQIAAGDRLRQQYHQLSADPASLSNLDQDLPNHMQMALPIHSLPQDWLWCETWCSDEALKNAKTIDLCNNPQTKEPKLDRARQQVPEWTLYDDEIAALAKKHKDSEAAGKPVAGDAADAGVQGQEEESVQERLQREDAEKERKKQVHGKDEL

SEQ ID NO: 4031 - protein, 1453 aa, Marmota marmota
FMAEESNEKFWQFLETVQELAIYKKTESDFSYYNLILKKAGQFLDNLHINLLKFAFSIRAYSPTIQMFQQIAADESPPDGCNAFVVIHEKHTCKVNEIKKLLKKVTSRPRPYLFKGDHKFPTNNENLPVIILYAEIGTKAFVEFHKVLTQKAQNGKILYVLRHYIQKPSSRKMYLSGYGVELAIKSTEYKALDDTQIKTMTSTIEDETEANEVQGFLFGKLNHAPGSWCERPQLSALVGAIPKCCFFFLTDLSFQAASQIMSTPVYDTIKLMKDISQNFPIKARSLTRIAVNQRMKEEIQENQKDLQDRFEIQPGDARLFINGLHVDMDVYDPFSILDMLKLEGKVMNGLRNLGINGENLSKFLKLNSHVWESAYILDIRHSSIVWINDLENDGLYVTWPTSCQELLKPVFPGTIPSIRRNFHNLVLFIDPAQEYTSDFIKVAELFYYNKIPLRIGFVFVLNTDDKVDGTNDAGVALWRAFNYIAGERGLSEAFASIVHMYQKAKDQNILTVDNVKSILQNEFPQANIWDILGIHSIYDNERKAGASFYKMTGLGPLPQALYNGESFNHEEMNIEELEMAVLHRMMDASEYLQRDVFMGTLNDQMNAVDFLMDKNNVVPRINSLILHTNPQYLNLISSSVTTAIEDFSTYFFLDSQDKSAVIAENMHYLTQEDDDVISAVTLWIIADFDTPSGRKLLFNALKHMKTSVHSRLGVVYNPTSKINEENTVISRGILVAFLTLQNSFLRSILKKLAKEETATALYSGIKIKTFLTEGIDKNAFEKKYNTIGVNIFRTHQLFCQDVLKLRPGEISIVSNGKFLGPLNEDFYVEDFYLLERITFSNFVEKITEFVENMEIGSKNMSDLIMKADALVSSLPKQASRYDVTFLRENHSIIKINPQENDMVFDVIAIVDPLTREAQKMAQLLTVLGKIINMKIKLLMNCRDKLSEAPIQSFYRFVLEPELMSGANGSPLGPVAKFLDIPESPLLTLNMITPESWLVETVHSNCDLDNIHLKDIEGAVTAEYELEYLLLEGHCFDATTEQPPRGLQFTLGTKNKPVVVDTIVMANLGYFQLKANPGAWMLKLRQGKSEDIYQIVGHRGTDSQPDIGDVIVVLNSFKSKILEVQVQKKPDKIKEDILIDNHEKKGMWDSIKSFTRRLHKDNKKEKDVLNIFSVASGHLYERFLRIMMLSVLRNTKTPVKFWFLKNYLSPTFKEIIPHMAMEYGFQYELVQYKWPHWLHQQTEKQRIIWGYKILFLDVLFPLAVDKIIFVDADQIVRHDLKELRDFDLGGAPYGYTPFCDSRTDMDGYRFWKTGYWASHLMRRKYHISALYVVDLKKFRRIAAGDRLRGQYQALSQDPNSLSNLDQDLPNNMIYQVAIKSLPQDWLWCETWCDDESKQRAKTIDLCNNPKTKEPKLKAAARIVPEWIEYDTEIRQLLDNLENKKKSAILAHDEL

SEQ ID NO: 4032 - protein, 1458 aa, Penicillium digitatum
MRVSGRSHISWRWCAAVGVLLPSWIVNASPAVNVALQASFDSAPYLVELLESAAEENSSSYFPLLDRIADGTFEDLTTEKELYDRFLTVLKDDGHIRTPESLSSFQLSLSIRSSAPRIEAHFQFYNTSVEQSLMVAQDAQDIVGEIDPRELPFDRVLGDLSLPPAILYADVASPMFRDFHETLSDMAKQGQISYRVRYRPPQHWISRPLFVSGYGVELALKRTDYIVIDDRDAEQLEEKGAKSLPTDPDETKEDAPSDLRPLSSSEVTRLGLNSAGYVMDSADPFATLIKMSQNFPKYSSIVAAHNYTGEMAQEIRHNRLNMLPGGYNAMWINGVQMGTQQIDAFSLLEHLRRERKLIEKFRGLGLSADDVVKLLSHRLLTEAQTGGEEQRYDYRDNLEGNQVILWMNNLEKDSRYESWPSDLEAYVTGSYVGQLPPVSRDLHNVIVSMDASNPQHMMLIAGNLNTFIKRGIPVRFGFVPASSSAESIAQLKVAHYLFDAYGIESLLQYFEEHASKGKAGFPDKSCFQSATKERDLLDEYEALSLDQVLKSEKYDALVSQTAAYQRRLNLTSDAPQFLVNGIPVSREGNWMQGMSMQIGRDLKLVQQGILQGIFEEDAWLPKYFLAGAFERRNTFLMPEDPKSVQIVDIASILPSDKDVLSKIPHVLSDKGALESAHVIVVGDFESEAGMKLLTEALNLRKKNSDVEILMLHNAASDVEDNVPKNLVTLYLSLAKGDTIDQVLAKIVSGDLEPEAQEISPLQALHQNLAKELGFNPGTEGLVVNGRAVSPIGEEHPLSVEDMSQLIAYERVKRLDSVAAAVGELGLADKISNPLDFAKLTSLVALSTVPDVPEGIFENTPDFRIDVPGKWRAEHSVITVSNSDDPTIHVTVSLDPASEVAQRWLPILKVLSELSSVHLKIFLNPKDELTELPVKRFYRYVLESEPSFTDKGALARPQASFTGVPVDALLTLGMDVPSSWLVAPSESVYDLDNIKLSSVKSGTDVDAIYALEHILIEGHSHDLTTKSPPRGVQLILGTENNHHFADTIIMANLGYFQFKAQPGLWQINLKPGRSEKIFRIDSVGGLGYRPQAGDENNEVALLSFHGRTLFPRLSRKPGQEGEDVLETGVHPGSKMDYFSKGLNFASGVLSSVGVGSKSGGEQHADINIFSVASGHLYERMLNIMMVSVMRHTKHTVKFWFIEQFLSPSFRAFLPSLAREYGFSYEMVTYKWPHWLRAQKEKQREIWGYKMLFLDVLFPLSLEKVIFVDADQIVRTDMHELVTHDLQGAPYGFTPMGDSRTEMEGFRFWKQGYWSTFLRGKPYHISALYVVDLNRFRALAAGDRLRGQYQMLSSDPNSLSNLDQDLPNHMQHHIPIHSLPKEWLWCETWCSDEDLDVAKTIDLCNNPLTKEPKLDRARRQVPEWTVYDDEIAALASRIASEQAAAGVEFVQTGEDRKDEL

SEQ ID NO: 4033 - protein, 841 aa, Trypanosoma cruzi
MGEAALEALVKTIRNLLQCEDETQKCVNVRFTYVVCDVAKESKRRTMAGDLERLIVRRKGGDDGKQQVQWVYDFLQKIAAQNNTRQLMDPDLYEGLVAEVNFSPEVKKLLDASDEGLDAQLQVQRGIVNGFCAQLEADSLSTSSLSANGAAAGREKGNKEGAVYYYVNGRRFVYDDSFLEEDFRTAEEMEMLLAGAVSEALSKVEFTTMSSELEPSDLESHFYASKVAALSEVLRRDAARGSPMQEENHLPSTSGLTSFVVKPANGDTVPRHTLTVVIDPVAQQSQFLISLCDYVTRSPLGISCTVHMGATEHASKLMRNFYQFVSEMELRFDAVGRVVPPAAVFHRLPSKHLLTLGIEEPESWTVFSLDAKYDLDNILLDKLPSSSQYLHAVYRINSILLTGSARDAEQPNPSRGLPLLIRSTKTNPEAGVTRDTLVMAIMGYFQLQSSPGVWYLTVQPGDIAKIFYISQVDDIPVNDGANKNHHGRFNYTAGQNIPVVVSSFTGKFLMLGVSKTPGHEEVSIEDVNEASALHVDWPPKGPIKSKPDRPTLNIFSVASGHLYERFLRMMIHSVMRTSFDVHGANTTRIKFWLIENFLSPQFKTLVPLLAKHYGFDVGFVTYRWPWWLHKQTEKQRTIWAYKVLFLDVLFPLDVDRVIFVDADQTVLADLHELYNMDIGNAPTAYTPFCRKHPNPATKNFRFWDHGYWLEHLHGKPYHISAIYLVDLRRLRAIAGGDKYRLVYSRLSSDPNSLANLDQDLPNFIQDQVPIYSLPEEWLWCETWCGAESKARAKTIDLCNNPLTKMPKLDNARLIIPGWEETDTELEALSEKLLQQQKQQMS

SEQ ID NO: 4034 - protein, 1501 aa, Talaromyces atroroseus
MFGSRMRQFSSLGLVSGLLLLLQPPRCVAASPSVNVALQASFDAGPYLVELLETAAQENSSAYFPLLDRIAEGVFDDATTEKELYTTFLKLLADDNHIKDEESLDTFKFALAIRSAAPRIEAHYQYYNTSVQSTLVTAAQDAACPVWVHMDGKQYCSSTLERAQQDVSGDSDPRELPFDRTLGDPLATPAVLYADIASPMFAQYHETLRGLAEEGQLAYRVRYRPSQDDSPRPLFVSGYGVELTLKRTDYIVIDDRQAEEREDKANAKAKAPSAADLDDDEEESPPDLKPLSSSEVAALGMNAASFVLDSADPFATLLKLSQDFPKYSSAVASYNVTEAFTNEYNKNRQAGLPGARNIMWINGQHVDSRQIDAYSLLEHLRQERQIVAEFKKVGLSSSDAVNLLSYPALAEAQMTSEVQRYDWRDEIEGGGIVIWLNDLEKDKRYANFPTSLQSILQPTFPGQLPPVRRNMQTVIAPVDLTKVEDVNFVATYLQTFIKRMIPVRFGVVLIANTEESKAQAKIAHHLHQTYGLTSLFQYLETTLSSEKVSHPDGASFATAVAERDTRPGQESLPFEEVLQSEALDDIVSRTAKYLRRLDLDGPSPPTLANGMIMSRGRNFLQELPMQIGKDLNILQQALIQGALSEDDYVPDYFLSQAAQSRNEWIVPEHGSSGIRIADILSIAEAHNDFADVLRLPSDPKHPSSNVQLFVVADFNTEHGLALLISALKFRQLHLETEVIPLHNPDTDGYAGGGISSKLYQLLRQTEPVKLVDVLLSQIGLAADKTQAMSEEEQAYWTQAQKLIVDLGFSRGTSSILFNGRVVGPFPPSAAFGEAEFEQLFTYESSQRLRPLAEALKDLGVDSKVAGPLSFAKLTSLVESSINSDAPEGGIDSRSKYRLDVLKKWNSTHSAFDAATNTDDASINIVAAVDPTSELSQKWVPILKTLSELAGVNVRIFLTPNKQMKELPIKRFYRQVLEAKPSFDEDGSLARPGASFRGLPQDALLTLGMDVAPSWLVAPKESVHDLDNIKLSALKEGSDVDAIYELEHILIEGHSTDTTLRTPPRGAQLLLETEKGSFFADTIIMANLGYFQFKAQPGFWKIELKEGRSRDIFQLDSLGGSLQPGDASNEVALLSFQGKTLYPRLSRRPGQENEEVLEETAHGAGSAMDYVSKGLSFAQGVLSSVGVKSAASSESAEKHAEINIFSVASGHLYERMLNIMMLSVMKNTEHTVKFWFIEQFLSPSFKSLLPHLAAEYGFSYEMVTYKWPHWLRGQREKQREIWGYKILFLDVLFPLSLDKVIFVDADQIVRTDMYDLVSLDLEGAPYGFTPMCDSRTEMEGFRFWKQGYWKSYLRDTFSYHISALYVVDLKRFRELAAGDRLRGQYHTLSADPESLANLDQDLPNVMQTLIPIKSLPQDWLWCETWCSDEALETAKTIDLCNNPLTKEPKLERARRQVPEWTVYDDEIARVAAAAATATSDNVGDDNEKVEYSVGKEERKDEL

SEQ ID NO: 4035 - protein, 1601 aa, Lactuca sativa
MKTRIRSGFQILIIIAVCIIVCGYSVSAETQRPKNVQVALRAKWPGTSLLLEAGELLSKEWKDLFWEFIEAWLNNESGNTDPFTAKDCLQKISNYGQSLVTGPLASVFDLSLTLRSSSPRLVLYQQLAEESLSSFPLSDDINPSPGGKCCWVDTGGALFFDVPELLLWLRDPHKNGDGFQQPELFDFDHVYFDSSKGSPIAILYGALGTNCFKDFHRTLVEAAKEGKVKYVLRPVLPSGCESKSGYCGAIGTKDPLNLGGYGVELALKNMEYKAMDDSEIKKGVTLEDPHTEDLSQEVRGFIFSKILERKPELTSEIMAFRDSLLSSAVSDTLNVWELKDLGHQTVQKIVRASDPLQSMQEINQNFPSVVSYLSRMKLNDSIKEEILANQRMIPPGKSLMALNGALIDIDDIDLFMLLDMAHQELSLADQYTKLKIPSSTVRKLLATLPPPDSNTIRVDFRSDHVHYLNNLEVDARYKQWRSSLNELLMPVFPGQLRYIRKNLYHAVYVLDPASICGLETIDTIVTLFENSLPVRFGVILYSGKLIEKLEENGGELPSSDSSIKEDLSSLTIRLFLYIKESHGIEKAFQFLSNIHKLRMESGEEDAPLLHHVEGAFVETLLPKAKTPPQDTLLKLENEQSFHEESQESSLHVFKLGLAKLECSLLLNGLVLDSNEEALMNAMTDELPRIQEQVYYGRINSRTDILDKYLSENGIHRYNLQIVGGKAKPKFVSLTPSILGDESLLNNIEYLHSVGTMDDLKPITHLLAVDVTSRKGIKLLHEGIRYLLADSPRGRVGFLFNSDIDSDSNSLIFMKVLEVTASSYSHKKKVLNFLDQLCSYYESSQESQEFLDKISELADANGIQSKGFKSAISEFSVDKFTRHLKKVGRFLNGQLGLEKGDNAVITNGRVVRLTDDATFLSQDLHLLEALEYKQRTKHIADIIEEVTWENVDPDTLMSKFMSDIIMSITSSLSTRDRSSEGARFEMLSAEHSAVVIGSENSSIHIDAVLDPLSSSGQKMASLLRILWKCSQPSMRLVFNPMSSLVDLPLKNYYRFVTPTMDDFSSTDLTVHGPKAFFANMPLSKTLTMNLDVPESWLIEPVIAIHDLDNILLENLGDTRTLQAVFELEALILTGHCSEKDHDPPRGLQMILGTKKNPHLVDTLVMANLGYWQMKVSPGVWYLQLAPGRSSDLYLLQDGQEMRSTKRIIIDQLRGKPFHLGVVKKKGKEHEQLLIPSDDDESSRKQDDKDSWNSNILKWASSLIGGNVQTKKGVKTEVENVSNGRKGKTINIFSIASGHLYERFLKIMILSVLKNTQRPVKFWFIKNYLSPQFKDVIPHMAQEYGFEYELITYKWPSWLHKQQEKQRIIWAYKILFLDVIFPLSLEKVIFVDADQIVRADMGELYDMNLKGRPLAYTPFCDNNRDMDGYRFWRQGFWKEHLRGRPYHISALYVVDLIKFRETAAGDNLRVFYETLSKDPNSLSNLDQASDLPNYAQHTVPIFSLPQEWLWCESWCGNSTKARAKTIDLCNNPMTKEPKLQGARRIVAEWPDLDLEARHFTSKILGEAVSPVEKVVSPPAQPHVPEEAGPPPTEEEDEESRAEL

SEQ ID NO: 4036 - protein, 1505 aa, Cytospora leucostoma
MLRLSQLPWGLVASLLVATVFEPQPVCAGPSVEISMKAAFPSPPYLIELLRSSETAAQENASSYFPLLDRIADGYFAEVTTDKDLYESFLSLLQEDGHITSPESLATFKLALSTRSAAPRIEAHYQYYQTGVEPTLRGDQEGCDAWVVWQGQQHCLPSLDPGQARGQVSERQERDLPFDVSLGDGPSCILYADITSPRFGPFHMILSEKARNRECTYKLRHRRLSYESLEPLPVSGYGVELQLKRTDYIVIDDRKAEEDTAQKEIGSTEVVLDGEGDVADLKPLSKAELAPLGLKAASFILQNEKPFDTLLKLTQDFPRYSTSLATQNVSEDFFLEHKSNRAQLVPAGANVLWANGVQVVERQMDAFTLVNLLRRERKLIKGVTDLGLTGEEAIALLAHKAVAAAKTTDEAQRFIWHDEPEDGKVIIYLNDIEKDQQYEGFQTNLRAILQGGGPGSLPQIRRDLFNLVFPVDFTKEGDILLVVKQLQEFVKRKLPVRFGLVPLALAEASERQAKIVYHLVETYGVETTLAYLQAGLDAKIHEDADKGLFDSTIADHKLPEDATALSFEEVLASEHHAEQVRLSKHWAERLRVNGAPVVFVNGLPLPREGSWLQPMSQQLGVDLQALRQAYFYGEVDEKEWIPGYFLEDAATRRNTIIFPSNPKALTVLDVHKLHLEHADLFNIIPVLESFPETTKENWAALTVVVDLNDPEGLKLTASALQFRNNNPGVRLDIIHNPVETTEAYKINSALKASQSDLPAADSEDLVKVIIDTTEGLPDDDQYDSALRYFQASAGIRPGQNLLILNGRVIGPIQTADEFDVEDYQLFLDVEQRLRILPVYDAIDDLGLADKVSGPLAAAKVTSITALSTLPDLPEGMFETGSPLRISAFNVLNSTHTAFEVGDKSTATIQLVAIINPASEQGQRWVPILKVLSELEGVYLKVWLNPKDRLDELPVKRFYRYVLDSAPTFDQSGKVSALGAEFRGVPSEALLNVGMDVPPAWLVASKQSVHDLDNLKLSSIKSNVEAVFELENILIEGHSREPTGSLPRGAQLVLSTEKDPKVADTIIMFNLGYFQFKANPGFYNIQLKEGRSSDIYHIESVGAKGYKPVPGDEGTEVALMDFMGTTLYPRINRKPGMETEDVLDIGKEGGALDLVKQGFKFGKDLFGVKTKSASDEEHAEINIFSVASGHLYERMLNIMMLSVMKNTNHTVKFWFIEQFLSPAFKDFLPSMAEEYGFKYEMVTYKWPHWLRQQKEKQRQIWGYKILFLDVLFPLSLDKVIFVDADQIVRTDMYDLVQHDLEGAPYGFTPMCDSRVEMEGFRFWKQGYWATYLRGLPYHISALYVVDLRRFREIAAGDRLRQTYHTLSADPNSLSNLDQDLPNHMQFHIPIHSLPQEWLWCETWCSDEAFTEARTIDLCNNPQTKEPKLDRARRQVPEWTKYDDEIADLDRRRKGKSSAALGDDEQKVIRGDGQELKEAEEGVERNTKSRAFEGEDPSATAHVKDEL

SEQ ID NO: 4037 - protein, 1544 aa, Stomoxys calcitrans
MGCEKILKLTVVLFLGLISGKLQQVTSSKSYPITTLINAKWEQTPVHLEIAEYLADENPNLYWDYVKDASELDTPLSSYDTQSQSYNAALKLVRKGLTDIQIPLMKLVVSMHSLTPRIQTHFQIASEVVNKSSCMDSTTFAQIGSELVCSFDELRQKLASSKQGKALDATIETYAFDHIFPGSENNTRTVVLYGDFGTSSFAQYHYLLSAKALSGTVRYVTRHYLSPKTRDERKRVRLSGYGVELHLKSTEYKSQDDAPKPAEGSTEADLSAGADMEIQGFDFSVLKERFPTMVHSLDKLRQSLLQGNDEIAQLKAWEFQDLGLQAAQAIAEIDGEEALKILQYTAHNFPMQARALLGHKVSDQLRSEVKHNTEVFGRNLNIVPPDGALFVNGLFFDADSMDLNSLIETLRTEVRVLESLHKSQVRGGLASALLALDFSGSGSKEFAIDIRDSAITWINDIEQDVQYRRWPSSVMDLLRPTFPGMLRNIRKNVFNLVLIVDPLQPTSRSLIKLAESFVLHLAPVRLGLVFDARQASDDNQIDYLSISCAFNYVMQKKDARSALSFLTDIFADVDAKQAVTRKHIKSQLKKSFDRLSSSAVDDILDEDSDFDYGRQLALEFVERLGFSDSPQALLNGVPMQSNILLSDSDFEETIFSEIIQQTTTLQKAVYRGDLTDSEEILDYLMNQPHVMPRLNQRILGNNENAKFLDLTGSPHNDLSNVNALALLSNRDMTATLLKNIKYFEGKHSFETIGDQKLHFLTLWIFADLEKESGKELLKNALQYVRAGASVRIAFIPNVEGSDVGRKDNLNRLVWAAQQTLGPKEATELVQKWLKQTSDKWDIPEAVSEIISSTELHMKILRVYAQRVLNLKAAERLVIGNGKIIGPILDTELFGIEDFGLIDRFNAIQYADKLRKALNQNSHELEPNFNSDTLLKLYTSLLSRQTKTRFKLPDDVKDAHSVVKLPSNRNDLPSFDISAIVDPASRSAQKLAPILILLRQTINCNMKIFLTPVGQHSDMPVKNFYRYVVEPEVQFTPSGELAEGPFAKFTGVPANSLLTQNLQVPENWLVEVVRSVYDLDNIKLSDINGPVHSEFELEYLLLEGHCFDSTTGAPPRGLQVTLGTLEDPVLVDTIVMANLGYFQLKANPGVWTLRLREGKSADIYDITYAEGPNTVHKNGNTQVVISSLKSHVIKMRVTKKPGMANADLLEDGSGQQQSGIWNSIASSFGGGSTTDDEDKDTINIFSVASGHLYERLLRIMMVSAMKHTKSPVKFWFLKNYLSPQFTDFLPHMAKEYGFQYELVQYKWPRWLHQQTEKQRTIWGYKILFLDVLFPLSVRKIIFVDADAIVRADLKDLYDMDLGGAPYAYTPFCDSRKEMEGFRFWKQGYWKSHLMGRRYHISALYVVDLRRFRRIAAGDRLRGQYQALSQDPNSLSNLDQDLPNNMIHQVAIKSLPDEWLWCQTWCSDSAFKNAKVIDLCNNPMTKEAKLTAAQRIVPEWKDYDSEVKSLMARIEDHENFEQHDDTGGGNINENPTSKEFVKHSEL

SEQ ID NO: 4038 - protein, 1649 aa, Plasmopara halstedii
MWLSAGLAAFLAAMQPSSSSARSVHVNLTASWPSSPSFPLIETSEFLAEENPLYFWQYLEELGNRTHYVEFMGSDVDALGDLALTVAEIIAPGLQNVLELMLATRTYSVKVEMFRQLGLDSGIRPCGEHADTWAVFYHEPHCVKAVACSVDELDAVIHGKKQPMSDQCVAAGINDVELQVDHKYPYVAINPEKTSMTAILYGLVGTSKFHVFHSRLVIEAKENKFQYIVRHYPHDSHLKTLLQGYGVALDIKNMEYKTIDDSKTSNNGDFVAGDVNDEDDDDEEIDDEEIDGFLFKPLIARHSAISKALKQFYDKLVNKFHDEQDQELKAWHLKNLGTSAVRAIMDAKNPLKRLESLSQDFPVQAKKLAFSRKTISAELREEIAATRVQSMTRRLMNKFIVNGIAIDPTERSFNVFDFMKTLKKEWSVAKQLDGLPLNQTELEGMLTHARETNLEKSVKRIHVRGPLSGSTPLYLNNIETDSISSNWPSDINMLRRPSWSLIFVRKNMYECVLVMDPLTGAGRAALSHISLMRLRGAPVQWALLVSSKELMSQTSDERQASVEQYKTYKGTDKATAWHFAKLLMLAQSKDRAETESNDVQIKNVISDEDERTETEEDQIVSTQVASGFISRVGEDASPNVLVERLVEVYAEAAGVLGTVEDGEEEALACLQSNQFDDEVLEMTEYIHLKHLPLDSFVFNGVIHKDLDIQKSMMANFGRDQPLYVNMAHQGKLDGEMDLIEELLSAQDAYPAYLSIFETSEDEPGDIGAESPHHLFADDVDGRLETLARSSLTYLHAPSSRAVPKKQTVIFPVDLNDPQNADYAYRVVKAVLEDSNRSLRVGLVAQLNGNAKSEGANELVAGIIAIMGDTDKEACLRFVLEALNCIVKQKSIDTMRGKLKLLWAKTPREENEKDPVFGKVAALLSRKQGDWLTTKRRRRLTEFSTLLRSRFPPTYEGDGSSKIALPHLFLNGKQVNLPPQLLSDEDVATILNFDLKYRTQPVAKALIERSAMLKIKEADRLSFSIMRTTGIVDKYVKTDRTSRINLPEDSLNTIRLSGDRSLQVAAYVDPLSEAAQIMSSMLRMLHSQLNATIELVLIPADEYTKFPLQRFYRYLFDKKPTLSATSVEFRKLPVHPILTMKIDTPEAWNVQTFQAGDDLDNLRVDPDTSTAVRSTTRAVFQLESLLVYGQCRDTTFNMYAPPNGLQLVLEREVGAQLLHRDTLVMQNLGYFQLQATPGVWSLHLARGRAAEIFDIIDPYTNLPLETHPIIVHDFGSHISQLFVRKKTGMENEELLQPVEKALSEDRSSAESDAEPSDKNDGALRSYWDSLLNVMGKHDETLKKVVHDPLNSFSGKSHLVQTKQRTGETIHVFSVASGYLYERFVKIMMSSVLKRTNNPVTFWLLENFLSPDFKKSIPALREQLGMDIRLITYKWPNWLRPQTEKQRIIWGYKILFLDVLFPLGVQKVIYVDADQVVRADLKELWELDLEGKPYGYTPFCDSRNVGFQFWRQGYWKDHLRGKPYHISALYVVDLALFRQMAAGDMLRAIYSQLSADPNSLANLDQDLPNYVQDQIPIFSLPQEWLWCESWCSDDTKATAKTIDLCNNPKHKEPKLEMAKRIIAGELFDESWTELDQEIKDAEANYIAQDAA

SEQ ID NO: 4039 - protein, 1488 aa, Penicillium decumbens
MRVSTSRTSWCWYAAIGALLPSLVANASPAVTVALQASFDSSPYLVELLESAAEENSTAYFPLLDRIANGAFDDAITEEELYHRFLQVVHEDGYLRTAESLSSFKLSLAVRSSAPRIQAHYQFYNTSVQQSLMAAQDAACPVWVHSGGKQYCSSAMERAQQDVEGELDPRELPFDRVLGDLSLPPAILYADVSAPMFKEFHETLSDMAKQGQISYRLRYRPPQHWTSRPLFVSGYGVELALKRTDYIVIDDRDAEQREESLKESTEPGSEKLKEDAPDDLRPLSASEVSRLGMNSAAYVMDSEDPLSTLLKLSQNFPKYSSTVAAHNATKELRNEIRVNRARMIPPGYNVMWINGVQVDERQVDAFSLLDHLRRERRLIEKFRDLGISGQEAVKLLSHPLLAEARSDDIVQRYDFRDQLEGGDVIIWLNNLEKDSRYEAWPSDLKSYFANAYPGQLPPVRRDLHNVVVPVDLSRPEDMLLVVKQIRTFIERSIPVRFGLVPTASSPESAAQLKVAHYLQETYGLSSLMQYLQDSATKLKKGSPENSVFKLAVKEREARAGKEVLSLDDLLKNEHYSTVATHTLDYQRRLSLTGEAPNFMVNGIPIPREGNWMQQMSMAIGRDLKLIQQGIAEGVFEEDAWLPEFFLGPAFERRNAFLIPEDPKSVQIVDLASIFGPDVNLDGFPRIEPKEGVMGGIHVILVGNFESKEGLKLLIDALNFRKENSEVELLLVHNGASDSEEGTLNLNKIQKLITEGEDVDNILASISAEDSESDAESQSPITLATHRRVADKLGFTPGTEGVVVNGRVVGPIDKSFGLSVDELSQLVTYERSKRIDPVARAALSLGLNTKLSKPLYLAKLVSIVSLSMISDVPGVIFESTPDFRLDVSEKWKTKHSVISVSNSEDPTINVATVLDPASEIAQAWLPILKVISELAGVQLKIFLNPKEEIQELPVKRFYRYVLQSEPSFASDGSLSRPGASFSGVPVEALLTLGMDVPRSWLVAPKESVHDLDNIKLSSLKSGTNVDAIYALEHILIEGHSRDVTTETPPRGVQLILGTEDNPHFDDTIIMANLGYFQFKAQPGLWQIHLKPGRSEKLFNIDSVGDLGYRPKAGDESNEVSLLSFQGRTIFPRLSRKPGYETEDVLETGHKAGSTMDYVSKGLNFASGVLSSVGVGTKSSDEQHADINIFSVASGHLYERMLNIMMVSVMRHTKHTVKFWFIEQFLSPSFRAFLPHLAQEYGFSYEMVTYKWPHWLRHQREKQREIWGYKILFLDVLFPLSLDKVIFVDADQIVRTDMYDLVTHDLQGAPYGFTPMGDSRTEMEGFRFWKQGYWSTFLRGRPYHISALYVVDLNRFRALAAGDRLRGQYQMLSSDPNSLSNLDQDLPNHMQHHIPIHSLPQEWLWCETWCSDEDLASAKTIDLCNNPQTKEPKLDRAKRQVPEWTVYDDEIAALAERVASEQVGFVQTGEEAERKIDDKTDVDENRKDEL

SEQ ID NO: 4040 - protein, 1258 aa, Cladophialophora immunda
MRTSNIPWTWALLPLLSWDSFVAPARASPSVNVALQASFSAGPYLVELLETAALENSSSYFPLLDRIADGAFADLQTEQELYTRFLNILQEDGHLSTPESLSSFKFALALHAAAPRVEAHFQYYTTSIQPHLMAAQDAACPVWVYLDGEQYCSPALDRAQQPVSIPDTVNDLPFDRVLGASSDGLPSILYADITHPLFGQFHSVVSQTAREGRSTYKVRYRPSASASHNPIHVTGYGVELVLKRTDYIVIDDRDAQKPEDATPDQQSLETVKDDELKDLRPLTTSEVANLGVNAASFILSSSNPLDTLLQVTSDFPKYSSLLAAANASREFILEHRANREQFLPSGYNVLWINGVQIEPRQINAYSLLDHLRRERRIIAELKNLGLTSSEAISLLSSEIIAEAQANETPQRFDWRDDSEAGGVLMWLNDLEQDRRYAGWSSSLRSLFQRTYPGQLPQVSRDIHNLIVPLDMGNIKDIELAATSLQSLVRRQVPIRIALIPTGDGETANTYSKVAYYISDTYGLTALMSFFSDVVASKKLDASPEKSFNTAIKGRATRPEKEPLSFQDVLTDESLHLRLQARDEYLKRLALAGPNPPFLVNGVVLPRTDNWFELLSARLYSDLQLVQQAVFQEAISEDSWIPEFFLFQAVKRRNEIVFPDDPKDTEIVDVGQVTAKFADSFARLPRLAGTEATLLSDRAHLLIVIDLESETGRALLLEAMLFHQRNAETELLIIHNPSPETQSSTFAPGLYALLQEGGRDLTVERLEELLKGDLNSFTDDLTDASAEFWRSQADLIRTLSLAEGQNGLWLNGRLLGPLEQRFTSVDFESLLEFERRERIAPVTTAITGLALEDRFTGALDLAKITSLVARSLKSDLPEGLRESAPLIRLERFKIWNGTHTSIKISNSDDINIQIVAAIDPASELVQQWVPILQTLSQLSGVSVQIFLNPKDRLTELPVKRFFRQVISAEPSFDAHGSLVIPNASFSGIPRDTLFNLGMIVPPSWLVAPKQSIHDLDNIKLSNVAEGENIDAIYELEHILIEGHARDVTNGPPPRGVQLMLGTEDEPHFTDTIVMANLGYFQFKTNPGYWQISLKPGRSSKIFHIDSVGPHGYSAQPGDETTSVALLSFQGLTLFPRLSRKPGMEDEDVLESSALGGAMDYLSRGASFASSALSSLGFKKTSTNADINIFSVASGHLYERMLNIMMVSVMKHTKHSVKFWFIEQFLSPSFKSTLPVLANHYGFDYEMVTYKWPHWLRGSL

SEQ ID NO: 4041 - protein, 1518 aa, Orycteropus afer
MAVAKPFYVVRILLGSMPLWLSLLRAGTTSASKAVTAHLAAKWPETPLLLEASEFMAEESNEKFWEFLETVRELAIYKQTESDYSYYNLILKKAGQFLDNLHISLLKFALSIRAYSPTIQMFQQIAADEPPPDGCNAFLVIHKEHTCKINDIKKLLKKATSRPRPYLFKGDHKFPTNKEHLPVVILYAEMGTRDFGKFHKVLSEKAYNGEILYILRHYIQKPSSRKMYLSGYGVELAIKSTEYKALDDIQVKDVNNADIEDDTGASEVQGFLFGKLKEKHSDLRDNLTAFQKYLTESNKEMMPLKVWELQDLSFQAASQILSTPVYDAIKLMKDISQNYPIKARSLTRIAVSQQMREEIQENQKDLQDRFDIQPGDTRLYINGLRIDTDAYDPFSILDTLKLEGRLMNGLQNLGINGEDTSKFLKLNSHVWEYTYALDIRHSSIKWINDLENDDVYVTWPKSCRELLKPAFPGNIPSIRRNFHNLVLFIDPSQKYTLDFINLAELFYFHKIPLRIGFVFVLNTDDEVDGTNNAGVALWRAFNYITKERDVSQAFVYIVHMYQKVKDQNILTVDIVKSVLQNKFPQANVTDILGIHSKYDKERKAGASFYKMTGLGPLPQALYNGEPFKHEEMSIKELEMAVIHRMMDTCIYLQKEVFMGTLNDRTNVINFLMDKNTVVPRINSLILHAKPQYLNLIPTSVTADVEDFATFFFLDSQDKSAVIAKNMYYLTQEDDDVISAVTLWIIADFDKPSGRKLLFNALKHMEASVHSRLGVIYNPTSKITEETTAISRGILTAFLTQKNKYLRSFLRKVTKEEIATAIYYGDKIKTFLIEGMDKNAFEKKYNTVGVNVFRTHQLFCQDVLKLGPGEIGIVSNGKFLGPLDETFYAEDFYLLEKITFSSLVEKIKGIVKNMEINSKNMNDLVMKVDALVSSLPKRVSRHDVTFLKEDHSIIKINPQENSMFFDVIAIVDPLTREAQKMAHLLIVLDKIINMKVKLFMNCRGKLSEAPLNSFYRFVLEPELMSGANDIHSLGPVAKFLDIPESPLLTLNMITPEGWLVETVYSNCDLDNIHLKDIEKAVTAEYELEYLLLEGHCFDTMTEQPPRGLQFTLGTKNKPVVVDTIVMANLGYFQLKANPGAWILKLRQGKSEDIYQIVGHEGTDSQRDVGDVIVVLNSFKSKILEMQVQKKADKIEEDILTDKDEKKKGMWDSIKSFTIRLHKEDDKGDADVLNIFSVASGHLYERFLRIMMLSVLRNTKTPVKFWFLKNYLSPTFKEVIPHMAKEYGFQYELVQYRWPRWLHQQTEKQRIIWGYKILFLDVLFPLTVNKIIFVDADQIVRHDLKELRDLDLGGAPYGYTPFCDSRTEMDGYRFWKTGYWASHLLRRKYHISALYVVDLKKFRKIAAGDRLRGQYQALSQDPNSLSNLDQDLPNNMIYQVAIKSLPQDWLWCETWCDDESKQRAKTIDLCNNPKTKEPKLKAAARIVPEWVEYDTEIRQLLEQIENKKNNASKSSSFSVV

SEQ ID NO: 4042 - protein, 1606 aa, Gelatoporia subvermispora
MQLLGLGLALSVFAGRTYGAAVSPPVQVELRSSWPAPPALLESIETIFIEEPDAFFHLLDVLTNPELRPVARSSQEWYRHALDAATAEGYLSEPGAYAAVEMELALHSSSPRLEAYYQFYRDRQSQRNTDPQAECGSWVDWYGQVVCDAETLAHLAGVDTIDPPEGEAANTTVVQPKLLPFDHILPSALQSTDVPARTAILYGLPDSNNFRELHSWLYSAASAPSPSVQYVFRPIPPSGDDTAQRASLSGYGVALDLKKMDYLALDDRRRGSAQEGGDSGDLPELVTSVDSVHTLIQQYPENETYDATIPLSPEELLEIGFQATQLISDAEEPLSVLKQISQNFPKYATLLARRVTVDSELVEELDRNQIKAQGGVSMAWLNGVVVPETDMNPFALLRLLRKERRIMLNLMSLGLSSEQAMRLLTHPTIGAAQGDSGVLDGLYDASDRPEGEGVIGWLNDIEKDVQYERWGTSLRILLRPMYPGSFPAVRQNLFNIIVATDLSHPAATSFIAVTVSNMISRNLPFRFGVVPLVETDDAIRMARLFYHLEENYGAPVTLSFLRSLNSVQARRPSLTTDWSAVRAEFAALVEMAEPLTEAPETTLDVILNEESADWEKHEEKIRGYARRLGVNLESSQFGHVFVNGKPFDLDDDFLRYMQVEVSQQLQHIQEKLVAGSLTDEDGERISTYFYDLPTTAKRRNQYVYPSAKSGSLRIVDMKDAIIRANFPSQRGSYIYPIDSGKTSLTTFIVADFNTEAGRALLKEALDALTPGSPSRLGVIHNVEDGPSPQGFSPAALLAYLTTTGTLSQVAHSRLSEILESLQMVASRHDESSQVVLSPETILADILENEPRSVGLVQTIESFTKAGRQMLRDLELAPGELALVVNGRIVGPLEPEDFVADDFSLLWDYELRKRVTPVVAALEDVKASFDESSQFEDMVLTASSIISSIQLPDPSEVGLFNAPQRPRRRNYQLLDGRYSTYAFGDNTTALYHLGIILDPLSETAQKWSAIIEWALNIPGVYVELHINPGKYNELPIKRFYRYNLRPRLDFDTEGNEVQAKTVFTDLPMEPLYTLAMDVPQAWLVRPREAEHDLDNIQLSALSVGERRQGVWALFALDHLVIEGHARDTLTGAPPRGVQLQLMAASREGEHPIADTLVAANLGYLQFRTSPGVYRLEIRPGRGRDIFTMESVGNEGWNSPTVGEAGDEITVASFEGVTLYPRLTRRPGMERADVLAEIKLRNDKDNKGVLGDVMSRVSSIFGHHDSDGKYAIAKTNSDEAEINIFTVASGLLYERFASIMILSVLRNTKSSVKFWFIENFLSPSFLEFIPHFAREYDFSYSLVTYKWPSWLRQQHEKQRIIWAYKILFLDVLFPMDLKRVIFVDADQIVRADLAELVHMDIQGAPYAYVPMGDDNTDMEGFRFWKTGYWRDTLRGKPYHISALYLVDLVRFRQLAAGDILRSHYQALSADPNSLANLDQDLPNNLQIEVPIFSLPEDWLWCETWCSKERLDRAKTIDLCQNPLTKEPKLSRARQIPEWEKYDAEIAAFARSLAEQGRLHGGIVAADVGVLAEGAARKPTSTLEHEEAVQTEQATSIVDDEAGHVKDEL

SEQ ID NO: 4043 - protein, 1486 aa, Exophiala sideris
MRWSTLPWRLAAAGLLPLVSLSSFAHASASINVALETSFSAAPYLVELLETAALENSSSYFPLLDRIANGAFSDLQTEKELYSKFIDVLQQDGHLPNPESLSSFKFALALHAAAPRVEAHFQYYNTSVQPHLMAAQDAACPVWVYLAGQQYCSPALDRAQQPISLPDVDDELPFDRVLGANPEGPSSILYADITHPLFGEFHQIVSQTAREGRSTYRLRYRPSSLSDSRPLYVSGYGVELVLKRTDYIVIDDRDAQQIDAAEAADISLEQIQEDELTDLKPLTSSEVVSLAANAASFIASSSDPFESLLQISSDFPRYSSVLASANASKEFLTEHRANREMFLPSGYNIFWINGVQIEPRQINAYSLLDHLRRERRIISDLQQIGLTASEAISLISSEVIAEAQANESPQRFDWRDDMEADQVLMWLNDLEQDKRYAAWPSSLRTLFQRMYPGQLPQVSRDIHNLIVPINITAIKDIELAATALQNLVKRTVPIRIALVPIGTGETADLYSKLSYHLLDTYGLNTLMAFFTEVASTKRLSTSPERSFTAVIKGHSPREGKEQISYEDILKDEALISRLEARDSYVERLALIGPTLPFIVNGVILPRGDNWFEVMSSRVFSDLQLLQQAIYEGAVLEDAWVPGAFLFEAATRRNEIVFPSDPKNVHIADLNRLATEFAGELSDIPRAVGAEATLLSDRAHILMVADVDSEDGRALLSRSLELQKQHPEIDLLILHNPSTNTYSGSAATALYSLTQDTGRDVTVEQLQRLLEDNISTDAGTGDAAEAATLYWTSKQELVKSLGLSAGQNGLWLNGRVIAPLDQSFTEADLQSLLDYERRERIAPVTTAITRLGLEERFTDALDLAKITSLVARSLKSDLPEGLRESAPLIRMDRYKIWNDTYTAIKVSNSDEPTIQIVAVIDPASELVQQWVPILKTLSQLNGVSVKIFLNPKDRLTELPVKRFFRQVISAEPTFDSDGSLERPTASFQRIPKDTLFNLGMVVPPSWLVAPKECIYDLDNIKLSNLPEGESVDALYELEHILIEGHARDVTTGPPPRGVELVLGTVQEPHFTDTIIMANLGYFQFKANPGFWHISLKPGKSSKIFNLDSVGASGYAARPGDETTSAALLSFQGVTLFPRLSRKPGMEDEDVLESSMLGGALEYLNKGRSFASSALSSLGFKKTSSTNAEINIFSVASGHLYERMLNIMMVSVMKHTKHTVKFWFIEQFLSPSFKATLPGLAQHYGFDFEMVTYKWPHWLRGQKEKQREIWGYKILFLDVLFPLDLDKVIFVDADQIVRVDMMDLNRVDLKGAPYGFTPMCDSRTEMEGFRFWKQGYWETYLRGKPYHISALYVVDLKRFRQLAAGDRLRQQYQALSSDPNSLSNLDQDLPNHMQHVLPIHSLSQEWLWCETWCSDESLSVAKTIDLCNNPLTKEPKLDRARRQVPEWTEYDEEIAAVLKEAAQTQDPSPELEDAAQEIISDERKRDEL

SEQ ID NO: 4044 - protein, 1014 aa, Citrus sinensis
MESADSADDDALEIHHVEGAFVETILPKAKTPPQDMLLKLEKEKTFMDQSQESSMFVFKLGLTKLKCCLLMNGLVSESSEEALLNAMNDELQRIQEQVYYGNINSYTDVLEKVLSESGINRYNPQIITDAKVKPKFISLASSFLGRETELKDINYLHSPETVDDVKPVTHLLAVDVTSKKGMKLLHEGIRFLIGGSNGARLGVLFSASREADLPSIIFVKAFEITASTYSHKKKVLEFLDQLCSFYERTYLLASSATADSTQAFIDKVCEFAEANGLSSKVYRASLPEYSKGKVRKQLNKVVQFLHRQLGVESGANAVITNGRVTFPIDESTFLSHDLSLLESVEFKHRIKHIWEIIEEVNWQETYPDIDPDMLTSKFVSDIILFVTSSMAMRDRSSESARFEILSAEYSAVVFNSENSTIHIDAVIDPLSPTGQKLSSLLRVLQRYAQPSMRIVLNPMSSLVDIPLKNYYRYVVPTMDDFSNTDYSISGPKAFFANMPLSKTLTMNLDVPEPWLVEPVIAVHDLDNILLEKLGDTRTLQAVFELEALVLTGHCSEKDHEPPQGLQLILGTKSTPHLVDTLVMANLGYWQMKVSPGVWYLQLAPGRSSELYVLKEDGNVNEDRSLSKRITINDLRGKVVHMEVVKKKGKENEKLLVSSDEDSHSQAEGHWNSNFLKWASGFIGGSEQSKKEKAAVDHGKVERHGKTINIFSIASGHLYERFLKIMILSVLKNTCRPVKFWFIKNYLSPQFKDVIPHMAQEYGFEYELITYKWPTWLHKQKEKQRIIWAYKILFLDVIFPLSLEKVIFVDADQVVRADMGELYDMDIKGRPLAYTPFCDNNKDMDGYRFWRQGFWKDHLRGRPYHISALYVVDLKRFRETAAGDNLRVFYETLSKDPNSLANLDQDLPNYAQHTVPIFSLPQEWLWCESWCGNATKSKAKTIDLCNNPMTKEPKLQGARRIVSEWPDLDSEARQFTAKILGEEVVTLETPAPVGPMQTSGSDASSKGDLESKAEL

SEQ ID NO: 4045 - protein, 1562 aa, Anopheles gambiae
MAIVAVGILCLFNAALLVHAEPKSHPITTQLSAKWGITPAQLEIAEFIDEESANSFWDYVELLNNVPDGLYRFETEEKRYRKSLELASDILGEGQMGLLKLALSLHSFSPKVQAHLQVATEVLAKGDCETTIFASINGKVACTVDDLRSILRSAAKDPSTVETFAIDHIYPGSENNSLTVVLYGEIGTSEFKQFHAAVKAETERGTVRYVLRHYVRKVSSRKVRLSGYGVELHLKSTEYKSQDDSPRPQDAAAGADGTDPIDELEVEVEGFDFGQLKKRFPHLSHSLDRFRSALLEQHEEIAPLKAWEFQELGLQAARRIAEMQGDEALQMLQFISQNFPTQAKSLLTQTVPEEFKKEMRHNIEVFGRNLNLQPPDSALFLNGLFFDAETIDTVTLLDTLRSEMRVLEGLNRINIRGGSATPLLGLDLSSSAKEFAIDIRDSAITWINDLENDAQYRRWPGSLKDLLRPTFPGMLRNIRKNLFNLVLIVDPVEGDSAGRDIVKLAESFVVHMAPVRIGLVFKTGEGEDYRAVTCGFNYVHQKKSSTEALGFLTDLYAATADQKVIRFADVRQVLKKKFNRLKLEEVDEILGEDSDFDYGRQLAQEFIDRLGLKTVPQALLNGVLLPQSTLTSDEFEETILTEIMQQTPTLQKAVYMGDLHEGEPVIDYLMKQPHVMPRLNQRILSQDEPHFIDMSGRAHPDLEDVTALGQLSNPDLTATLMKNLKYFGGKSTYQKFLGYRVHFLTVWVVGDLRLAAARKQLKNALKFMKSSSGTRVAFIPNVDGTDAVRSELKKDLNALVWATINTLEADESYDQVMKLFEAYESDPSTVSSSVPDSVLGFLPATQMHLKMLRVYCQRVLKLKASSGTVMANGRLLGLFDKDEFFDTEDFGLLQSFNALQYTDKIRTAMKQASQGDADDTPTMTSDTVMKLVSILVPRQQSKSRYTIPSDVQDSRTVVKLAPKRTDQPFFEIVAVLDPASRGAQKLSSLLLLLRDVVNCQMKIFFCAIDKHSDMPVKTFYRFVVEPELHFTNDGRLSAGPSAKFVGLPANPLLTQSLNVPENWLVEVVRSVYDLDNIKLSEINGPVHSEYELEYLLLEGHCFDSSTGSPPRGLQITLGTEDRPIIVDTIVMANLGYFQLKANPGAWILKLRHGKSADIYDITSADGPNTVHTAESTRVIISSLRSHVLKLRVTKKPGMAGVDLLGDEKDAAGGGGIWDSISSIVGTGGGDSAASGGTGETEVLNIFSVASGHLYERLLRIMMLSLLKHTSTPVKFWFLKNYLSPQFIDFLPHMAEEYGFQYELVQYKWPRWLHQQTEKQRIIWGYKILFLDVLFPLDVKKIIFVDADQIVRADMKELNDFDLGGAPYGYTPFCDSRQEMEGFRFWKQGYWKNHLQGRKYHISALYVVDLRRFRKIAAGDRIRGQYQALSQDPNSLSNLDQDLPNNMIHQVAIKSLPQEWLWCETWCSSDTLQHAKTIDLCNNPLTKEAKLTAAQRIVPEWKNYDAEIKRLQAKVDDREHEEQAAVAAAAAAAAEASTMGHEPSNVHSTEDKETNAEARHTEL

SEQ ID NO: 4046 - protein, 1428 aa, Metschnikowia bicuspidata
MGCLIQIVACLLFTLQIKASTISIGLQANWTAPEFAILLIEASSLHNESLYYEVTKALFQSQDGESDWDEEWADTEEWELVSLGEWPLTDRQCYELVTKRLLLVDTGFINLNLANKMASPRIKAHYSHFATDVESNVLPLVEKQCAKDSFGQPLDDPTAAWVKYGSRIYCSEEDLYALQLRAHLEEICAFDRVFGDNLDAPVLVFYGKPSSERFAPIFRTLFNFANAGTIRFVWRYMPLSSEKEPLYGYGTTFTVQAKGSELKEKQGKISFIGKFLSDYRSIETRHQPQDELVDVAYKATALVLKASISEQLLFLSEFVRNIPLYAPYLAKSDSTVSSKQVQEAAQQNERIGASSDMVGISINGATVHRLETDLPFVISKLKSEVQLINSMLALGFTTTQAKHIFSKNALYCAIKEHGYKTGSKFNRFEVYKDLFSPGKPSSGGVVFFNNIEDDANYELLSPDRYEIYVENANQVRMGQVPPLRENVHDMIFVINLSDKNQLRVFFTMSKIILDNGIPQQLGILPFVSNGKDKKVAALFYHLIEVGERHEAMALLYKYYDSEEGKEDEVLDLVALPDNQYDHYKTYQNTLDKFDIAEPSVIVNGIIHNLRASEWQTKLVEQVSHDVKLLRAKILEGLPNDIKLRDALHQYSHSKRNRNVVPQSPANIRYKRISKELIDNSIGIQKFGSETKFGPTFWLIGDFNSLSILNQFKEVLRYMKSNKKMSSCVRIFNTALQSKLLDRINDKFGNKTIDNTQIDQLLDLVGDLHIQTVLEPDNNKLTILRNNRIQLHNPVFLFNSRYIKIGRLLEARDLKLMVEYEFSQRLNFLADIVESNPSIFEAGLPGIMPSNFDPLMWFDLTTSVITDSIFLEDSQVRSDFGRFDFSSLNFENRIDLTGFDPSKHVDILVVVDPLDALSQKLLSMATSLADLPFVNMMVLIQPFSKLPADLNIDRFYSSNFVPSKPKFDADGNYKQQSWPNLQCSLRKVLSADLDAPHNWHYVKGDNTHLYDLDKLGPAEDISANFTLSQLVVVAHVKDVLTGKSIPGLVFDAQSGEIYREGRTLQTKGYCQLRLEPGNWLLLLKKDTVSSTSFELLSASSNQYEPNDQAIASEPLLVHSLYGQQIYPRIRRRADNDREDAFPITGDKIQSTATVNLFCVVSGFTQEQFLAFLMKSASENTCRPVKLWLLEMYVSEHFLRQLPELSSRYNFQYELLSYKWPLWLRQQKDRVRQVMAHKALFLDVLFPETVDKVIVVDADLVVISDLSELIELDMHEVYGFVPMCEHRPVSEKFWHAGYWKDVLKDDLHYYSSSMFVVDVARFRAARTGEHLRRQYQKLSSDINSLVHLDQDLFNYLQHLDKIDLLPAEWNWNPAWCSANARKNAKIVNFALGQLSQSKAFIYAQNFYSPWTPLLTTSSTSLSQHMVHDEL

SEQ ID NO: 4047 - protein, 1564 aa, Anopheles darlingi
MSRMASSARFLYVALVTGWLAVSLVQGESKSHPITTQLSAKWKITPLQLEIAEFIDEERGNSFWEYVELLNNVPGGLYGIETEEKRYLKSIELASEILGEGQINLLKLALSLHSFSPKVQAHLQVAQEVLTKGDCETSIFASVHGKVACDISELESILRAGGKDATTVETFAIDHIYPGSENNTLTVVLYGEIGTPEFKKFHQVIRPVADRGTVRYVLRHYVQRVSSRKLRLSGYGVELHLKSTEYKSQDDSQHAQDPVANGGTDESEMLESEVEGFDFVQLKKRFPHLTHSLDRFRNSLLEKHDEIAPLKAWEFQELGLQAAKRIVELPGDEALQMLQFTAQNFPTQAKSLLSQTVSEEFKKEMRNNIEVFGRNLNLQPPDAALFLNGLFFDAETIDTITLLDTLRSEMRVLEGLNRIQIRGRSATPLLGLDLSSSSKEFAIDVRDSAITWINDLENDAQYRRWPASLKDLLRPTFPGMLRNIRKNLFNLVLIVDPVAGDSAGRDIVKLAESFVVHMAPVRVGLVFQTGAGEDYRAVTCGFNYVHQKKSATEALGFLTDLFAATADRKVIRYADVRDVLRKKFNRLKLDEVDEILGEDSDFDYGRQLAQEFIGRLGLKTVPQALLNGVLLPQSTLTSDEFEETILTEIMQQTPTLQKAVYMGDLHEGEPVIDYLMKQPHVMPRLNQRILSQDEPNFLDMSGRPHPDLEDISALGQLSNADLTATLMSNLKYFGGKSTYERFLGQRVHFLTVWVVGDLRRTAARKQLRNALLFMKSSSGLRVAFVPNVDGSDAARSELKKDLNALVWASINTLEADETYDLVMRLLEAAEAGTDLAAVSVPDSVLGFLPATQMHLKMLRVYCQRVLKLRASVSTVMANGRLLGAFEAEEYFDTEDYGLLDSYNGLQYTDKIRAALKQASLTDNVDTPAMSSDTIMKLVSILVPRQQSKSRYTIPTDVQESHTVVQLAPKQAEQPFFEIVAVLDPASRGAQKLSSLLLLLRDVVNCQMKIFLCAIDKHSDMPVKTFYRFVVDPELHFTNEGRLAAGPIAKFVGLPANPLLTQSLNVPENWLVEVVRSVYDLDNIKLSEINGPVHSEYELEYLLLEGHCFDSATGSPPRGLQITLGTEDRPIIVDTIVMANLGYFQLKANPGAWILKLRHGKSADIYDITSADGPNTVHTPESTRVIISSLRSHVLKLRVTKKPGMAGVDLLGDEKDGAGGGGGGGGGIWDSISSIVGTGDSGNGGGSAGEGEVLNIFSVASGHLYERLLRIMMLSLLKHTHTPVKFWFLKNYLSPQFIDFLPHMSAEYGFQYELVQYKWPRWLHQQTEKQRIIWGYKILFLDVLFPLDVKKIIFVDADQIVRADMKELNDFDLGGAPYGYTPFCDSRQEMEGFRFWKQGYWKNHLQGRRYHISALYVVDLKRFRKIAAGDRIRGQYQALSQDPNSLSNLDQDLPNNMIHQVAIKSLPQEWLWCETWCSSETLQYAKTIDLCNNPLTKEAKLTAAQRIVPEWKDYDAEIKRLQAKADEIEHAGEAGEQETGSSGQHSTGGIAEEQEDTTRSKHTEL

SEQ ID NO: 4048 - protein, 1487 aa, Cavia porcellus
MGCKGNASRVRAAAVRPVTGLCCQMGLLIALSVLWLFSSVKADSKAVTTSLTTKWFSSPLLLEVSEFLAEDSQEKFWNFVEASQNIGSSDHHGTNYSYYHAILEAAFPFLSPLQQNLLKFCLSLRSYSATIQAFQQIAADEPPPEGCNSFFSVHGEKTCDFDVLETLLLTASRRPKPLLFKGDHRYPSSNPESPVVIFYSELGLQEFSSFHHQLVSKSNAGKINYVFRHYVSNSRKEPVYLSGYGVELAIKSTEYKAKDDTQVKGTEVNTTVIGENDPIDEVQGFLFGRLRDLYPDLTGQLKELRKHLVESTNEMAPLKVWQLQDLSFQTAARILAAPAELALVVMKDLSQNFPTKARAITKTAVNSELRTEVEENQKYFKATLGLQPGDSALFINGLHIDLDTQDIFSLFDVLRNEARVMEGLHRLGIEGLSLHNVLKLNIQPSEADYAVDIRSPAISWVNNLEVDSRYNSWPSSLQELLRPTFPGVIRQIRKNLHNMVFIVDPAHEHTAELITTAEMFLSNHIPLRIGFIFVVNDSEDVDGMQDAGVAVLRAYNYVAHEVDEYHAFQTLTHVYNKVRTGEKVKVEHVVSILEKKYPYVEVNSILGIDSAYDQNRKEARGYYEQTGIGPLPVVLFNGMPFEKEQLDPDELETITMHKILETTTFFQRAVYLGELSHDQDVVEYIMSQPNVVPRINSRVLTAEREYLDLTANNNLFVDDYARFSVLDSQGKTAAIANSMNYLTKKGMSSKEIYDDSFIRPVTFWIVGDFDSASGRQLLYDAIKHQGMDFSLFKEVFESSKMDFILSHAVYCRDVLKLNKGQRAVISNGRIIGPLEDSELFNQDDFHLLENIILKTSGQKIKSHIQQLRVEEDVASDLVMKVDALLSAQPKGDARIEYQFFEDRHSAIKLRPKEWETYFDIVAVVDPVTREAQRLAPLLLVLTQLINMNLRVFMNCQSKLSDMPLKSFYRYVLEPEISFTSDNDFAKGPIAKFLDMPQSPLFTLNLNTPESWMVESVRTPYDLDNIYLEEVDSVVAAEYELEYLLLEGHCYDITTGQPPRGLQFTLGTSANPVIVDTIVMANLGYFQLKANPGAWILRLRKGRSEDIYRIYSHDGTDSPPEADEVVVILNNFKSKIIKVKVQKKADMVNEDLLSDGTNENESGFWDSFKWGFSGGQKTEEVKQDKDDIINIFSVASGHLYERFLRIMMLSVLKNTKTPVKFWFLKNYLSPTFKEFIPYMANEYSFQYELVQYKWPRWLHQQTEKQRIIWGYKILFLDVLFPLVVDKFLFVDADQIVRTDLKELRDFNLDGAPYGYTPFCDSRREMDGYRFWKSGYWASHLAGRKYHISALYVVDLKKFRKIAAGDRLRGQYQGLSQDPNSLSNLDQDLPNNMIHQVPIKSLPQEWLWCETWCDDASKKRAKTIDLCNNPMTKEPKLEAAVRIVPEWQDYDQEIKQLQIRFQKEKEMGMQHEKKTEKLSQEASQAREEL

SEQ ID NO: 4049 - protein, 1394 aa, Aspergillus niger
MVSGLANFASWRLASVLIAGLLAIQGRASPSVNVALQASFDSPPYLIELLESAAEENSTSYFPLLDRIADGIFDDAVTDKDLYDRFLEVVREDGHLRTPESLSSFKLSLAMRSASPRITAHYQYYNASVQYSLMAAQDAVCPVWVHSEGKQYCSSTMERAQQDVTGSDDPRELPFDRVFGDPSLPPAILYADIASPMFKEFHQSLSTMAKEGQVSYRVRYRPPQHWSPRPVFVSGYGVELALKRTDYIVIDDRDAEERGTGSIESGKSDETEDDLDDLRPLSSSEVSRLGLNTVGYVLDSDDPFDTLVKLSQDFPKYSARVAAHNVSTELLQDVRSSRLRMLPPGLNVLWINGVQIEPRQVDAFTLLDHLRRERKLIEKFRNLGLSATDAVELLSHPLLGEALARDGPQRYNYRDDIEGGGVIMWLNNLEKDARYESWPSELAGFMQRTYPGQLPAVRRDSNNIVFPVDLTSTEDADIVVKTIQVFVKNKIPVRFGLIPVTFSDGAIAQLKVAHYLQETFGLASFMDYLEASASKNKLASPDKACFQAATQDRSPRLEKVSLSLDEVLNNAVYDATVSKTTAYLNRLGMKHEPSHAFVNGIPVTRNDKWAQEMSTKISKDTQLIQQKIADAEVDEDTWLPELFLSQAFDRRNPAIVPEDPKEIRAVDLVQLADSQEKLFSQIPRLGLDESNALESAHAIVVGNFDEKSGYELLSAALESRKTHGEVEMLFLHNPKLEASPASRSVAVRRLLNGGKEVDASQILEAIASSASPADEEAGDAALFWEAQRAVVEELGLAPGERALVINGRVVGPIAEDTALTSEDLDQLLIYEKQKRITPVAKAVKALEFDEKLSDPLDFAKLTSLTTLSTISDVPEGIYESTSDIRLNLFNRWNDSQSAITVSNSDDPAITIVASIDPTSEDGSNVDAIYALEHILIEGHSRDMTTKSPPRGVQLVLGTENNPHFSDTIIMANLGYFQFKAQPGLWNINLKPGRSERIFTLDSVGSLGYNPQPGDENNEVALLSFQGRTLFPRVSRKKGYETEDVLETNPKPGSAMDYMNKGFNFASGILSSVGVGTKGSTSGKQADINIFSVASGHLYERMLNIMMVSVMRNTNHSVKFWFIEQFLSPSFKSFLPHLAKEYNFSYEMVTYKWPHWLRAQKEKQREIWGYKILFLDVLFPLDLDKVIFVDADQIVRTDMYDLVSLDLEGAPYGFTPMCDSRHEMEGFRFWKQGYWKNFLRGQPYHISALYVVDLNRFRAIAAGDRLRGQYQMLSADPESLSNLDQDLPNHMQHHIPIKSLPQEWLWCETWCSDESQSQARTIDLCNNPMTKEPKLDRARRQVPEWTEYDDEIAALSKRVAAEKQQGQVEEERAGESYPDEDEEGETSSGWDKDEL

SEQ ID NO: 4050 - protein, 1693 aa, Ceraceosorus bombacis
MGPPSTSAALPFLVTRDTKRRSHLAASWQASLKTTTNLANLLVKHVHFPVARIAHTVLPKPRRRCSPWPATPLLLEILEAAHTQDPDSFWPLLDRLTDQSVVLDRNASDERTYKAAVQALDDAGLLEKLWDRQLWNWALAMHTEAPKVTAFWQMYNRGGAEERWSKRSQEPAVDCGSWVAWGQKVLCTASEVAEALGTGSEADTTLLEVPFDHIRHSKQGAPASSGLAKPRVAILYADPYSANFRSLHQELSRHVSADQSPALRYVLRWKAPRAEEAAISPALLAGYGATLDLKKVDYLVIDDRRIKESALADTVQGKSLRSAQSEGDLTEREWLDKLIGTTDEDKAESLGNLNEGEITDLGAKATQLIIQSPDPLRALAQLSHDFPVHAVGLARRAAGPKQELLEELEEMHTTAMEAGSSDIWLNGKALAEKEISPLGLLAPLRADQAHITSLTSPYLNLTPAAALDLLTYAPIGQAQDPDASSNVFFDASDRIERGMPRGAAASVPQAAPKDAESSAEGSRDLNFPREGAITYLNDLEKDSMYASWSPSLQALIRPLWPGAFPHIAKNIFNVILVMDLTKRETCGFLAESLFPTIPRIGLRWGFVPGGLEDLDQFQSLQMARLFWLLHAEVGNTGVVEWLKALVHTTSSGQQIDVKLALKEARRVLKGKADALNPEQLLTDPELSERERSVRSYVKRLHLDLKGSHARGHVLVNGQRIPFNAQAFNAIHSLVSTQTQALARPVYFRQIDPEQDISHYFYDLPTTFTSRSSLVFPDEEMSTPDNPAPAAVKPRAVDLVKAADTLKNKAVVERFVYSPAFEKVNATVWVVGDLDSQEGSSLVREALNALSQNAFRLGFVHVPRRPSEASRLQPSASLLSTFLHDMLKIPTDLKSKLGPENLIELVEGYQGSLRDIVTEGRVEGQQVFGHADPQDDVSAMKEKGWNTPAATAAGLFWDEAAPFANALGIDKREFGIVLNGRVLTGFNAQNIDSGDFEALVSLESRRRIDPVVEGLSQAGVHFEGLNKEDHAQIATFATSIMSSVYYVDEAAEGIFQPPQTARSSLFDQIEARHTSFEKGDRSTAHTRLFVALDPLSERTQSWMPVLKLIASMKDTYIRIILNPETKQTELPLKRFYRSSAPTQMSFDASGKQQGSKLQFFGMPEDAVLTMALDTPPSWLPMAAEAVYDLDNIRLRDVPLSGREAGVNAVYELKHILLEGHAREEGVPGARQIPRGLELVLESPDGAVQLDTIVMANLAYFQFRAQPGLYRLRIREGRSSELFEMRSVGNHGWESPSVNQTGDAVTVDTLHGLTIYPRVKRRPGKQEESLVVDLDEDMPSGEEDSAGKGLLAAARQAFKAAKGKADEVVNKAVRPVSKRSSADINIFTVASGHLYERMTYIMILSVLKHTKSSVKFWFIENFLSPSFKEFIPHLAEEYGFDYELITYAWPHWLRGQREKQRIIWGMKILFLDVLFPLDLSKIIFVDADQIVRSDLQELVKTDLHGAPYGYPPMGNDSYDMDNFRFWEQGYWKNFLRGKPYHISALYVVDLNRFRRVAAGDRLRGHYQQLSADPNSLANLDQDLPNSLQFQLPIFTLDKTWLWCETWCSKDWLAQAKTIDLCQNPKIKSTKLERARQIPEWTAYDEEVARLASRLAGQDKLGKNVVVDKQESVKEKEVELETSANFAHETVHHDEL

SEQ ID NO: 4051 - protein, 2092 aa, Cyanidioschyzon merolae
MLPETPDLMRTRRRFHDYLQRACFRKHQISCVPDVDSTTTYNERASGNTRSHALTSDYTIKRPAFAPALTPGSQSSLRWQRTYQQAAREYASSPTVRTGRRKHLLLHSALERKHGPWCTWLNEGPTQTQAGAIPSRGGSGCYRAVAAQACYALPARCFPHELAAEVLMRSFGRQRFSLGLWVCAVYTLIICASLCIGISQSFLPAAVRRSVKALHVDVVAPWNASSLPLELLEGIRRIYSDRLFWSLLDQIADGTDLLRSANSDSERELSAIRWLRTRLELAWTAAAADLTSSVEADALTAAVRQAWRSLEVLVVQRVYAARLQLHERLETDDRDQLEPALNAVDSTWVLLVCGAERIPIADEAALASLGHHVDACRSRFPRNIDEVHRWNLASQRFLLPSDTVLGCVGGSAAAPHVPGDKRWTDQSGTEPLIAAILYTDVFRDDAFSAFHRAVRERAQNCELVYVIRMRRAAPSRAALTADFSSDATQMMSLSGYTVELALKSSDYVVLDTKQNETLWLQRNKTQHVRQRGAAGSVAIDIQDLDKDEIQATLDALLMQSLWSEATKHTGASETLEELLMDLTGSLLQGIEQLGNDLPSIGAALWKEAKAEPSFAASVAQSRALLTASAENLSRLHPELHWDNLPSVLFLNGRQVSPDASSVALCAASIAAAHLAAYRIWDMMDPLKTAAIDDRERFLANITHRQSEAEASTTIVDTRLYLPALLDCTEESDSDPVQSVEQLFIFRLNDIERDRKYQNWSPSFQELLQSPSAKAFPKLRRNAFRLVAFVNPGSAAGLEASAQLIQWVKNRDPVLPFQISLVLVPPHEAAYRWNASAGDTAGAPRSPWSRALGMLRSLGWRRGDLQSPGELPPRRSPLEPSTDAVICRAVYYLLHVRRSRRAAASFLSELHATVQREHPLAALWMLQGLGGRSSTIALPPLPPRADQVRRVFLQTAAGMQAASPNQTSSSFDAEHDYESLILHPHGKKRVLGALFGLRSGGAAAAAKVHDSSQCAMLVHAEVRTRQWLRSIGLPADTSALLALNGKRIGDLAKDPVDASTVFRYLNAEVQRLAELTRAGLAPDAACVDDVVYQTSSWRTSTTVTPGPYPSPRRKESATAAVLATRLVLVPAFETQLLSATSQLVSGSTALQQEHIEQGLQSIALLWDALFAQQQQHTQGDAVHLLNIPYRLAVVDAADAHDDGCQPPLTVWLLLDLDTTFGCRFLHDAMRVLAEQQWTQPSHHPGAAAWPSAVRLGLFHTGLQAGPVARSLMQLWTATPANASRSSMQLDDALRRRLERICGGVEVSPASTAPTLTGTPAPNWLRLLFSGGWGVDPGQLALVVNGRRYRIDRDEVWAHHAAALFKAVLQREAALMEARCGSYIIRQTKPLSGRCSPVDQSHQADAVLISTILADVLDGSCRPSGGSLLVQQSPSELPLDSLRRLRHLVPALRYRKAPAVPRQHTGSALRAEGLIAPFTAADASFTLVLRKLLGEALDAELDVTLNPRLQWRGDDGRLLQPRYVRSKLVTRFADALANGTSASVIFDRLAEHRIHSVHLRTPATWFTTVQHAELDPDNVALVQWAPPGTPSHRSIRYELSKLIVEGFVVDRQPSTRAPGLALRLEQHGGIRHPDHCSRERRSRVETVVMEGSGYFQLALTPGIWRLVPIPIPSAFGRQRDDLSIALVEAQRAPYAARLVDLQPIDASNATLLVVDDLWGQSTQSQPLLLLRVAHLQRTWYERVWALVAALRTSSQVQRRERLCLPPSASSSSSSSADKRPLIHLFSIASGHLYERLLRIMMLSAVRATPRYRCKFWLVGNFLSPRFRAQLPRLAHRLGFDYELVWYAWPRWLRPQHEKQRLIWAYKILFLDVLFPSDVERIIFIDSDQVVRGDLGELWELALGSRAVYGFVPFCDDRPEMDAYRFWKRGFWAKHLRGQPYHISALFVVDLKRFRAHRAGDTLRALYQRLSADPESLSNLDQDLPNYASVPLAEQSGTMNAAEPLVPLESLPSEWLWCETWCSEQSKARAKTIDLCNNPSTHESKLESARRIIPHWDELDTEATAAATLVDDHAWEAFVAQREQSMHPTRHDELR

SEQ ID NO: 4052 - protein, 1705 aa, Serpula lacrymans
MHYFLALALALFPFANASPPVSVQLRTPWLSPGPLLETIETISIEDPSAFFPLLSLLSTNPPDPNASPKTVHAHVLDLASPLLDGPARASVDALLVLHAASPRIAAFEQHFLARTHEQAVEDASGETCAAWVDWYGHVVCTVDGLKRAVSSISFEHKPQPRSLPFDHVYPSPHSQKPTAIFYASLTAPNFPALHHALVDLTQSAGIEYVLRWAVSPDPQSTRAHDKDALGASLSGYGVSLDLKKMDYLALDDRGRSASTGQASPDSTAHAREQDQDALLALFDSLPSLNASTELHIEGGTKDAALSEDEIADLGLRATQLIYSYSSPSKREDDKSHENSVTASLSPLTLLRQLTHSFPLYATKLARKDLLDGLDSSYSLPSDKGTEKNEEHDAWAGHQPTGVLSPLFDSVRSNWEKVAPGTSLFWVNGRVLGEGEVGVFGLIRTLRKERSLVRALMQLGMSTREAVEVVVHDAHSRTGADGDYADKDITRRGKGVKKGSEVEEEREEEKGGSRSGRWNAKHSKLDPRPEDASKASSPVHSSHDDVAKSTSKKSNKDGGVHRPKFPDALVPTEATEGLVDASDRTEGGGVVVWWNDLGADARYARYSSSLSVLLRPLYPGQLPMTRFNLFNAILVLDLAQPRTLSFLAMSLEGIVARGWAVRWGIVPFVEWKEGEGVDGTKMARLFYFVSEKYGRDVIIGFLKRVSAAHVQTPTLSWPLVRMAWADFGMPDDFDSVVEGRVVASVGDEAEKDGGNVDTLHKARLYARRVGITDASGHAFVNGRYIGMSDAFLRDLQVEVTQQLQYLQELVYTSILTDSYVPTISTFFYDLPWTPARRNAHIYPLISSPASGGVQPAGSSARPLRMFSLPELPKVVGKGGFVTPQDDDYLPISMYVIADFDSESGLALVKEALDFILISKDVLATISPARLKRALGLDEAGSVSTPDESAQVALKADLLREYGVDGGEVVVAEDAYAGYVGSCKALARELRLLPGEQAILVNGRLVGPFDASEFMVEDFEMLETYEMRKRVGSVVVALEDVLGEKADDLDSSSYAHLVSTSSSLISAIQLPDPSEAGLFDTAPKPRSRKYKLLDGNYTSFEIGNADDALYHVAAVVDPLSETAQKWTSLLEWLVEFPGVYLELYLNPSQHSEIPLKRFYRYNLAPRLTYDENGLEVPAKVVFNGLPIEPIYTLGMDVPSSWLVRPREALYDLDNIQLGSLSPQDRVTGLEAVFALDYLVVEGHARETLLNSPPRGLQLQLSTPDGTPVDDTQVVANLGYLQFKAKPGVYELSIREGRGRDVFEMESVGNEGWESPRVEEVGSEVTVMSFEGLTLYPRLVRKPGMEMVDVLDELSYKEEETHGVIEDIVSRMTSLFSHKGEKSLQAQGDGQADINIFTVASGLLYERFVSIMILSVLRNTNKTVKFWFIENFLSPSFLEFIPHLAEAYNFQYELVTYKWPSWLRAQKEKQRIIWAYKILFLDVLFPMDLKKVIFVDADQIVRADLQELVDLDLHGAPYGYTPMGDDNYDMEGFRFWKTGYWADFLRGRPYHISALYVVDLVRFRQIAAGDILRGQYQALSADPNSLANLDQDLPNNIQQQVPIFSLHEDWLWCETWCSKDRLHRAKTIDLCQNPLTKEPKLARARQIPEWEEYDAEIARFARKLAEEGKIRASAATADTNVLANVGATPQAAESVGDNSEEARPRDEL

SEQ ID NO: 4053 - protein, 1651 aa, Puccinia striiformis
MERAETAEAKFKKLEMDSMLKDQELVSLQHKVSNLETDLETAEKKISDSKVHKEEEESNKSANENLNRKIALLESELDNAEKNLRETTDKLRQVDVKAEHFERQVQRIESERDSWEKKWEETQEKYIASKRELEEVVQAMEISTMKRSAGLRAHLGLLLISTIDVLAGSPPISVSIQATWQEPPILIQVLESAALERPSLFFPSIDAVCSDWENSKSKLSTDKQKYEYLTSLLGSPGLLDGPGGLESLAFSVALKEAQPKIEAFRAWYASLPSNLTGELDSTDQCQSWTLINDSKICNPSELSELLDSNNFSENNFTESSRNLKSFPSIISTSYTKPPQSSRLRLLHIFRWKIPSGPLKTSSKSQSASLLSGWGASLDIKKSEYLTLDDRPVESSSSDDTQLIIDGTSATENLADSEQAKLKPLKAAEIFDIGAKATQHVLSSPSPLSALRKLTEDFPLVAHTLVNEWVPGRISTELRLELKENMANSIPPGQSVIWMNGLQISSLVSLENLNLFKLVEIMRNERRWIGSLSSLGLNSLQARNLIIDEKLNSAMNPEASSGSAIGEIDASSLGVRFDASDRQEGGGAIIWLNDLENDPRYSMWPSTLRAILRPTFPGQLHPIGRNLINVVLGLDLTQTQNLHTLGHVIEAFITRTLPIRWGIVPIPTKDPSEGEKISRSFWDMTEALGPMEALKFIKEFTQNLEEESRKIDIKKFVIQANERVSNENESSSKDIKSDQDEKFKIWLNKSQLYSSRLSLCSNDHSLPACMLINGRFFPMEENYRSHLQETATLHTGFIQHQVYYNLLKDDQNVADYLYDLPLVHRARNDLVFPSEARPLKFVIWSKLFNLLPMFLRQIRFSRMQMRLRAMPNRAPSHLMGSWKSRFQGWDKGSMHDVSVQVSFVHTPSDNSETPTELSSSLAELITASVDAKITTQDVIDQLSRHEYQITVSDDGSPTTPGSDIPVARHQTWLGTHEFARTIGVKSDDGLAIIINGRLVHVSSTTKLLNEDLTLLVEYETQQRINPLMEALKTLDEFDLNKYHSNLPLIMSTVGVVLVGSDDGSSQTSSSEARSAKHLSRIGTHSSYQHGDKENALFEFSVILNPPAKLLNDDVSMKVWFNPSLELNELPIKRFFRTAISNSLEFDKNGRAIPALVNFDGIPTETLFTLAIDTPPAWLALPHDSIHDLDNIMLSELLLHLLRNQEVDTIIMANLGYFQFKSSPGIHRLSIRPGRSLELYQFEKTDSSLGIDDDEPYQFLCLTTFNGLTIYPRVRKRPDKISESLIQPLSASSTSSKKGPVGEFSKLMGQVKDLASGMLRGQGSDLANGTSRSVINVFTVASGLLYERMAYLMCSGSTDLKRLLKFLVWFISNFLSPSFKRFIPHLAKEYGFDYQLVTYRWPSWLRAQKEKQRVIWGYKILFLDVLFPLEVDRVIFVDSDQIVRTDLKDLYELDLEGAPYAYAPMCNDRNETKGFRFWDTGYWKESLQGRPYHISALYVVDLRVFRTIAAGDQLRQHYQSLSADPGSLANLDQDLPNNMQSILPIYTLDQSWLWCETWCSDEGLKTAKTIDLCNNPLTHEPKLKRARRLIPEWDTYDQEVAALASRIKKNLNEDDSSAKITVQAGLKIDDEDLNHSVHQKDDQSSSVLDRDEL

SEQ ID NO: 4054 - protein, 1629 aa, Chenopodium quinoa
MMGKYDRSKFWVLIILIFISISGIFVSAQSHRPKNVQTALRAKWEGTPLLLEAGELLSREWKDLFWDFIDVWLQHENDEIDSNTAKGCMVKIVKYGRSFLSEHLGSMFEFSLTLRSASPRLVLYRQLAQESLSSFPLTDEAVTNAGDVASDLHDTNMGNRKPDLLLVGVNPKSPGGKCCWIDVGSSLFFDVVELLEWLQIHGGDSSQQPELFEFDHVYSVSNSSSPVAILYGALGTKCFREFHGALVNAAKEGKVKYAVRFVLPLGCEVNISHCGALGTKSPVNLGGYGVELALKNMEYKAMDDSMIKKSVTLEDPHIEDLSQEVRGFIFSKILERKPGLSSEIMAFRDHLLSSSISDTLEVWELKDLGHQTAQKIVHASDPLQAMLEINQNFPSVVASLSRMKLNDSVKDEILANQRMVPPGKSLMALNSALINIEDIDLYLLIDLVHQELSLADQFSKLRIPEPTIRKLLSTVLPSESNMFRIDFRSSHVHYINNLEEDSMYKRWRSNVNEILMPTFPGQLRYIRKNLFHAVYVIDPATSCGLEVIEMIVNLFENQFPMRFGVILYSTTFINEVEKNGGDNLADISVNSTDEDISSLIIRLFIYIKEHHGMLTAFKFLGNVHSEFSDSGEEAPERHHVEGAFIDVLSNKAKSSPQDLLLKLDQEKDFQDVAQESSMFVFKLGLSKRKCCLLLNGLVYNSNEETLLSAMNDELPRIQEQVYYGNIDSHTDVLDKFLSENGVRRYNPLIIIDGKVKPKFVSLSDSILDEGSALHEISYLHSPETIDDLKPVTHLLAIDLTSTKGLKLLQEGIRYLGDGSTKARVGVLFVPNFASDSPSLFFVKIFHITSSSYSHKEGVLKFLDQLCLLYERIFMKNSSLHTENIKTFVEKVSDLADVNGLPSKGYSSLLTDFANEDLQKQLNKAGLFLHKHLGHESNLNAVITNGRVTVLSDEDTFLSHDLHLLESYEFKQRIKHISEVIEDLKWENIDPDSLTSKFISDVIMLVSSSMAKRDRSTEGARFEILQATYSAVVLTSESPIHIDAVIDPLSPSGQKLTSLLQILGKYFQPSMRIVLNPLSSLVDLPLKNYYRYVVPSMDDFSGSDYAVNGPKAFFANMPLSKTLTMNLDVPETWLVEPVIAVHDLDNILLENLGDTRTLQAVFELEALVLTGHCFEKDHEPPRGLQLILGTKSAPHLVDTLVMANLGYWQMKVSPGMWYLLLAPGRSSELYHLIEDDGGSHKTTFSKRIIINDLRGKVVHLEVVKKKGKEHEKLLASADDDGQSPERIKDSQRSWNKNIIKWASGLIGGSQNTKKSDSAVPENKSDRHGKTINIFSVASGHLYERFLKIMILSVLKNTNRPVKFWFIKNYLSPKFKDVIPLMAQEYGFDYELITYKWPTWLHKQTEKQRIIWAYKILFLDVIFPLSLDKVIFVDADQVVRADLGELYDMDIKGRPLAYTPFCDNNKDMDGYRFWRQGFWKEHLRGKPYHISALYVVDLDKFRQTAAGDNLRVVYETLSKDPNSLANLDQDLPNYAQHTVPIFSLPQEWLWCESWCGNSTKPKAKTIDLCNNPMTKEPKLQGARRIVAEWVDLDQEARQFTAKVLGEELDPVESTPPSPNDEEIDIESKAEL

SEQ ID NO: 4055 - protein, 1607 aa, Coprinopsis marcescibilis
MKRPLHSLFLAAYASLSVAASSPPVQVSLRTSWPAPPVLIEILETVGLENPDAFFPFLDLITDPEVLHSSTSLSPEAIHQASLKVAVSKGLFAKPGSLSNVELQLALHAASPKIEAFYNYYTSYVNKTLACNGGSWVDWYGEVVCDVDTLKKLAGTETIGTGAYPRPEALSFDHAYPPSEQLVSKPARTAILYVSLPSPNFRALHTYLYALASQDDPRVEYVLRHIPPPHRENGRRTNLSGYGVSLDLKKMDYLALDDRFSGGKRQQSTKDDELEGEELLDPVQALIETFPLDDSAPDASVALTKEEIEDLGAKAAQLIASSPSPLDTLLQLSQDFPRYATSLARRVSANSSISDELHANSLKAKRGVNVLWLNGVAVENHDVEPLPLLRLLKKERTLMVGLEAVGLSRQQAFGVLTHPAVAGAQREAGGADVLYDASDRAEGGGLVVYWNDLEKDARYAGWSPTLHTLIRPMYPGQFPSVKANLFNTVLALDLSQVGAVNFIVGPVSNIIERGLPFRFGVVPIVETEDGKKMARLFYHLIKNYGRKKTLGFLRKLAQPDLQPQDPPLVTNVDWKAVAKAYEELAEAELVDEPDKVAASLSDVLQGKFTLPPPIAPVEGETQGEGVEWPSVERQLGEYHRRLETSLKGAKEGHAFFNGKHYPFDGNFLKGLQSDAMEHQQYFMEKVYRGQLTDDILRNEGLGNHFYDLPTTNRKRNRYVFPKTRADVRIVNLGEVGERVGVVGAGGYVYPKVNAEEKERDAPVLSVFVLGDFDAEGGRVLAAEALKSTERDGAASRITFVPNPAELDAVKAGSRNAVVSRVVVQELLREAGRGDLAEVFSSSLPTSSGVKDAIARLTAGTNDAEFTQGKMQAHLKASRLFAREAGVKPGESAVVINGRVVGPIEDGEFGAFEFETLEEYEMRKRTGPVVGALVELGVDMQDRDRFSDAAAVASSIIAWSQVQDPSETGMFDTPPRPRQKTWEMLDSNYTAFEFGDKSNALYHLVFLVDPLSGTGQKWASVVQWLANIPDVFIQVQLNPDKYAELPLKRFYRYNLLSSLSFDTDGQEIPSQIVFNNLPIDPIYTLAMDVPASWLVRPKESRYDLDNIQLGQLFPPDTSLSAIFSLDALLIEGHAREVATQSPPRGVQLQVVTTSEGRSVPVQDTLVVANLGYFQFRLNPGVYGLEIRAGRGRRVFGMESAGGVGWESPGVEEVGNRVALVDFEGVTLFPRLRRNKGMEEEDVLEDGEEEVGGGVLSGFSNKVKAMFTTRKEETGVAMVKKEQAEINIFTVASGLLYERFASIMILSVLKNTNHTVKFWFIENFLSPSFLEFIPHMAAEYNFDYELVTYRWPSWLRAQTEKQRIIWAYKILFLDVLFPMDLKKVIFVDADQIVRADLKELVDLDMQGAPYGYTPMGDDNTDMEGFRFWKTGYWKDFLMGKPYHISALYVIDLVKFRQMAAGDILRQQYQGLSADPNSLANLDQDLPNNLQRQVPIFSLHEDWLWCETWCSKDRLHRAKTIDLCQNPLTKEPKLSRARQIPEWEAYDAEIACLTRRLAEEGKISSGLATADANVLAGGSSSAEKTEPEPVEEAPAADAVGEEHARPTDEL

SEQ ID NO: 4056 - protein, 1486 aa, Beauveria bassiana
MFRRPAAHTAQCPRMAIRLGSGLLVALLASSQVSASPAVNVRMQAAFNSGPYLLELLETATAENSSAYFPLLDRIAGGQFSRSSTEAELYNEFISVVRDDGHISSPEALSTFNLGLSLRSSAPRIEAHYQYYDTAVAIAEIDLSCEAWVLLEGNQYCTPQLDAAVRNGLFDPNITALPFDRSIGAGKHVVLYVDPASPHFRKFHAPLRIAAEAGEYNYRVRYRRPINASNKALHVSGFGVELALKRTDYIVIDDRASQSDAKAQKPLDTEAIFEEQELTDLRPLSTSELATLGMKSSSFIQSSKTPFETLVKLMQDFPKFSASISAHNVSANFSEEYQRGHIQRVPRGINALWMNGLQLIERQIEPFALVEMLRDERKLIDAVRNLGLNGDEAISLLGHESIAATQSDAGGTMRFDWTDKPEDGQAIIWLNDLENDDRYDQYPDDLSSLLQRTFPGQIPPIARNIFNVVTAIDPSDADDLTILGQLMALIGRGIPIRFGIVPAASSPESSNLAKIVYHLIRTYGFESLRNYIESVGEEPNAALGEAKFSQIINGLTPVAGNHPIKFLEVMENDDFNSQLEMAGRWISRLKASDKSSPIFFVNGVSTPRVANWLQRMSMQVSEDLQTIQRGIYHGVISDDVWVPGIFLEGALLRRNEYVSIDDAHPLRVLDVSKLYGDHKDLFGIIPVRNCDPQTERESWAAVTVITDAMTSRGVQLLISALKFKQSRPGVRLDIIHNPATTERASDLNKSSRAEASLLGLGMSEELEKIVREAEASSSTGAYAVALKRFLSYAKIQPGSSCVILNGRMIGPIAPEHTFTEDDFVQLLAFERKSRILPVFEALDDLGLGNRISGPISAAKLTSIAALSTISNLPEGIFESSSSARTMIYRKWDAKHTTIEVGDAKTASIHLVALLNPLSEQAQRWAPLLKVLSELDGVHLKLFLNPKEKLEELPIKRFFRYVLESKPSFDDGGAIRTGQAIFSGLPSEALLTLGMDVPPAWLVAAKESMHDLDNIKLSSINSDIDASYELEHILIQGHSREGKSSPPRGAQLVLGTESEPHMTDTIVMANLGFFQFQANPGVYNIHLKEGRSAETFEIESVGAQGWAAVPGDEGTSLALLDFQGTTLYPRLLRKPGMEEVDVLEQADQVTENIVSKGFKLAESFLGNVLGKKSTANLQHAEINIFSVASGHLYERMLNIMMVSVMRHTKHTVKFWFIEQFLSPSFKEFIPHLAEEYGFKYEMVTYKWPHWLRHQKEKQREIWGYKILFLDVLFPLSIDKVIFVDADQIIRTDMMDLVKLDLEGAPYGFTPMCDSRTEMEGFRFWKQGYWANYLRGRPYHISALYVVDLRRFRAIAAGDRLRQQYQALSADPNSLANLDQDLPNHMQFQLPIHSLPQEWLWCETWCSDESQGKARTIDLCNNPETKEPKLDRARRQVPEWTKYDDEIAAFAQRVKAAKSPDEDERRTNLERNTKSRNFEERLHTKDEL

SEQ ID NO: 4057 - protein, 1298 aa, Unknown
  Description of Unknown: Saccharomycetaceae sequence
MLHLRRQLAVTWLLIATVAAYDAVRLWQSVVRAGINDAGPWYGALTGAEDEISVQDLWNELGDDESTVLELLYETSVGVVEEVKQGARANWFELNGKRYSGSDDSFYLQSGELDAQRAVPDAAVLRPGEGVVGTAPDAPIVVLYGQAGSEEFEAFNWNLYREAQQGRIRLVWRPTCEGAGCGQPRVGDIYAHEYSVKEGSWDSTVRGQLAVPSEFAAKKYRLGGVKDEDLSLLDLKVATLIAEQYNRTSDFTETLEYARQLIDNFPLLAEHLVDREVDTNSTEAQLTEVATTGVTYDAIGLYINGQPWKLSSLDMRTFVLAIISEQKKMQYLMETLQSKYNQFGIEDARQLLSKFCQVSVVNAQDMQPARYDFHRVPGFSESVIYFNDIEKDPQYSNMSTRLDSVFEKSDYGVIPSYRKNWNELVFVVDFDSLDNEDTREILSGMVRAFSVADEGYPQRIGLLPMYHGDSNPIVEEIYRSKESGLANVKNYLRLLVLGERPESEDSVEIPPVKKILEDFSIFNNSLLINGQIHPFKKNTWHYLIASTLKHDVEILKSMVGRFPSPNVRELLHSKSLTTRDSRYIVDYFDDATYTVEKISALAELAQRVTVYEKGEPKQLYHTVTLVDDFESKPALQRLKNLLQVKFNAIRIRLIHIGVSSTSYGALQSSLTENKDLSKTIDALLAKAKESPKFDTSTVEKLEAWVPDLTREKIAGTSSTGTSFAIINGRYIQFGPESSISKVLWESLLQREATRTLDLLGIVDAQVPGMRDTKEDADFVEQLTSILSYLFYSGSNIFHSGIERTSESTLPRLNILDMLPEELAGALITNGNPTGQVELAVIVDPLEERSQTFLRLVDQVKSLSFLDIRILLLPTKKLTVFPIHRIYSDDVLSLNPVEAFDVSRDVPHYLYPEPNNPDVASIIIEGYAFDEKLPVSKTTVESHAGVCLELLNADGEVVSSSSTMSVFGYFQFLVPNLGYGFTVRSCSPEYEITSFSTDAKADYVPSAEISIIDVIPHRVFVKLRETHRNAAEYNTDQQEGIHIYVTIHDPSDEPSFKEKLFAILAGTPQHTPVTFWLAHGAPLSPELHTILRVAESLPGRHVACRPVRYAWPSWLRPQRFVDRRLDAARLLFLDTALPHTMHGRLIMLSLTEERTPDVATLSGLQTTAYLTMRPHRGHGYWEEGYWQNYLGKHNLRFYNPSRTFVVDLDRYRSLTAGDHLRVHYQRLSADVTSLLDIDQDLVNSVQLLLKIRPLRINKFLPPATKEWIAAWPSNSANDWTGNPPDTESASEEALDHDEL

SEQ ID NO: 4058 - protein, 1633 aa, Unknown
  Description of Unknown: Pyrus x bretschneideri sequence
MRIRFKSAFCVMIVLVCLGASGIGLVSGQNRRPKNVQAAVRAKWSGTPLLLEAGELLSKEQKDHFWDFIDAWHHSEKDDAESYTAKGCLKKIVKHGLSILDKPLASLFEFSLMLRSTSPRLVLYRQLAEESLSSFPLVDETNSSNDGGISETNELMEGQRSDLLNIGRNPKSPNGKCCWVDTGGALFFDPADLKIWLQSPRDFSGDSFQQPELFEFDHIHFDSSIGSPVAVLYGALGTDCFREFHLTLVEAAKEGKAKYVVRQVLPSGCDAKIDRCGAVGTRDSLNLGGYGVELALKNMEYKAMDDSAIKKGVTLEDPRIEDLSQEVRGFIFSKILERKPELSSEIMAFRDYLLSSTISDTLDVWELKDLGHQTAQRIVQASDPLQAMQEINQNFPSIVSSLSRMKLNDSVKDEISANQRMIPPGKSLMALNGALLNIDDIDLYLLFDLVHQDLSLADQFSKLKIPHGTIRKLLASLPPPESNMLRVDFRSDHVQFLNNIEEDDMYRRWRSNLNEILMPVFPGQLRYIRKNLFHAVSVIDPSTVCGLQSIDMILSLYENNFPMRFGVVLYSSKFIKQIETGGSEDDHEIEEDMSSLIIRLFIYIKENHGIQTAFQFLSNINKLRIDSEDSADDALEMHHVEGAFIETVLPQTKSPPQDLLLKLEKEQTFKELSQESSMFVFKLGLAKLQCCLLMNGLVLESNEDSLINSMNDELPRIQEQVYYGHINSRTDVLDKFLSESGTTRYNPQIIAGGKPRFISLPTSVLGGDGVLNDINYLHSPETMDDLKPVTHLLAVNIASKKGMKLLHEGLQYLIEASNRARVGVLFSVNQDADVSSHLFVKVFEITASSYSHKKNVLDFLDQMCSFYEHNYLLASSKGAESTQEFIDKVCELAEANGLSSKAYRFSLSEFSDEKLRKSMNKVSQFLYRQLGLESGVNAVITNGRVTVVNDGGTFLSHDLRLLESLEFAQRIKHIVEIIEEVKWEDMDPDILTSKFISDTIMSVSSSMAMRDRSSESARFEVLSAQYSAIVLNNENASIHIDAVIDPLSPFGQKLSSILRVLWKYTQPSMRIVLNPLSSLVDLPLKNYYRYVLPTVDDFSSTDYTINGPKAFFANMPLSKTLTMNLDVPDPWLVEPVIAVHDLDNILLENLGETRTLQAVFELEALVLTGHCSEKGHDPPRGLQLIIGTKSTPHLVDTLVMANLGYWQMKVSPGVWYLQLAPGRSSELYFLKEDGNESGSKTLSKRITIDDLRGKVVHMEVAKKKGKEHEKLLVPDGEDNSHDNKEGSSWNSNFLKWASGFIGGGEQSKKSESTSAEQGKGGRHGKTINIFSIASGHLYERFLKIMILSVLKNTRRPVKFWFIKNYLSPQFKDVIPPMAQEYGFEYELITYKWPTWLHKQKEKQRIIWAYKILFLDVIFPLSLEKVIFVDADQIIRADMGELYDMDIKGRPLAYTPFCDNNKDMDGYRFWRQGFWKEHLRGRSYHISALYVVDLKKFRETAAGDNLRVFYETLSKDPNSLSNLDQDLPNYAQHTVPIFSLPQEWLWCESWCGNATKSKAKTIDLCNNPMTKEPKLQGARRIVSEWPDLDLEARQFTAKILGDELDIQEPAPLPNESEKSVTGSPEEDLESKAEL

(The sequence listing continues in the following parts.)

What is claimed is:

1. A method for producing select water-soluble cannabinoid compounds comprising the step of:
providing a yeast cell expressing a heterologous nucleotide sequence, operably linked to a promoter, encoding a UDP-glucosyltransferases (UGT) having glycosylation activity towards a cannabinoid having at least one glycosylation site selected from the group consisting of: cannabidiol (CBD), cannabidiolic acid (CBDA), delta-9-tetrahydrocannabinol (THC), tetrahydrocannabinolic acid (THCA); cannabigerol (CBG), and cannabigerolic acid (CBGA);
introducing said cannabinoid having at least one glycosylation site to said yeast cell; and
glycosylating said cannabinoid forming a cannabinoid glycoside.

2. The method of claim 1, wherein said step of introducing comprises the step of introducing said cannabinoid having at least one glycosylation site to a yeast cell culture.

3. The method of claim 1, wherein said UGT comprises a UGT selected from the group consisting of: SEQ ID NOs. 1-9181.

4. The method of claim 1, wherein said yeast cell comprises a yeast cell selected from the group consisting of: a Pichia pastoris cell, a Saccharomyces cerevisiae cell, and a Kluyveromyces marxianus cell.

5. The method of claim 1, wherein said nucleotide sequence encoding a heterologous UGT is codon optimized for expression in a yeast cell.

6. A method for producing water-soluble cannabinoid compounds comprising:
providing a yeast cell expressing a heterologous nucleotide sequence, operably linked to a promoter, encoding a UDP-glucosyltransferases (UGT) having glycosylation activity towards a cannabinoid;
introducing said cannabinoid having at least one glycosylation site to said yeast cell;
glycosylating said cannabinoid forming a cannabinoid glycoside; and
wherein said cannabinoid having at least one glycosylation site is selected from the group consisting of: delta-Δ⁹-tetrahydrocannabinol (THC), delta-Δ8-tetrahydrocannabinol (Delta-8-THC), 11-Hydroxy-Δ⁹-tetrahydrocannabinol (11-OH-THC), tetrahydrocannabinolic acid (THCA), cannabidiol (CBD), cannabichromene (CBC), cannabigerol (CBG), cannabigerolic acid (CBGA), cannabinol (CBN), cannabidiolic acid (CBDA), cannabidiolic acid (CBDA), cannabicyclol (CBL), cannabivarin (CBV), tetrahydrocannabivarin (THCV), cannabigerivarin (CBGV), cannabichromevarin (CBCV), cannabidivarin (CBDV), cannabicyclol (CBL), cannabielsoin (CBE), cannabifuran (CBF); and cannabinodiol (CBDN).

7. The method of claim 6, wherein said step of introducing comprises the step of introducing said cannabinoid having at least one glycosylation site to a yeast cell culture.

8. The system of claim 6, wherein said UGT comprises a UGT selected from the group consisting of: SEQ ID NOs. 1-9181, SEQ ID NO. 9188, SEQ ID NO. 9208, SEQ ID NO. 9210, SEQ ID NO. 9212, SEQ ID NO. 9214, SEQ ID NO. 9216, SEQ ID NO. 9218, SEQ ID NO. 9220, SEQ ID NO. 9236, SEQ ID NO. 9238, SEQ ID NO. 9240, SEQ ID NO. 9242, and SEQ ID NO. 9244.

10. The system of claim 6, wherein said yeast cell comprises a yeast cell selected from the group consisting of: a Pichia pastoris cell, a Saccharomyces cerevisiae cell, and a Kluyveromyces marxianus cell.

11. The system of claim 6, wherein said bioreactor comprises a fermenter.

11. The system of claim 6, wherein said nucleotide sequence encoding a heterologous glycosyltransferase is codon optimized for expression in a yeast cell.

12. A method of glycosylating a cannabinoid comprising the steps of:
providing a UDP-glucosyltransferases (UGT) having glycosylation activity towards a cannabinoid, wherein said UGT is selected from the group consisting of: SEQ ID NOs. 1-9181, and SEQ ID NO. 9208, SEQ ID NO. 9210, SEQ ID NO. 9212, SEQ ID NO. 9214, SEQ ID NO. 9216, SEQ ID NO. 9218, SEQ ID NO. 9220, SEQ ID NO. 9236, SEQ ID NO. 9238, SEQ ID NO. 9240, SEQ ID NO. 9242, and SEQ ID NO. 9244; and
introducing a cannabinoid having at least one glycosylation site to said UGT having glycosylation activity towards said cannabinoid forming a cannabinoid glycoside.

13. The method of claim 12, wherein said cannabinoid having at least one glycosylation site is selected from the group consisting of: cannabidiol (CBD), cannabidiolic acid (CBDA), delta-9-tetrahydrocannabinol (THC), and tetrahydrocannabinolic acid (THCA).

14. The method of claim 12, wherein said cannabinoid having at least one glycosylation site is selected from the group consisting of: delta-Δ⁹-tetrahydrocannabinol (THC), delta-Δ8-tetrahydrocannabinol (Delta-8-THC), 11-Hydroxy-Δ⁹-tetrahydrocannabinol (11-OH-THC), tetrahydrocannabinolic acid (THCA), cannabidiol (CBD), cannabichromene (CBC), cannabigerol (CBG), cannabigerolic acid (CBGA), cannabinol (CBN), cannabidiolic acid (CBDA), cannabidiolic acid (CBDA), cannabicyclol (CBL), cannabivarin (CBV), tetrahydrocannabivarin (THCV), cannabigerivarin (CBGV), cannabichromevarin (CBCV), cannabidivarin (CBDV), cannabicyclol (CBL), cannabielsoin (CBE), cannabifuran (CBF); and cannabinodiol (CBDN).

15. The method of claim 12, wherein said step of introducing comprises the step of introducing selected from the group consisting of:
introducing a cannabinoid having at least one glycosylation site to a UGT having glycosylation activity towards said cannabinoid forming a cannabinoid glycoside, in an in vitro system;
introducing a cannabinoid having at least one glycosylation site to a UGT having glycosylation activity towards said cannabinoid forming a cannabinoid glycoside, in an ex vivo system; and
introducing a cannabinoid compound to a UGT having glycosylation activity towards said cannabinoid forming a cannabinoid glycoside, in an in vivo system.

16. The method of claim 15, wherein said ex vivo system comprises a bioreactor system.

17. The method of claim 15, wherein said in vitro system comprises a synthetic cannabinoid synthesis system.

18. The method of claim 15, wherein said in vivo system comprises an in vivo system selected from the group consisting of: a Cannabis plant or part thereof, and a cell culture.

19. The method of claim 18, wherein said cell culture is selected from the group consisting of: a yeast cell culture, a bacterial cell culture, an algal cell culture, a fungi cell culture, and a plant cell culture.

20. The method of claim 19, wherein said yeast cell cultures comprises a yeast cell culture selected from the group consisting of: a Pichia pastoris cell culture, a Saccharomyces cerevisiae cell culture, and a Kluyveromyces marxianus cell culture.
